United States Patent Application Publication US 2011/0214205 A1 - sequence listing, part 19

SEQ ID NO: 80545 - protein, 99 aa, Setaria italica
  Transcript Sequence Number=SeqID_14571
  Gene Ontology: Mol. function=protein binding; Cellular component =cytoskeleton; Biological process=regulation of actin filament polymerization
  Homolog annotation: Hit_ID=B6TA29; Match level="QueryCoverage=100%, HitCoverage=30%, E-value=4e-48, Identity=94%"; Hit description =ARP2/3 complex 34 kDa subunit
  Pfam annotation: Domain name=P34-Arc; Domain location=1-99; Score= -121.3; E_value=0.029; Accession=PF04045.6; Description=Arp23 complex, 34 kD subunit p34-Arc
APLKVLLKHLASKTVAPNVDKLVALVHRPNESFFLAPQADKVTIVYPMRFQDSIDIVLATSFLQEFVEARRTAALNNVPSCMWSPAPPLELKGVPADAL

SEQ ID NO: 80546 - protein, 77 aa, Setaria italica
  misc_feature (20)..(20): Xaa can be any naturally occurring amino acid
  Transcript Sequence Number=SeqID_14572
  Gene Ontology: Mol. function=protein binding; Cellular component =cytoskeleton; Biological process=regulation of actin filament polymerization
  Homolog annotation: Hit_ID=B6TA29; Match level="QueryCoverage=90%, HitCoverage=21%, E-value=1e-26, Identity=87%"; Hit description =ARP2/3 complex 34 kDa subunit
KINLTKLPPDEEQRNAILTXIASVREVVLGAPLKVLLKHLASKTVAPNVDKLVALVHRPNESFFLAPRYDFRDSHII

SEQ ID NO: 80547 - protein, 112 aa, Setaria italica
  Transcript Sequence Number=SeqID_14573
  Gene Ontology: Mol. function=protein binding; Cellular component =cytoskeleton; Biological process=regulation of actin filament polymerization
  Homolog annotation: Hit_ID=B6TA29; Match level="QueryCoverage=72%, HitCoverage=25%, E-value=1e-41, Identity=100%"; Hit description =ARP2/3 complex 34 kDa subunit
MDIDCHTVEFDDVRYHIQFSMRNPKVMVLSVALPLPPPEAILYDGLPLGAIEAIKAAYGPVVQILDPPKDGFDLTMKINLTMFQQNLQWCTQHNLSNRCNLCQDSISLFFIW

SEQ ID NO: 80548 - protein, 156 aa, Setaria italica
  Transcript Sequence Number=SeqID_14574
  Gene Ontology: Mol. function=protein binding; Cellular component =cytoskeleton; Biological process=regulation of actin filament polymerization
  Homolog annotation: Hit_ID=B6TA29; Match level="QueryCoverage=99%, HitCoverage=47%, E-value=5e-84, Identity=96%"; Hit description =ARP2/3 complex 34 kDa subunit
  Pfam annotation: Domain name=P34-Arc; Domain location=1-136; Score =1.7; E_value=2.4e-10; Accession=PF04045.6; Description=Arp23 complex, 34 kD subunit p34-Arc
LLAFQADKVTIVYPMRFQDSIDIVLATSFLQEFVEARRTAALNNVPSCMWSPAPPLELKGVPADALNANAGFVTFVVYPRHVEGKKLDRTVWNLLTFHAYVSYHVKCSEGFMHTRMRRRVESLIQALDRAKSDAEKLKKLVHGASFNRLSLKNEGN

SEQ ID NO: 80549 - protein, 209 aa, Setaria italica
  misc_feature (179)..(179): Xaa can be any naturally occurring amino acid
  Transcript Sequence Number=SeqID_14575
  Gene Ontology: Mol. function=protein binding; Cellular component =membrane
  Homolog annotation: Hit_ID=B6TVP8; Match level="QueryCoverage=75%, HitCoverage=72%, E-value=7e-82, Identity=93%"; Hit description =Stromal cell-derived factor 2
  Pfam annotation: Domain name=MIR; Domain location=75-209; Score=26.2; E_value=9e-06; Accession=PF02815.11; Description=MIR domain
  Subcellular localization annotation: CTP_CleavageSite=23; ConfidenceScore=5.35e-01
MCKGKADASSSSSPPRSRRALAVAMAASLLALAVALLVSAGFSGVDRGTAAPVESEGGEVTYGSVIKLMHEKTKHRLHSHDVPYGSGSGQQSVTGFPEGDDSNSYWIIRPTPDSSSKQGDAIETGSIVKLQHMRTRRWLHSHLHASPLSGNLEVSCYGGDELSDTGDYWRLEIEGSGKXVWKRDQKIRLRHVDTGGYLHSHNKKYNRLG

SEQ ID NO: 80550 - protein, 62 aa, Setaria italica
  Transcript Sequence Number=SeqID_14576
  Pfam annotation: Domain name=Ribosomal_L34e; Domain location=3-46; Score=-21.6; E_value=0.048; Accession=PF01199.10; Description =Ribosomal protein L34e
QELQLERALHHRDGSQFCGSYGGVLSGTAVRERIIRAFLVEEQKIVKKVLKIQKTKDKTATK

SEQ ID NO: 80551 - protein, 98 aa, Setaria italica
  Transcript Sequence Number=SeqID_14577
  Gene Ontology: Mol. function=structural constituent of ribosome; Cellular component=ribonucleoprotein complex; Biological process =translation
  Homolog annotation: Hit_ID=Q42351; Match level="QueryCoverage=78%, HitCoverage=69%, E-value=3e-13, Identity=67%"; Hit description=60S ribosomal protein L34-1
  Pfam annotation: Domain name=Ribosomal_L34e; Domain location=1-52; Score=-2.4; E_value=0.0013; Accession=PF01199.10; Description =Ribosomal protein L34e
  Subcellular localization annotation: CTP_CleavageSite=43; ConfidenceScore=5.14e-01
MNVSSYCTCFKLQIPHLRPAEYKRSRLSRNRRTVNRPYGGVLSGTAVRERCILPWIFWEVTGKKIQGIPHLRPAEYKRSRLSRNRRTVNRPNDPLPNC

SEQ ID NO: 80552 - protein, 125 aa, Setaria italica
  Transcript Sequence Number=SeqID_14578
  Gene Ontology: Mol. function=protein dimerization activity; Cellular component=nucleus; Biological process=regulation of transcription, DNA-dependent
  Homolog annotation: Hit_ID=B4FPE1; Match level="QueryCoverage=100%, HitCoverage=63%, E-value=7e-55, Identity=86%"; Hit description=IAA23- auxin-responsive Aux/IAA family member
  Pfam annotation: Domain name=AUX_IAA; Domain location=1-122; Score =89.8; E_value=9.5e-24; Accession=PF02309.8; Description=AUXIAA family
RARAVGWPPVRAYRRNALRDEAKLVKVAVDGAPYLRKVDLAAHDGYAGLLRALHGMFASCLGANGAGRLVDAATGAEYVPTYEDKDGDWMLVGDVPFKMFVDSCKRIRLMKSSEAVNLSPRTSSQ

SEQ ID NO: 80553 - protein, 83 aa, Setaria italica
  Transcript Sequence Number=SeqID_14579
  Gene Ontology: Mol. function=structural constituent of ribosome; Cellular component=ribonucleoprotein complex; Biological process =translation
  Homolog annotation: Hit_ID=P40590; Match level="QueryCoverage=79%, HitCoverage=55%, E-value=5e-15, Identity=65%"; Hit description=60S ribosomal protein L34
  Pfam annotation: Domain name=Ribosomal_L34e; Domain location=6-60; Score=51.3; E_value=3.7e-12; Accession=PF01199.10; Description =Ribosomal protein L34e
  Subcellular localization annotation: CTP_CleavageSite=50; ConfidenceScore=5.03e-01
YLVLFLPFLQIPHLRPAEYKRSRLSRNRRTVNRPYGGVLSGTAVRERIIRAFLVEEQKIVKKVLKIQKTKDKAALRFHSGALL

SEQ ID NO: 80554 - protein, 119 aa, Setaria italica
  Transcript Sequence Number=SeqID_14580
  Gene Ontology: Mol. function=structural constituent of ribosome; Cellular component=ribonucleoprotein complex; Biological process =translation
  Homolog annotation: Hit_ID=P40590; Match level="QueryCoverage=79%, HitCoverage=79%, E-value=4e-43, Identity=91%"; Hit description=60S ribosomal protein L34
  Pfam annotation: Domain name=Ribosomal_L34e; Domain location=5-103; Score=227.6; E_value=3.2e-65; Accession=PF01199.10; Description =Ribosomal protein L34e
MVQRLTYRKRHSYATKSNQTRVVKTPGGRLVYQYTKKRASGPKCPVTGKKIQGIPHLRPAEYKRSRLSRNRRTVNRPYGGVLSGQAVRERIIRAFLVEEQKIVKKVLKIQKTKEKTTSK

SEQ ID NO: 80555 - protein, 215 aa, Setaria italica
  Transcript Sequence Number=SeqID_14581
  Gene Ontology: Mol. function=protein dimerization activity; Cellular component=nucleus; Biological process=regulation of transcription, DNA-dependent
  Homolog annotation: Hit_ID=P0C132; Match level="QueryCoverage=83%, HitCoverage=65%, E-value=2e-73, Identity=76%"; Hit description=Auxin- responsive protein IAA30
  Pfam annotation: Domain name=AUX_IAA; Domain location=2-207; Score =317.9; E_value=2e-92; Accession=PF02309.8; Description=AUXIAA family
VEEGRKAEEDEAAAAADVVAAAASPAAAATGGANMKRSPSQSSVVTTDAQPDADKPRAPKAQAVGWPPVRSFRKNILSVQSCQKGGGDMDDGKSGAAAFVKVSMDGAPYLRKVDLRMYGSYQELSKALEKMFSSFTIGSCGGSQGMKGMNETKLADLLSGSEYVPTYEDKDGDWMLVGDVPWEMFVESCKRLRIMKGSEAVGLAPRAMEKCKNSC

SEQ ID NO: 80556 - protein, 119 aa, Setaria italica
  Transcript Sequence Number=SeqID_14582
  Gene Ontology: Mol. function=structural constituent of ribosome; Cellular component=ribonucleoprotein complex; Biological process =translation
  Homolog annotation: Hit_ID=P40590; Match level="QueryCoverage=79%, HitCoverage=79%, E-value=1e-43, Identity=92%"; Hit description=60S ribosomal protein L34
  Pfam annotation: Domain name=Ribosomal_L34e; Domain location=5-103; Score=226.3; E_value=7.6e-65; Accession=PF01199.10; Description =Ribosomal protein L34e
MVQRLTYRKRHSYATKSNQTRVVKTPGGKLVYQYTKKRASGPKCPVTGKKIQGIPHLRPAEYKRSRLSRNRRTVNRPYGGVLSGTAVRERIIRAFLVEEQKIVKKVLKIQKTKDKTATK

SEQ ID NO: 80557 - protein, 119 aa, Setaria italica
  Transcript Sequence Number=SeqID_14583
  Gene Ontology: Mol. function=structural constituent of ribosome; Cellular component=intracellular; Biological process=translation
  Homolog annotation: Hit_ID=P40590; Match level="QueryCoverage=98%, HitCoverage=97%, E-value=1e-43, Identity=76%"; Hit description=60S ribosomal protein L34
  Pfam annotation: Domain name=Ribosomal_L34e; Domain location=5-103; Score=226.2; E_value=8.1e-65; Accession=PF01199.10; Description =Ribosomal protein L34e
MVQRLTYRKRHSYATKSNQTRVVKTPGGRLVYQYTKKRASGPKCPVTGKKIQGIPHLRPAEYKRSRLSRNRRTVNRPYGGVLSGTAVRERIIRAFLVEEQKIVKKVLKIQKTKDKASKS

SEQ ID NO: 80558 - protein, 264 aa, Setaria italica
  Transcript Sequence Number=SeqID_14584
  Gene Ontology: Mol. function=protein dimerization activity; Cellular component=nucleus; Biological process=regulation of transcription, DNA-dependent
  Homolog annotation: Hit_ID=P0C132; Match level="QueryCoverage=100%, HitCoverage=100%, E-value=5e-91, Identity=66%"; Hit description =Auxin-responsive protein IAA30
  Pfam annotation: Domain name=AUX_IAA; Domain location=5-256; Score =372.6; E_value=7.2e-109; Accession=PF02309.8; Description=AUXIAA family
MAADLGFEETELRLGLPGGGGGGGGGDGEGTRSASGKRGFAETIDLKLKLEPAAAAVVAEDEEVDAAAEESSPAGKMKRSPSQSSVVTAAAQPDPAEKPRAPKAQVVGWPPVRSFRKNIMSVQSEKGAGSKDATDGDKSSPAASGGAAFVKVSLDGAPYLRKVDLKMYKSYQELSKALEKMFSSFTIGSCGSQGMNGMNESKLVDLLNGSEYVPTYEDKDGDWMLVGDVPWEMFVESCKRLRIMKGSEAIGLAPRAMEKCKNRS

SEQ ID NO: 80559 - protein, 315 aa, Setaria italica
  misc_feature (167)..(167): Xaa can be any naturally occurring amino acid
  Transcript Sequence Number=SeqID_14585
  Gene Ontology: Cellular component=nuclear chromosome; Biological process=microsporogenesis
  Homolog annotation: Hit_ID=Q76CY8; Match level="QueryCoverage=97%, HitCoverage=49%, E-value=1e-151, Identity=83%"; Hit description =Essential protein for meiotic synapsis
PDQMRSSACKMIRTLVSLMRTLDPMPEERTILMKLLYYDDVTPEDYEPPFFKGCADNEAINIWNKNPLKMEVGNVNSKHLVLALKVKSVLDPCDDNNINSGDDGMSVDNGTYQDDDFSDTEVRPSEADRYVVAPNDGKCKGQSTGTISEDDTQDAAHEEELTAQVKXWICSREIGTINVSDVLSNFPDISLELVEDIMERLLKDGVLSRASKDGYTVNQTVDPKTPHIKKEVIMQNVSPTEGTKQNNGDLIYMKALYHALPMDYVTIAKLQGKLDGEASQNTVRKLIDKMVQDGYVKNSAKPKELGTKDKYNYNY

SEQ ID NO: 80560 - protein, 58 aa, Setaria italica
  Transcript Sequence Number=SeqID_14586
  Gene Ontology: Mol. function=microtubule motor activity; Cellular component=microtubule associated complex; Biological process =microtubule-based movement
MGAPGEEMTAEAKEERIMVSVRLRPLNGREAGDSSDWECISPTTIMFRSTVPERAMFP

SEQ ID NO: 80561 - protein, 159 aa, Setaria italica
  Transcript Sequence Number=SeqID_14587
  Gene Ontology: Mol. function=microtubule motor activity; Cellular component=microtubule associated complex; Biological process =microtubule-based movement
  Homolog annotation: Hit_ID=B9R839; Match level="QueryCoverage=81%, HitCoverage=14%, E-value=2e-52, Identity=70%"; Hit description=ATP binding protein, putative
  Pfam annotation: Domain name=Kinesin; Domain location=39-158; Score= -139.7; E_value=3.9e-06; Accession=PF00225.15; Description=Kinesin motor domain
MLLAGEGVCAGGGGSAAMGAPGEEMTAEAKEERIMVSVRLRPLNGREAGDSSDWECISPTTIMFRSTVPERAMFPTAYTYDRVFGPSCSTRQVYEEGAKEVALSVVSGINSSIFAYGQTSSGKTYTMTGITEYSMLDIYDYIDKHPEREFILKFSAIEI

SEQ ID NO: 80562 - protein, 201 aa, Setaria italica
  misc_feature (193)..(193): Xaa can be any naturally occurring amino acid
  Transcript Sequence Number=SeqID_14588
REYADISDHSCEQTCGVKENSFDDITAGKATEIVSSLGIIDEVSNRQKTSENVSNSDVDKSSTGNGSLACSFSQSCHDCIDNDEYWNTGVAHGNEPESVKILEELSPIDESSTDMVSLPKMVESDLCGSTEMNCTSLEEVVQMQGECQLDSVVCCGVRPKHMLLDAEIGHTVGDYTFSFDKTLDLTQPINFVXAQDGRLES

SEQ ID NO: 80563 - protein, 141 aa, Setaria italica
  Transcript Sequence Number=SeqID_14589
  Gene Ontology: Mol. function=metal ion binding
  Homolog annotation: Hit_ID=Q2RA96; Match level="QueryCoverage=65%, HitCoverage=12%, E-value=5e-12, Identity=36%"; Hit description=PHD -finger family protein, expressed
  Pfam annotation: Domain name=PHD; Domain location=5-54; Score=27.9; E_ value=2.3e-05; Accession=PF00628.21; Description=PHD-finger
TQDTVCEVCGNIGYKHLLVCCRDCKCSAVHLYCLDKVIFDASLAEWWCDECLQRRGEVPCNRSLERVSSQRSPNHDHFGSTVQQQVTKRVKSAKNAGPRRKSKEDIPSANILWTRMIFRHPQRLIMFYHIEVIYLKHKSKG

SEQ ID NO: 80564 - protein, 90 aa, Setaria italica
  misc_feature (21)..(21): Xaa can be any naturally occurring amino acid
  Transcript Sequence Number=SeqID_14590
  Subcellular localization annotation: CTP_CleavageSite=56; ConfidenceScore=5.20e-01
GVEQALEKYRMKKDIFNGVAXGFATGAAMGFRVGSSRTAVLSGSALALTSVLLDVTGMRTTNEEKKRPPLAILNGKSSICFRVPLLLQTC

SEQ ID NO: 80565 - protein, 399 aa, Setaria italica
  Transcript Sequence Number=SeqID_14591
  Gene Ontology: Mol. function=protein serine/threonine phosphatase activity; Cellular component=protein serine/threonine phosphatase complex; Biological process=protein amino acid dephosphorylation
  Homolog annotation: Hit_ID=B4F9M4; Match level="QueryCoverage=100%, HitCoverage=100%, E-value=0.0, Identity=89%"; Hit description =Protein phosphatase 2C
  Pfam annotation: Domain name=PP2C; Domain location=52-328; Score =107.9; E_value=3.4e-29; Accession=PF00481.13; Description=Protein phosphatase 2C
MLAAVMDYFSSCWGPRSRAGHRGKGSDAAGRQEGLLWYKDAGQLATGEFSMAVVQANQLLEDQSQVESGSLSLADPGPQGTFVGVYDGHGGPETSRFINDHLFNHLMKFATEHKCISVDVIRKAFQATEEGFLSLVSREWALKPQIASVGSCCLVGVICSGTLYVANLGDSRAVLGRLVKATGEVLAMQLSSEHNACYEEVRQELQSAHPDDPQIVVLKHNVWRVKGLIQISRSIGDVYLKRPEFNREPLHSKFRLRETFQKPILSSDPQITEHRIQPNDQFVIFASDGLWEHLSNQEAVDLVQNSPRNGIARKLVKVAMQEAAKKREMRYSDLKKIDRGVRRHFHDDITVVVIFLDSNAMSKASWSKSPSVSIRGGGVTLPAKSLAPFSAPAQLNSTY

SEQ ID NO: 80566 - protein, 110 aa, Setaria italica
  Transcript Sequence Number=SeqID_14592
  Gene Ontology: Mol. function=DNA-directed RNA polymerase activity; Cellular component=chloroplast; Biological process=transcription
  Homolog annotation: Hit_ID=O82725; Match level="QueryCoverage=100%, HitCoverage=11%, E-value=6e-61, Identity=100%"; Hit description=DNA -directed RNA polymerase
LVKQTVMTSVYGVTYIGARQQITKRLQEKGLITDDKLLYDVSCYATRVTLDALGQMFQSARGIMAWLGDCAKMIASKNQPVKWTSPVGLPVVQPYKKYKNYMIRTSLQCL

SEQ ID NO: 80567 - protein, 81 aa, Setaria italica
  Transcript Sequence Number=SeqID_14593
  Gene Ontology: Mol. function=unfolded protein binding; Cellular component=chloroplast; Biological process=cellular protein metabolic process
  Homolog annotation: Hit_ID=P08823; Match level="QueryCoverage=79%, HitCoverage=11%, E-value=2e-28, Identity=93%"; Hit description =RuBisCO large subunit-binding protein subunit alpha, chloroplastic (Fragment)
EGEVVVEKVKESEWEVGYNAMTDKYENLMESGVIDPAKVTRCALQNAASVAGMVLTTQAIVVEKPKPKPRVAEPAEGALSV

SEQ ID NO: 80568 - protein, 577 aa, Setaria italica
  Transcript Sequence Number=SeqID_14594
  Gene Ontology: Mol. function=unfolded protein binding; Cellular component=chloroplast; Biological process=cellular protein metabolic process
  Homolog annotation: Hit_ID=P08823; Match level="QueryCoverage=93%, HitCoverage=99%, E-value=0.0, Identity=86%"; Hit description=RuBisCO large subunit-binding protein subunit alpha, chloroplastic (Fragment)
  Pfam annotation: Domain name=Cpn60_TCP1; Domain location=58-561; Score=603.8; E_value=1.7e-178; Accession=PF00118.16; Description=TCP- 1cpn60 chaperonin family
  Pfam annotation: Domain name=zf-ZPR1; Domain location=173-299; Score=- 89.4; E_value=0.074; Accession=PF03367.5; Description=ZPR1 zinc -finger domain
  Pfam module annotation: Pfam domain module=Cpn60_TCP1::zf-ZPR1; Domain location=58-561::173-299
  Subcellular localization annotation: CTP_CleavageSite=35; ConfidenceScore=5.27e-01
MASANAISTASLLRPLSQGRARRARNGRSQRFVVRADAKDIAFDQKSRAALQAGVEKLANAVGVTLGPRGRNVVLDEYGAPKVVNDGVTIARAIELYDPMENAGAALIREVASKTNDSAGDGTTTASVLAREIIKLGLLSVTSGANPVSLKKGIDKTVQGLIQELENKARPVKGGGDIKAVASISAGNDEFIGSMIAEAIDKVGPDGVLSIESSSSFETTVDVEEGMEIDRGYISPQFVTNLEKSIVEFENAKVLITDQKITSIKEILPILEKTTQLRAPLFIIAEDITGEALATLVVNKLRGILNVAAIKAPSFGERRKAILQDIAIVTGAEFLAKDLGLLVENATEEQLGTARKVTIHQTTTTLIADAASKDEIQARVAQLKKELAETDSVYDTEKLAERIAKLAGGVAVIKVGAATETELEDRQLRIEDAKNATFAAIEEGIVPGGGTAYVHLSTIVPSIKETIEDPDERLGADIIQKALVAPASLIAHNAGVEGEVVVEKVKESEWEVGYNAMTDKYENLMESGVIDPAKVTRCALQNAASVAGMVLTTQAIVVEKPKPKPRVAEPAEGALSV

SEQ ID NO: 80569 - protein, 400 aa, Setaria italica
  Transcript Sequence Number=SeqID_14595
  Homolog annotation: Hit_ID=B6TGN3; Match level="QueryCoverage=100%, HitCoverage=81%, E-value=1e-129, Identity=62%"; Hit description=Low temperature viability protein
YLSHLRELRPSAAAASSFVPSSTARPEPLPLDVKAYDASRVRVGPSEGELDEGRTMCKVAAKTAPVRRIEKAVDPDVARLLDESDMSHAGSEDEGLEEDFVIVANRAEGEELEEEEEDEEVEYENGVFSDVDEEFDFEEDDPKPRVRRLLDEQFDLLALEEYGDSDDDDKDVKDGEYELPSEVIDELKLFHSQNVCVDEEYRTPADFVRRKLDSSTADEVDESAHVIKKCAEYAEKYLNETAEEEEVVLVSESSDESELWDCETIVSTFSNLDNHPGKIKTPGIPKRRLPRVFPGETATTNDIIKLHGKEKLPVEYLPQRKRGGEKEKKVKPAEVSVADKFKKGSEKETKEEKKARKAAVKEEKREARIAKKELKGLYKSETQKAQKVAAVTGPSSIRLM

SEQ ID NO: 80570 - protein, 38 aa, Setaria italica
  Transcript Sequence Number=SeqID_14596
PERAIVQSVDVVKGPFDPNNIEYLEKGVEWDDFKSRLQ

SEQ ID NO: 80571 - protein, 40 aa, Setaria italica
  Transcript Sequence Number=SeqID_14597
FLKCVKTNIFYSSRHVTAISMMGMRIANDSPLSIPTVPFT

SEQ ID NO: 80572 - protein, 101 aa, Setaria italica
  Transcript Sequence Number=SeqID_14598
  Gene Ontology: Mol. function=nucleotidyltransferase activity
  Homolog annotation: Hit_ID=Q10Q39; Match level="QueryCoverage=98%, HitCoverage=7%, E-value=5e-43, Identity=85%"; Hit description =Nucleotidyltransferase domain containing protein, expressed
MGMVPNGLLPNASTGVTRRLDPERWAVAEGRTAELIARIQPNAHSEGRRLAVYHYVQRLIMNCLSCQVFTFGSVPLKTYLPDGDIDVTAFSNSEDLNETWA

SEQ ID NO: 80573 - protein, 61 aa, Setaria italica
  Transcript Sequence Number=SeqID_14599
FYRWGYFLFRFFFKKKKKVALYSCLFMKTQFLNRYWILHNTFTDGINYKYVSILSMCWCCN

SEQ ID NO: 80574 - protein, 94 aa, Setaria italica
  Transcript Sequence Number=SeqID_14600
  Gene Ontology: Mol. function=transferase activity, transferring glycosyl groups; Cellular component=membrane; Biological process =cell wall biogenesis
  Homolog annotation: Hit_ID=B9RLW2; Match level="QueryCoverage=88%, HitCoverage=15%, E-value=3e-16, Identity=45%"; Hit description =Galactoside 2-alpha-L-fucosyltransferase, putative
REAAAETQNKGAAAETQNNRTIAVLTTSLSSWYSDQIQKKYDEHPAVDGTTVEVHQPSHEEYQRSRNKKHNMKALAEIYLLSMTDELITSGFST

SEQ ID NO: 80575 - protein, 128 aa, Setaria italica
  misc_feature (56)..(56): Xaa can be any naturally occurring amino acid
  misc_feature (66)..(66): Xaa can be any naturally occurring amino acid
  misc_feature (92)..(92): Xaa can be any naturally occurring amino acid
  Transcript Sequence Number=SeqID_14601
  Gene Ontology: Mol. function=protein serine/threonine kinase activity; Biological process=protein amino acid phosphorylation
  Homolog annotation: Hit_ID=Q53QB2; Match level="QueryCoverage=93%, HitCoverage=11%, E-value=1e-17, Identity=41%"; Hit description =Leucine Rich Repeat family protein
SFCPADVSCSKCTENVTAMETPGAPFHGSLTPHLCCFSFLFFLNVTNANNHGFNPXKDDVRGSFNXLTFFNLCNDWLSGSMPTTVGNCIRLXALLLKSNNVSGPVPEKLQKHAYHCRNYTLSGQIPVN

SEQ ID NO: 80576 - protein, 127 aa, Setaria italica
  misc_feature (1)..(1): Xaa can be any naturally occurring amino acid
  misc_feature (97)..(97): Xaa can be any naturally occurring amino acid
  misc_feature (106)..(106): Xaa can be any naturally occurring amino acid
  misc_feature (110)..(110): Xaa can be any naturally occurring amino acid
  Transcript Sequence Number=SeqID_14602
  Gene Ontology: Mol. function=ammonium transmembrane transporter activity; Cellular component=integral to membrane; Biological process=transport
  Homolog annotation: Hit_ID=B6SV23; Match level="QueryCoverage=62%, HitCoverage=16%, E-value=2e-40, Identity=98%"; Hit description =Ammonium transporter 2
XSVLGRMNIKAWMAFTPLWLLFSYTVGAFSLWGGGFLYHWGVIDYSGGYVIHLSSGVAGFTAAYWVGPRLKSDRERFSPNNILLMIAGGGLLWMGWXAGFNGGAPXAANXAASVAVLNTNVSAATSL

SEQ ID NO: 80577 - protein, 69 aa, Setaria italica
  Transcript Sequence Number=SeqID_14603
  Pfam annotation: Domain name=WD40; Domain location=15-53; Score=30.6; E_value=6.5e-06; Accession=PF00400.24; Description=WD domain, G-beta repeat
TPTLEKRRASGGGGFVFLRALAGHTEAISGFSVPRGSDKLYSGSVDGSVRVWDRNSGKVARLLVPGNLI

SEQ ID NO: 80578 - protein, 325 aa, Setaria italica
  Transcript Sequence Number=SeqID_14604
  Gene Ontology: Mol. function=DNA-directed RNA polymerase activity; Cellular component=nucleus; Biological process=transcription
  Homolog annotation: Hit_ID=B6TCC3; Match level="QueryCoverage=92%, HitCoverage=92%, E-value=1e-150, Identity=86%"; Hit description=DNA -directed RNA polymerase II 36 kDa polypeptide A
  Pfam annotation: Domain name=RNA_pol_A_bac; Domain location=57-192; Score=147.5; E_value=4.2e-41; Accession=PF01000.18; Description=RNA polymerase Rpb3RpoA insert domain
  Pfam annotation: Domain name=RNA_pol_L; Domain location=20-308; Score= 80.0; E_value=8.3e-21; Accession=PF01193.16; Description=RNA polymerases L  13 to 16 kDa subunit
  Pfam module annotation: Pfam domain module=RNA_pol_A_bac::RNA_pol_L; Domain location=57-192::20-308
MDRPAAGSSYQRFPRVRIRELKDDYAKFELRDTDASIANALRRVMIAEVPTVAIDLVEIEVNSSVLNDEFIAHRLGLIPLTSAAAMQMRFSRDCDACDGDGSCEYCSVEFNLSARATDSDQTLEVTSNDLRSADPKVCPVDQARAYQLALSGNDYDPNAERGILIVKLRRGQELRLRAIARKGIGKDHAKWSPAATVTFMYEPDILINEELMDTLTFDEKRSWVESSPTKVFDLSANGKVTVCDAEAYTYDDEVIKKAEAMGKPGLVEINAKEDSFIFTVETTGAITAYELIMNAITVLRQKLDAIGLQDDDGDLGELGAHLGGP

SEQ ID NO: 80579 - protein, 76 aa, Setaria italica
  Transcript Sequence Number=SeqID_14605
IRSDICIATFSTAIKTNFYVSCRATISESCILDHIAEVQCLTIGSQQKTIVYFLYSMVTKQLHQCCNFKLALNKTK

SEQ ID NO: 80580 - protein, 109 aa, Setaria italica
  Transcript Sequence Number=SeqID_14606
SALLLHDTIPDSSATTTSNDEIYKFSFSEYLRVPEWTACTLLLDIRISTKWLFCWSSKRNSVRCPPLSFYQDSTSNSNSSSNSAGKPCLTFLLFETLLLLPLLAPASIL

SEQ ID NO: 80581 - protein, 369 aa, Setaria italica
  misc_feature (94)..(94): Xaa can be any naturally occurring amino acid
  Transcript Sequence Number=SeqID_14607
  Gene Ontology: Mol. function=metal ion binding
  Homolog annotation: Hit_ID=Q2RA96; Match level="QueryCoverage=42%, HitCoverage=21%, E-value=4e-22, Identity=40%"; Hit description=PHD -finger family protein, expressed
FKLRSRRELSASLQSVVEVKKLPRSQAWPKSWKSFGPTDDNIGLFFFPNSSRQNEVSNRLVNGIIKSDGALKVAVGMAELLIFPSSLLPEQYHXNHYLWGVFRRRKDMADETVLGKEQDGSVNNAAEQGQLQEPDLLNQRDEALYESSDQETCAVKHVVHIENQLLVECDHEAEKEAAKAATSEGTTSPGSSWSSAKMNSPKVGSNCCVEPRNYSKLDAHGDLDQQEDFTSLPANASSITEQSSDSGPAAVSTKLIKPVEHGHGQPHSGSEPSTRKLFGFVTARTPRSQQLIQEMVSEGALLFPVPEEVVTTGSITGISTRVVSSEMNPDTERLHLSEPPQAFDFVSMGHCEPGADSEACLELFPVRQE

SEQ ID NO: 80582 - protein, 48 aa, Setaria italica
  Transcript Sequence Number=SeqID_14608
  Homolog annotation: Hit_ID=Q01JP4; Match level="QueryCoverage=93%, HitCoverage=4%, E-value=3e-16, Identity=86%"; Hit description =OSIGBa0139P06.4 protein
DSVEGARMQIFIPTIDQVLDQVCDLIVDVLRDQVVLRIFQACMEGISC

SEQ ID NO: 80583 - protein, 170 aa, Setaria italica
  Transcript Sequence Number=SeqID_14609
  Homolog annotation: Hit_ID=Q01JP4; Match level="QueryCoverage=99%, HitCoverage=16%, E-value=6e-69, Identity=78%"; Hit description =OSIGBa0139P06.4 protein
QLDAIEEGIKRSWISVLSATRLLDYLSCIASGRPISENSSSSDESIDELFTIFDDVRMTAVNITDTILNFIGTRAVFYDMRDSLLFSLYRDSVEGARMQIFIPTIDQVLDQVCDLIVDVLRDQVVLRIFQACMEGLIWVLLDGGPSRAFLETDVDLMQQDLAMLKDLFIY

SEQ ID NO: 80584 - protein, 305 aa, Setaria italica
  misc_feature (261)..(261): Xaa can be any naturally occurring amino acid
  Transcript Sequence Number=SeqID_14610
  Homolog annotation: Hit_ID=Q01JP4; Match level="QueryCoverage=100%, HitCoverage=30%, E-value=1e-129, Identity=76%"; Hit description =OSIGBa0139P06.4 protein
EILAASNNFELFIAEKLRSVYGEAGSSFSNYLKPYMIGCLSSPLILQWLHAQHENVLEWTKRTIGIEDWTPLSVHEKQATSVVEVFRIVEESVDQFFNTSLPLDIVHLRSLLIGITSSLEVYLLHMENQQVSGSTLLPRAPVLTRYAESMNPFAKRKLIEPTVPEEKVATKLNNLTVPKLCVKLNTLQFIRDQLDAIEEGIKRSWISVLLLDYLSCIASGRPISENSSSSDESIDELFTIFDDVRMTAVNITDTILNFIGXRAVFYDMRDSLLFSLYRDSVEGARMQIFIPTIDQVLDQVCDLIV

SEQ ID NO: 80585 - protein, 58 aa, Setaria italica
  Transcript Sequence Number=SeqID_14611
KLHGIIGNLLLSELDCWLSSSCDSLQSEMRIWHKIYTQTFQVSARGLPRIQTYGSINA

SEQ ID NO: 80586 - protein, 62 aa, Setaria italica
  Transcript Sequence Number=SeqID_14612
QHLNLIFVPQGHTPEHKRNRNMESLRTHSSLFLTDKALIQIDSRTPRPRRKNTPNQGIRRRR

SEQ ID NO: 80587 - protein, 311 aa, Setaria italica
  misc_feature (92)..(92): Xaa can be any naturally occurring amino acid
  misc_feature (126)..(126): Xaa can be any naturally occurring amino acid
  Transcript Sequence Number=SeqID_14613
  Gene Ontology: Mol. function=catalytic activity; Cellular component =membrane; Biological process=plant-type hypersensitive response
  Homolog annotation: Hit_ID=B6SSC1; Match level="QueryCoverage=100%, HitCoverage=100%, E-value=1e-152, Identity=85%"; Hit description =Lipid phosphate phosphatase 3
  Pfam annotation: Domain name=PAP2; Domain location=100-251; Score =141.8; E_value=2.1e-39; Accession=PF01569.13; Description=PAP2 superfamily
MADIQLGCHTIRSHGPKVARLHMYDWIILLCLAVLDGLLNIIEPFHRFVGRDMMTDLRYPLKGNTIPFWAVPLIAIVLPWVVFAGIYFKKKXNVYDLHHGILGILYSVLITAVITDAIKDGVGRPXRPDFFWRCFPDGIPNYDNVTTDVICHGEKSVIKEGHKSFPSGHSSWSFAGLGFLAWYLAGKLKAFDRKGHIAKLCLVFLPLLVASLVAVSRVDDYWHHWQDVFAGGILGLTVASFCYLQFFPYPFDNDAIWPHAYFQQLAETHSNGNANSFEVRPAELEDEEGHGGIALRDTSPILESMESGRRP

SEQ ID NO: 80588 - protein, 321 aa, Setaria italica
  Transcript Sequence Number=SeqID_14614
  Homolog annotation: Hit_ID=Q7F9I0; Match level="QueryCoverage=92%, HitCoverage=66%, E-value=3e-94, Identity=58%"; Hit description =OSJNBa0039C07.6 protein
EDEEEGVRVNIGLDPTLDREEEEDKYDREAFGREDAADRVYMHDIMDDGINMSINSIVPDLLDDSIEEVYRSSKDPRADIRAASARLREDDGSAKDGDSHFAARAKELPTAGMQMKKAVEDVNVKPILKRKEEQADLKPRKRVRFDASVKDPESDMLEHDEDSPMVPQSMDVVTEKDSTPTPSESPGVPDYVRNPSKYTRYTLDIPESNDASNRRALADLHDLLWKSEPNKIHSETPVEIPSSVTFIPRKKSVDAMAVDEGPRTSDSNSAVIGMVAGASDETDQCEMDEDDSRASATPQMPTNSKSSSRRYRSSRTEDNDE

SEQ ID NO: 80589 - protein, 101 aa, Setaria italica
  Transcript Sequence Number=SeqID_14615
  Subcellular localization annotation: CTP_CleavageSite=73; ConfidenceScore=5.51e-01
MYHAMRLRCLLMHPPLWSNSSSLGISASGVTGGCFVRRFSAVGAPRPHGPSRRLCRFYGSKGGVGSAEAHGASAASSAPGSSGRCIEQEHARLGERDQQEW

SEQ ID NO: 80590 - protein, 72 aa, Setaria italica
  Transcript Sequence Number=SeqID_14616
  Gene Ontology: Mol. function=catalytic activity
  Homolog annotation: Hit_ID=B4FS06; Match level="QueryCoverage=59%, HitCoverage=7%, E-value=2e-14, Identity=84%"; Hit description =Alkaline/neutral invertase
VLNWGLLVIYSFLFCSAPPSCNLTRLFLLGNGYPYVQLTVACIKMNRPELAAKAIEVAERRIATDKWPEYYD

SEQ ID NO: 80591 - protein, 58 aa, Setaria italica
  Transcript Sequence Number=SeqID_14617
GLSQPIHLLESTSHVHTRELNRRVPTQKTMCELVFITQKSGMRYFVLFFQSRCQQSLN

SEQ ID NO: 80592 - protein, 603 aa, Setaria italica
  Transcript Sequence Number=SeqID_14618
  Gene Ontology: Mol. function=catalytic activity; Cellular component =plasma membrane; Biological process=metabolic process
  Homolog annotation: Hit_ID=B4FS06; Match level="QueryCoverage=100%, HitCoverage=100%, E-value=0.0, Identity=91%"; Hit description =Alkaline/neutral invertase
  Pfam annotation: Domain name=GDE_C; Domain location=157-560; Score= -213.9; E_value=0.0011; Accession=PF06202.6; Description=Amylo-alpha -1,6-glucosidase
  Pfam annotation: Domain name=Invertase_neut; Domain location=115-587; Score=1251.3; E_value=0; Accession=PF04853.4; Description=Plant neutral invertase
  Pfam module annotation: Pfam domain module=GDE_C::Invertase_neut; Domain location=157-560::115-587
  Subcellular localization annotation: CTP_CleavageSite=42; ConfidenceScore=5.29e-01
MGIAEAALHTMPGAFAAHSPASNLSIGADARRRKRTTNLVPNARALQGLLKIPRLRSVRRQCQRIDDLAKVTEGNGTWATDAMNNASQVLGDLSARDQAVGGNGGLNGNAVKSPPKMWKTSSVEDEAWELLQESMVYYCGSPVGTIAANDPNDSDPVNYDQVFIRDFIPSGIAFLLKGEYEIVRNFILHTLQLQSWEKTMDCHSPGQGLMPASFKVRTIPLDGDEDVTEEVLDPDFGEAAIGRVAPVDSGLWWIILLRAYGKCSGDLSVQERIDVQTGMKMILKLCLADGFDMFPTLLVTDGSCMIDRRMGIHGHPLEIQALFYSALLCAREMLTPEDGSADLIRALNNRLIALSFHIREYYWVDMQKLNEIYRYKTEEYSYDAVNKFNIYPDQIPPWLVEWIPPKGGYFIGNLQPAHMDFRFFSLGNLWSIVSSLATTQQSHAILDLIESKWSDLVAEMPLKICYPALENQEWKIITGSDPKNTPWSYHNGGSWPTLLWQLTVACIKMNRPELAAKAIEVAERRIATDKWPEYYDTKRARFIGKQSRLYQTWSIAGFLVAKLLIEKPDAARILWNDEDAEILNALSTNRKRGKKVLKKTYIV

SEQ ID NO: 80593 - protein, 133 aa, Setaria italica
  Transcript Sequence Number=SeqID_14619
  Gene Ontology: Biological process=steroid metabolic process
  Homolog annotation: Hit_ID=B9RMS3; Match level="QueryCoverage=99%, HitCoverage=13%, E-value=5e-55, Identity=74%"; Hit description =Oxysterol-binding protein, putative
GRFWGDSNLKGKFWGRSIQLDPIGVLTLQFDDGETFQWSKVTTSIYNIIIGKIYCDHYGTMRINGSGQYSCKLKFKEQSIIDRNPHQFSCVVRGKKICCCLPCFPGLNFRVHGFVQDNRTGEKVAMLIGKWDE

SEQ ID NO: 80594 - protein, 631 aa, Setaria italica
  Transcript Sequence Number=SeqID_14620
  Gene Ontology: Cellular component=cytoplasm; Biological process =steroid metabolic process
  Homolog annotation: Hit_ID=B9RMS3; Match level="QueryCoverage=99%, HitCoverage=76%, E-value=0.0, Identity=68%"; Hit description =Oxysterol-binding protein, putative
  Pfam annotation: Domain name=Oxysterol_BP; Domain location=218-611; Score=250.8; E_value=3.4e-72; Accession=PF01237.10; Description =Oxysterol-binding protein
KPFGEIHLKVSSIRASKSDDKRLYIFSGTKTLHLRCETEEDRNSWIDALLAAKDRFPRSLTSNDLGPMADIMLSTEKLRVRLLQEGLSEAVVKECEAIMMSELLELHNQIKSQQQQHSILIDRLRQLETEKVELERTVVHETKERETHGYANGRQSDFYSVLSGGSSSESDPDTASQVAEVETEEDEVTYFDTRDFLSAESLRSASCRRKELVANGCNGSEYVGDSVTNTVKTTKYPFVLRRDKLPEPKEKEKPIGLWSIIKENIGKDLSGVCLPVYFNEPLSSLQKCFEDLEYSYLVDHALQWGKQGDSLMRILHVAAFAVSGYASTEGRQCKPFNPLLGETYEADYPDKGVRFFSEKVSHHPVVVACHCEGRGWRFWGDSNLKGKFWGRSIQLDPIGVLTLQFDDGETFQWSKVTTSIYNIIIGKIYCDHYGTMRINGSGQYSCKLKFKEQSIIDRNPHQVHGFVQDNRTGEKVAMLIGKWDETMYYVLGDPSAKPKGYDPMSEAVLLWERDKSLNQTRYNLSPFAISLNELTPHLLKKLPPTDSRLRPDQRHLENGEYEMANAEKLRLEQLQRQARRLQEKGWKPRWFKKDEDDSYRYVGGYWEAREKGNWDGIPDIFGQNSVSPGLP

SEQ ID NO: 80595 - protein, 241 aa, Setaria italica
  Transcript Sequence Number=SeqID_14621
  Gene Ontology: Mol. function=nucleic acid binding; Cellular component= nucleus; Biological process=cell redox homeostasis
  Homolog annotation: Hit_ID=Q9FS08; Match level="QueryCoverage=100%, HitCoverage=22%, E-value=1e-134, Identity=94%"; Hit description=UV -damaged DNA binding protein
  Pfam annotation: Domain name=CPSF_A; Domain location=88-241; Score =63.7; E_value=6.8e-16; Accession=PF03178.7; Description=CPSF A subunit region
YSSNKKLLYSNVNLKEVNHMCPFNTAAFPDSLAIAKEGELSIGTIDDIQKLHIRTIPLNEQARRICHQEQSRTLAFCSFKYNQTSMEESETHYIRLLDHQTFEFLSTYPLDQYECGCSIISCSFADDNNVYYCVGTAYVLPEENEPTKGRILVFAVEDGRLQLIVEKETKGAVYSLNAFNGKLLAAINQKIQLYKWMLREDGSHELQSECGHHGHILALYTQTRGDFIVVGDLMKSISLLV

SEQ ID NO: 80596 - protein, 688 aa, Setaria italica
  Transcript Sequence Number=SeqID_14622
  Gene Ontology: Mol. function=nucleic acid binding; Cellular component= nucleus; Biological process=nucleotide-excision repair, DNA damage removal
  Homolog annotation: Hit_ID=Q9FS08; Match level="QueryCoverage=98%, HitCoverage=62%, E-value=0.0, Identity=94%"; Hit description=UV -damaged DNA binding protein
LLTPQGLQPMLDVPIYGRIATIELFRPHNETQDFLFIATERYKFCVLQWDTEKSELLTRAMGDVSDRIGRPTDNGQIGIIDPDCRLIGLHLYDGLFKVIPFDNKGQLKEAFNIRLEELQVLDIKFLHGCVKPTIVVLYQDNKDARHVKTYEVALKDKDFVEGPWSQNNLDNGAGLLIPVPAPLGGVIIIGEETIVYCNANATFKAIPIKQSIIRAYGRVDPDGSRYLLGDNTGTLHLLVLTHERERVTGLKVEYLGETSIASSISYLDNGVVYVGSRFGDSQLVKLNLQADASGSFVEVLERYVNLGPIVDFCVVDLDRQGQGQVVTCSGAFKDGSLRVVRNGIGINEQASVELQGIKGLWSLKSSFNDPYDMYLVVSFISETRFLAMNMEDELEETEIEGFDAQTQTLFCQNVINDLLIQVTANSVRLVSCTSQELVDQWNAPAGFSVNVASANASQVLLATGGGHLVYLEIRDSKLVEVKHAQLEHEISCLDLNPIGENPQYSSLAAVGMWTDISVRIFSLPDLELIRKENLGGEIVPRSVLLCTLEGVSYLLCALGDGNLFSFLLNASTGELTDRKKVSLGTQPISLRTFSSKGTTHVFASSDRPTVIYSSNKKLLYSNVNLKEVNHMCPFNTAAFPDSLAIAKEGELSIGTIDDIQKLHIRTIPLDCSWWQMRRACSLRGIVRI

SEQ ID NO: 80597 - protein, 96 aa, Setaria italica
  Transcript Sequence Number=SeqID_14623
  Subcellular localization annotation: CTP_CleavageSite=21; ConfidenceScore=5.39e-01
RARPAPPRTITGNFAPLWDSRADQLRTSTSARCFCPRAPRHVKRIVELGNFQGSPQMRSRCPCLFFGESGVAKGSCCARLLDGILCRAPSRGVISK

SEQ ID NO: 80598 - protein, 221 aa, Setaria italica
  Transcript Sequence Number=SeqID_14624
  Gene Ontology: Mol. function=hydrolase activity, acting on acid anhydrides, catalyzing transmembrane movement of substances; Cellular component=integral to membrane; Biological process=calcium ion transport
  Homolog annotation: Hit_ID=Q65X71; Match level="QueryCoverage=100%, HitCoverage=21%, E-value=1e-102, Identity=80%"; Hit description =Probable calcium-transporting ATPase 6, plasma membrane-type
  Pfam annotation: Domain name=Cation_ATPase_N; Domain location=1-51; Score=6.3; E_value=0.00098; Accession=PF00690.18; Description=Cation transporterATPase, N-terminus
  Pfam annotation: Domain name=E1-E2_ATPase; Domain location=65-220; Score=74.6; E_value=3.7e-19; Accession=PF00122.12; Description=E1-E2 ATPase
  Pfam module annotation: Pfam domain module=Cation_ATPase_N::E1-E2 _ATPase; Domain location=1-51::65-220
TEIETRQKLYGTNKHAEKPPRSFWMFVWDALHDLTLIILMVCAVVSLVVGLATEGWPMGIYDGLGIILSILLVVLVTASSDYKQSRKFMELDREKQKIYARVTRDRQTKKVLIHDLVVGDILHLSIGDVVPADGLFVSGYCLVVDESSLSGESEPVHVSEEKPFLHAGSKVQDGTAKMLVTAVGMRTEWGKIMDTLNDDGVDETPLQVKLNGVATIIGQIG

SEQ ID NO: 80599 - protein, 83 aa, Setaria italica
  Transcript Sequence Number=SeqID_14625
KKIQEARLPLEPLTLPRKELNRSEAKPQDYQLGSFRPSNRNLSTRCPPPPFPSRRAEINCSREERNGKQGDARTLPPKEMRST

SEQ ID NO: 80600 - protein, 59 aa, Setaria italica
  Transcript Sequence Number=SeqID_14626
  Gene Ontology: Mol. function=threonine-type endopeptidase activity; Cellular component=proteasome core complex; Biological process =ubiquitin-dependent protein catabolic process
  Homolog annotation: Hit_ID=B6SMN8; Match level="QueryCoverage=100%, HitCoverage=26%, E-value=3e-22, Identity=88%"; Hit description =Proteasome subunit beta type
MLFIIQDAVTPLSESDAVDLVKDVFASATERDIYTGDKLEIVVINSSGTHRECIELRKD

SEQ ID NO: 80601 - protein, 169 aa, Setaria italica
  misc_feature (16)..(16): Xaa can be any naturally occurring amino acid
  Transcript Sequence Number=SeqID_14627
  Gene Ontology: Mol. function=threonine-type endopeptidase activity; Cellular component=proteasome core complex; Biological process =ubiquitin-dependent protein catabolic process
  Homolog annotation: Hit_ID=B6SMN8; Match level="QueryCoverage=98%, HitCoverage=75%, E-value=4e-81, Identity=88%"; Hit description =Proteasome subunit beta type
  Pfam annotation: Domain name=Proteasome; Domain location=1-154; Score= 6.0; E_value=8e-05; Accession=PF00227.18; Description=Proteasome A -type and B-type
MFLASSGFQGDIKALXKKNLAAKELVYEHNHNKKMSCPAMAQLLSNTLYYKRFFPYYAFNVLGGLDSQGKGCVFTYDAVGSYERTGYSAQGTGAALMMPVLDNQLKSPSPLLLPARDAVTPLSESDAVDLVKDVFASATERDIYTGDKLEIVVINSSGTHRECIELRKD

SEQ ID NO: 80602 - protein, 43 aa, Setaria italica
  Transcript Sequence Number=SeqID_14628
MVLRLFDVSYVNSMLIIIFIPALHLKEKGISCEPYAAVQIKQT

SEQ ID NO: 80603 - protein, 158 aa, Setaria italica
  Transcript Sequence Number=SeqID_14629
  Gene Ontology: Mol. function=cysteine-type endopeptidase activity; Biological process=proteolysis
  Homolog annotation: Hit_ID=B6SUK0; Match level="QueryCoverage=100%, HitCoverage=45%, E-value=4e-64, Identity=77%"; Hit description=LOL3
MNFGGRAPATIRCKYCSACLTVVHGESAIQCAQCCGVTRLRRSFLRRDAHPGLHSAAPPAGLFPCSRGKKRAVLIGITYAGMRRGCGELRGPVNDVKCMRHLLCQRFGFPSECVIMLTDDQRDPFRLPTKDNIRMAMHWLVQGCSYGDSLVFHFSGLG

SEQ ID NO: 80604 - protein, 362 aa, Setaria italica
  Transcript Sequence Number=SeqID_14630
  Gene Ontology: Mol. function=cysteine-type endopeptidase activity; Biological process=proteolysis
  Homolog annotation: Hit_ID=B6TZD5; Match level="QueryCoverage=96%, HitCoverage=98%, E-value=1e-152, Identity=76%"; Hit description=LOL3
  Pfam annotation: Domain name=Peptidase_C14; Domain location=74-358; Score=118.3; E_value=2.6e-32; Accession=PF00656.14; Description =Caspase domain
  Pfam annotation: Domain name=zf-LSD1; Domain location=22-46; Score =18.6; E_value=0.0055; Accession=PF06943.4; Description=LSD1 zinc finger
  Pfam module annotation: Pfam domain module=Peptidase_C14::zf-LSD1; Domain location=74-358::22-46
MSHFGGHFGGRPHGAATTTVRCKYCRASLTVIPGERAIQCAHCNCVTRIRRADRIPLPVMGPMTAPFQRARGKKRAVLVGITYAGMRRGCGELRGPINDVKCMRNLLCQRFGFPSECVIMLTDDQRDPFRLPTKDNIRMAMHWLVQGCSYGDSLVFHFSGLGAQVADDDGDEVDGYDEALCPMDAFQKGPILDDEINEVMVRPLVHGARLHAVVDACYSATVLDLPFLCRVARNGYWQWEDHRPPSGAWKGTSGGQAVLFSGYSDGKSNFAVMPDAYASVGAMTHSFIRAVECEPRGVTYGRLLSSMRTIMKNGGGGGFGDLQGPIGAPIHQQHQVANFSGVQEPNLSSSEMFDIHRKPFVM

SEQ ID NO: 80605 - protein, 217 aa, Setaria italica
  Transcript Sequence Number=SeqID_14631
  Gene Ontology: Mol. function=DNA binding; Cellular component=nucleus; Biological process=regulation of transcription
  Homolog annotation: Hit_ID=C1KA89; Match level="QueryCoverage=92%, HitCoverage=83%, E-value=6e-57, Identity=56%"; Hit description=MYB transcription factor
  Pfam annotation: Domain name=Myb_DNA-binding; Domain location=59-104; Score=50.7; E_value=5.5e-12; Accession=PF00249.23; Description=Myb -like DNA-binding domain
  Pfam annotation: Domain name=Myb_DNA-binding; Domain location=7-53; Score=53.3; E_value=9.1e-13; Accession=PF00249.23; Description=Myb -like DNA-binding domain
  Pfam module annotation: Pfam domain module=Myb_DNA-binding::Myb_DNA -binding; Domain location=59-104::7-53
WFLTLVSGHWRPSEDEKLKELVALYGPHNWNAIAEKLQGRSGKSCRLRWFNQLDPRINRSPFSEEEEELLLASHRVHGNRWAVIARLFPGRTDNAVKNHWHVIMARRCRERMRMSNKRGAGGVPSAAAAGAAEDENNPRNAKRTRPDSSSMASLLDKYRREFAVPFAINHDSNKEDYCSTTNEEEDTNKSVEFYDFLQVNANSSDTKCGSSIEEQGG

SEQ ID NO: 80606 - protein, 97 aa, Setaria italica
  Transcript Sequence Number=SeqID_14632
DLPPGAPDPIPWTPDPPGRGRRRGLHGWCRLVLTRAGGARPGERSPRRRLPRRHPAPAVARWREGWEGVAAAGIGGAARVAQRRRHGGLHRYVPGFG

SEQ ID NO: 80607 - protein, 92 aa, Setaria italica
  Transcript Sequence Number=SeqID_14633
PPRARMDGWVRRRTEGEEDRDVAEEIWGSREPGTATGAGATALELGDYYPRAAALGIGFGSLLLLPFCAANKNQTLFSSSPFRLGAQALVNL

SEQ ID NO: 80608 - protein, 93 aa, Setaria italica
  Transcript Sequence Number=SeqID_14634
  Gene Ontology: Cellular component=mitochondrion
  Homolog annotation: Hit_ID=B9SLS9; Match level="QueryCoverage=98%, HitCoverage=14%, E-value=7e-19, Identity=46%"; Hit description =Pentatricopeptide repeat-containing protein, putative
  Pfam annotation: Domain name=PPR; Domain location=16-50; Score=17.4; E_value=0.06; Accession=PF01535.12; Description=PPR repeat
  Pfam annotation: Domain name=PPR; Domain location=51-85; Score=35.0; E_value=3e-07; Accession=PF01535.12; Description=PPR repeat
  Pfam module annotation: Pfam domain module=PPR::PPR; Domain location =16-50::51-85
AIVEHLKRRGVGLNQFVYNCLLGAVKNCGDFGRIEAVLADMEAQGISPNIVTFNTLMSIYVQQGKTDDVFRVYAQIEDRGLVPTAATYSTVMS

SEQ ID NO: 80609 - protein, 192 aa, Setaria italica
  Transcript Sequence Number=SeqID_14635
  Gene Ontology: Mol. function=sequence-specific DNA binding; Cellular component=intracellular; Biological process=regulation of transcription, DNA-dependent
  Homolog annotation: Hit_ID=B6UA50; Match level="QueryCoverage=68%, HitCoverage=64%, E-value=6e-53, Identity=80%"; Hit description =Nuclear transcription factor Y subunit C-2
  Pfam annotation: Domain name=CBFD_NFYB_HMF; Domain location=80-144; Score=88.7; E_value=2e-23; Accession=PF00808.15; Description=Histone- like transcription factor (CBFNF-Y) and archaeal histone
  Pfam annotation: Domain name=Histone; Domain location=74-147; Score =44.8; E_value=3.3e-10; Accession=PF00125.16; Description=Core histone H2AH2BH3H4
  Pfam module annotation: Pfam domain module=CBFD_NFYB_HMF::Histone; Domain location=80-144::74-147
MDPTKSSTPPPPPVMGAPVAYPPAAYPPAAAAGAAAYAPQLYAPPAAAAAQQAAAAQQQLQIFWNEQYREIEATTDFKNHNLPLARIKKIMKADEDVRMIAAEAPVVFARACEMFILELTHRGWAHAEENKRRTLQKSDIAAAVARTEVFDFLVDIVPRDEAKDAEAAAAAGMGAGIPHPAAGMPATDPMGY

SEQ ID NO: 80610 - protein, 131 aa, Setaria italica
  misc_feature (44)..(44): Xaa can be any naturally occurring amino acid
  misc_feature (120)..(120): Xaa can be any naturally occurring amino acid
  Transcript Sequence Number=SeqID_14636
  Gene Ontology: Mol. function=peptidase activity; Cellular component =integral to membrane; Biological process=signal peptide processing
  Homolog annotation: Hit_ID=Q9SEL8; Match level="QueryCoverage=100%, HitCoverage=19%, E-value=3e-35, Identity=53%"; Hit description =Putative protease SppA
RAVESSPGPTKEEQEPSPAAGEAQEPPTPAASAFDVEELGWGTXQLAVKLRMLVAPPWQRVRKGSVLNMKLRGEISDQLKTRFSSGLSLPQICENFVKAAYDPRISGIYLHIEPLRCGWXEVDEIRRHIVD

SEQ ID NO: 80611 - protein, 212 aa, Setaria italica
  Transcript Sequence Number=SeqID_14637
  Gene Ontology: Mol. function=peptidase activity; Cellular component =integral to membrane; Biological process=signal peptide processing
  Homolog annotation: Hit_ID=B9RE86; Match level="QueryCoverage=98%, HitCoverage=36%, E-value=9e-73, Identity=66%"; Hit description =Protease, putative
  Pfam annotation: Domain name=Peptidase_S49; Domain location=1-131; Score=76.7; E_value=8.7e-20; Accession=PF01343.10; Description =Peptidase family S49
AMAAPVIVAEKLTLTGSIGVVTGKFCLQKLYERIDFNKEILSKGRYAELNAADQRPLRPDEAELFEKSAQNAYALFRDKAAMSRSMSVDQMETVAQGRVWSGQDAFSRGLVDSVGGLSQALAIAKQKANIPKHKKIQLVEVSKPSPTLPEILSGIGGSLLGVDRAMKGVLQDMSSLSGVQARMDGILFENLGDMSGENQLFLLIKDIVNYFD

SEQ ID NO: 80612 - protein, 373 aa, Setaria italica
  Transcript Sequence Number=SeqID_14638
  Gene Ontology: Mol. function=peptidase activity; Cellular component =integral to membrane; Biological process=signal peptide processing
  Homolog annotation: Hit_ID=Q9SEL8; Match level="QueryCoverage=96%, HitCoverage=53%, E-value=1e-137, Identity=66%"; Hit description =Putative protease SppA
  Pfam annotation: Domain name=Peptidase_S49; Domain location=60-214; Score=35.9; E_value=6.4e-09; Accession=PF01343.10; Description =Peptidase family S49
WLQISDQLKTRFSSGLSLPQICENFVKAAYDPRISGIYLHIEPLRCGWGKVDEIRRHIVDFKKSGKFVVGYMPVCGEKEYYLACACGELYAPPSAYVALFGLTVQQTFLRGVLEKVGIEPEIQRIGKYKSAGDQLARKSMSNEVREMLATLLDNIYGNWLDTISSTHGKKREEIEEFINSGVYQVARLKEEGWITDLMYDDEVMSMLKERVGQKDKKSLRMVDYSKYSRVSKRTLGLQGGGEQIAIIRASGSITRTRSPLSTPSSGIIAEQLIEKIRTVRESEKYKAVILRIDSPGGDALASDLMWREIRLLANSKPVVASMSDVAASGGYYMAMAAPVIVAEKLTLTGSIGVVTGKFCLQKLKVVTLIIFVF

SEQ ID NO: 80613 - protein, 41 aa, Setaria italica
  Transcript Sequence Number=SeqID_14639
PSGNQNYCKLTEFTSQFFVNQGPNKQARRIFLCSRIKEGSF

SEQ ID NO: 80614 - protein, 140 aa, Setaria italica
  Transcript Sequence Number=SeqID_14640
  Subcellular localization annotation: CTP_CleavageSite=54; ConfidenceScore=5.19e-01
MWWSRGHPFWKCSSIYIMGTVLYLVKQATTQRATIPVAASAMRSALLLALVLTLAASVPDLACGRVIDPKPRPKPTPQPEPQPDPKPDPKPTPQPDPKPDPKPTPQPNPKPQPQPDPNPAPQPDPKPQPQPDPNPTPQPD

SEQ ID NO: 80615 - protein, 70 aa, Setaria italica
  Transcript Sequence Number=SeqID_14641
  Subcellular localization annotation: CTP_CleavageSite=26; ConfidenceScore=5.03e-01
DGKIGGVTIMRKGKADVISDGKTVTQVSTFGSPRRCGGQGDILSGRSVISSVVYTGFTLKIWKYYVIVVH

SEQ ID NO: 80616 - protein, 232 aa, Setaria italica
  Transcript Sequence Number=SeqID_14642
  Gene Ontology: Mol. function=molecular_function; Cellular component =cellular_component; Biological process=biological_process
  Homolog annotation: Hit_ID=UPI0000EB1FCF; Match level="QueryCoverage =94%, HitCoverage=65%, E-value=4e-40, Identity=38%"; Hit description =Novel protein containing a carbohydrate kinase domain.
  Pfam annotation: Domain name=Carb_kinase; Domain location=1-222; Score=17.8; E_value=1.1e-07; Accession=PF01256.9; Description =Carbohydrate kinase
VRDDERALVSSKILTEVAKWMERFDCIVVGPGLGRDSFLLDCVSNIMKHARQANIPTVVDGDGLFLITNNLGLVEGNPLAILTPNVYEYKRLVQKVLNFDVNEETAAEQLTLLCRKIGGVTIMRKGKADVISDGKTVTQVSTFGSPRRCGGQGDILSGSVAVFTSWARYFILSNEQPTEKRVNPMTLGCIAGSLLLRKAASLAFEKNKRSTVTTDIIEFLGKSLEDICPAEN

SEQ ID NO: 80617 - protein, 120 aa, Setaria italica
  Transcript Sequence Number=SeqID_14643
  Homolog annotation: Hit_ID=Q2RB27; Match level="QueryCoverage=100%, HitCoverage=20%, E-value=3e-20, Identity=50%"; Hit description=CDC45- like protein, expressed
MVRELRVDSFYARLRAAAAAAGSSSPLLILPSAADADSLCAVRALAHVLSADSIRFSIYPVASAARARDLLASFSATTVPLCCVLVNWGAHRDLRGILPHAATAFVVDSHRPVHLHNLCA

SEQ ID NO: 80618 - protein, 113 aa, Setaria italica
  misc_feature (28)..(28): Xaa can be any naturally occurring amino acid
  misc_feature (46)..(46): Xaa can be any naturally occurring amino acid
  misc_feature (59)..(59): Xaa can be any naturally occurring amino acid
  Transcript Sequence Number=SeqID_14644
  Gene Ontology: Mol. function=RNA-directed DNA polymerase activity
  Homolog annotation: Hit_ID=Q7XXJ2; Match level="QueryCoverage=59%, HitCoverage=5%, E-value=3e-18, Identity=68%"; Hit description =OSJNBa0094O15.10 protein
MRPNKHRLIVYCGVPPLGRACLHLSALXISRIPSQTNTSLFCALCXSPGKNFPVGHPSXIAPGQARLTLEFFEDELSENKLQLVGTSILSILLSLGSGYHILTPLEDRRPRSV

SEQ ID NO: 80619 - protein, 393 aa, Setaria italica
  Transcript Sequence Number=SeqID_14645
  Gene Ontology: Mol. function=4 iron, 4 sulfur cluster binding; Cellular component=molybdopterin synthase complex; Biological process=Mo-molybdopterin cofactor biosynthetic process
  Homolog annotation: Hit_ID=B9REL9; Match level="QueryCoverage=88%, HitCoverage=89%, E-value=1e-169, Identity=80%"; Hit description =Molybdopterin cofactor synthesis protein A, putative
  Pfam annotation: Domain name=Mob_synth_C; Domain location=249-376; Score=154.0; E_value=4.6e-43; Accession=PF06463.5; Description =Molybdenum Cofactor Synthesis C
  Pfam annotation: Domain name=Radical_SAM; Domain location=82-244; Score=136.8; E_value=6.9e-38; Accession=PF04055.13; Description =Radical SAM superfamily
  Pfam module annotation: Pfam domain module=Mob_synth_C::Radical_SAM; Domain location=249-376::82-244
MMRRCFSELAGRRRSDRVVDTMKVGLQYLADASSSTRVIDRQRCSVTYATSCATDPDILSRETSSSEMLVDSFGRFHNYLRISLTERCNLRCQYCMPAEGVELTPKSELLSHDEIIRIADLFVTSGVDKIRLTGGEPTIRKDIEDICLHLSGLKGLKTLAMTTNGIVLSKKLPKLKECGLNALNISLDTLVPAKFEFMTRRKGHSKVMESIDAAVELGYNPVKVNCVIMRGMNDDEICNFVELTRHKPINVRFIEFMPFDGNVWNVKKLVPYAEMLDKVRQSYKGVERLQDHPTDTAKNFRIDGHVGTISFITSMTEHFCAGCNRLRLLADGNFKVCLFGPSEVSLREPIRAGVDDAGLKEIVGAAVKRKKAKHAGMFDIAKTANRPMIHIGG

SEQ ID NO: 80620 - protein, 255 aa, Setaria italica
  Transcript Sequence Number=SeqID_14646
  Gene Ontology: Mol. function=sequence-specific DNA binding; Cellular component=intracellular; Biological process=transcription
  Homolog annotation: Hit_ID=B6T9D2; Match level="QueryCoverage=34%, HitCoverage=29%, E-value=8e-41, Identity=92%"; Hit description =Repressor protein
FIGFRRQEIDELYTALNKKILSSESNEVCSREEKCEIAPEHVLKALSDLGFREYIDEVYAAYEQHKLDTLDSPKAGKFTGIEMTEEEAVAEQQRMFAEARARMNNGAPKPKEPEQEAQQQPHPQLQLHTPPQQPMQPQLQLHSPTQQSVQPQLQLHPQVQPHPQQSQVQPHPQQSQVQPQQAPQVQLHPQPQQAPQVQLHPQPQQSPQVPLQSQPQQIPQVPLHPSPEQPSQPQPQPQVHLQSQEPPQVQLSLQL

SEQ ID NO: 80621 - protein, 153 aa, Setaria italica
  Transcript Sequence Number=SeqID_14647
  Gene Ontology: Mol. function=sequence-specific DNA binding; Cellular component=intracellular; Biological process=transcription
  Homolog annotation: Hit_ID=B6T9D2; Match level="QueryCoverage=93%, HitCoverage=48%, E-value=3e-77, Identity=95%"; Hit description =Repressor protein
  Pfam annotation: Domain name=CBFD_NFYB_HMF; Domain location=14-79; Score=97.5; E_value=4.7e-26; Accession=PF00808.15; Description =Histone-like transcription factor (CBFNF-Y) and archaeal histone
MDPMDIVGKSKEDVSLPKSTMFKIIKEMLPPDVRVARDAQDLLVECCVEFINLLSSESNEVCSREEKKTIAPEHVLKALSDLGFREYIDEVYAAYEQHKLDTLDSPKAGKFTGIEMTEEEAVAEQQRMFAEARARMNNGAPTPSPKGSPSNLS

SEQ ID NO: 80622 - protein, 65 aa, Setaria italica
  misc_feature (18)..(18): Xaa can be any naturally occurring amino acid
  Transcript Sequence Number=SeqID_14648
  Gene Ontology: Cellular component=endoplasmic reticulum
MDIYLFMNSKVLFKTVRXDAHLRKLKPVIVHLNYHPDKSDRMKAVIEFYVNGKQNALEHFPDGSE

SEQ ID NO: 80623 - protein, 381 aa, Setaria italica
  misc_feature (1)..(1): Xaa can be any naturally occurring amino acid
  Transcript Sequence Number=SeqID_14649
  Gene Ontology: Cellular component=endoplasmic reticulum
  Homolog annotation: Hit_ID=C1FFE4; Match level="QueryCoverage=73%, HitCoverage=68%, E-value=2e-51, Identity=38%"; Hit description =Glycosyltransferase family 77 protein
  Pfam annotation: Domain name=Nucleotid_trans; Domain location=100 -338; Score=-114.8; E_value=0.018; Accession=PF03407.8; Description =Nucleotide-diphospho-sugar transferas
XYPDGFFSRAPDSAIHWPRRADSVACDTSREVANLKSQLLSLERKNAEFRKQINELSMKLQLAGQGENEVLYKAGPFGTVKALRTNPTVSPDLSINPRLAKILEQVAVKKELIVALANSNVKEMLEMWFTNIKRVGISNYLVVALDDSIENFCKSNDVPVYRRDPDDGIDNIGKTGGNHAVSGLKFRILREFLQLGYSVLLSDIDIIFFQNPFDHLYRDSDVESMSDGHNNMTAYGFNDVFDEPSMGWARYAHTMRIWVYNSGFFYIRSTIPSIELLDRVAYRLSHEKAWDQAVFNEELFFPSRPGYEGLHASKRTMDIYFFMNSKVLFKTVRKDAQLKKLKPVIVHLNYHPDKLDRMKAVVEFYVNGKQDALQRFPDGSE

SEQ ID NO: 80624 - protein, 122 aa, Setaria italica
  Transcript Sequence Number=SeqID_14650
GERRTGSCSQAKPPAPSPLYAVVVSSWIGCGEPKISYDGNKIHSPRAKIRGKIDAPPFLDAGCSSCARLTRCDGIPGADGGAAAAAGERKGAMTTEKRKGSTAAAASVSVAPSTDRRSERES

SEQ ID NO: 80625 - protein, 94 aa, Setaria italica
  Transcript Sequence Number=SeqID_14651
  Gene Ontology: Mol. function=catalytic activity; Biological process =base-excision repair
KAYVEEEWTYITELCGVGKYAADAYAIFCAGRATEVVPEDHKLVDYWKYVCFKLPTQMFENVYMLQASQNVEEAAGVTGQGNLAPTVQQTALSC

SEQ ID NO: 80626 - protein, 61 aa, Setaria italica
  Transcript Sequence Number=SeqID_14652
QIISYVHSQLLDSLRIVSVTVKEKETNLGCHAKWVILVIVVSAYFLIQYRMIICVFPVICK

SEQ ID NO: 80627 - protein, 72 aa, Setaria italica
  Transcript Sequence Number=SeqID_14653
  Gene Ontology: Mol. function=catalytic activity; Biological process =base-excision repair
KKRSDKYRRLPLNQLVPPPRSPYNLLQERYAHDPWKVIIICMLLNLSKGDQVRKKLEGFFERYPDAQTACTA

SEQ ID NO: 80628 - protein, 385 aa, Setaria italica
  misc_feature (102)..(102): Xaa can be any naturally occurring amino acid
  Transcript Sequence Number=SeqID_14654
  Gene Ontology: Mol. function=catalytic activity; Cellular component =chromatin; Biological process=base-excision repair
  Homolog annotation: Hit_ID=Q3ZBC7; Match level="QueryCoverage=34%, HitCoverage=23%, E-value=1e-28, Identity=45%"; Hit description =Methyl-CpG binding domain protein 4
  Pfam annotation: Domain name=HhH-GPD; Domain location=241-368; Score =33.9; E_value=6.3e-07; Accession=PF00730.17; Description=HhH-GPD superfamily base excision DNA repair protein
RRKGAAARKEQRRGKLEQGQSGQQPSPVDVHPHGGEAVVDGGVSGSKRVRRSSNGKPRVLTDQEILRMRIASLKEQPVPQGFVPAMANPNFIGQDPKYSSPXGAFFDQFCYRPERRQGRNAPSLPKTPDPPARPPPRDHLSFLSSQLTANQKAAKTTTLNTKRPPSASGSQVAVKAKEKKRPDEKMDTTKKPRKKPPLLSAAEKRSDKYRRLPLNQLVPPPRSPYNLLQERYAHDPWKVIIICMLLNLSKGDQVRKKLEGFFERYPDAQTACTADPEKMAEYLAPLGLQRVKANRIHKLSKAYVEEEWTYITELCGVGKYAADAYAIFCAGRATEVVPEDHKLVDYWKYVCFKLPTQASQNVEEAAGVTGQGNLAPTVQQTALSC

SEQ ID NO: 80629 - protein, 114 aa, Setaria italica
  misc_feature (1)..(35): Xaa can be any naturally occurring amino acid
  Transcript Sequence Number=SeqID_14655
XXXXXXXXXXXXXXXXXXXXXXXXXXXXXXXXXXXFFKPATQVITDSSIFCPLRGKRPIVSDIIHQSSDSLPKLFSAHHEPASGYSNRLRHRKIDGLCLKQLVFFLVMGKKIDE

SEQ ID NO: 80630 - protein, 46 aa, Setaria italica
  Transcript Sequence Number=SeqID_14656
  Gene Ontology: Mol. function=calcium ion binding; Cellular component =cytoplasm
  Homolog annotation: Hit_ID=P35681; Match level="QueryCoverage=100%, HitCoverage=27%, E-value=1e-18, Identity=93%"; Hit description =Translationally-controlled tumor protein homolog
GKLKDLQFFVGESMHDDGSLVFAYYKDGATDPTFLYFAHGLKEIKC

SEQ ID NO: 80631 - protein, 68 aa, Setaria italica
  Transcript Sequence Number=SeqID_14657
SINLPTVFQNSSQHITNQQADIVTDYDTGSYRSGYNKKKGQYYIDDNIPDMGSGHTRLALNLLQPIAS

SEQ ID NO: 80632 - protein, 70 aa, Setaria italica
  Transcript Sequence Number=SeqID_14658
  Gene Ontology: Mol. function=calcium ion binding; Cellular component =cytoplasm
  Homolog annotation: Hit_ID=P35681; Match level="QueryCoverage=80%, HitCoverage=33%, E-value=1e-23, Identity=92%"; Hit description =Translationally-controlled tumor protein homolog
  Pfam annotation: Domain name=TCTP; Domain location=3-67; Score=-37.3; E_value=0.00022; Accession=PF00838.9; Description=Translationally controlled tumour protein
EDRKTRQRRKLQRKGIEGATKYLLGKLKDLQFFVGESMHDDGSLVFAYYKDGATDPTFLYFAHGLKEIKC

SEQ ID NO: 80633 - protein, 47 aa, Setaria italica
  misc_feature (7)..(7): Xaa can be any naturally occurring amino acid
  Transcript Sequence Number=SeqID_14659
  Gene Ontology: Mol. function=calcium ion binding; Cellular component =cytoplasm
  Homolog annotation: Hit_ID=P35681; Match level="QueryCoverage=100%, HitCoverage=27%, E-value=2e-18, Identity=91%"; Hit description =Translationally-controlled tumor protein homolog
LGKLKDXQFFVGESMHDDGSLVFAYYKDGATDPTFLYFAHGLKEIKC

SEQ ID NO: 80634 - protein, 60 aa, Setaria italica
  Transcript Sequence Number=SeqID_14660
  Gene Ontology: Mol. function=calcium ion binding; Cellular component =cytoplasm
  Homolog annotation: Hit_ID=A8VRK8; Match level="QueryCoverage=80%, HitCoverage=28%, E-value=1e-17, Identity=89%"; Hit description =Translationally controlled tumor protein
GSICRVFLPKLSLVKSSKDLQFFVGESMHDDGSLVFAYYKDGATDPTFLYFAHGLKEIKC

SEQ ID NO: 80635 - protein, 237 aa, Setaria italica
  Transcript Sequence Number=SeqID_14661
  Gene Ontology: Mol. function=calcium ion binding; Cellular component =cytoplasm; Biological process=multicellular organism growth
  Homolog annotation: Hit_ID=Q5J907; Match level="QueryCoverage=70%, HitCoverage=100%, E-value=2e-79, Identity=88%"; Hit description =Translationally-controlled tumor protein homolog
  Pfam annotation: Domain name=TCTP; Domain location=1-164; Score =361.6; E_value=1.4e-105; Accession=PF00838.9; Description =Translationally controlled tumour protein
MLVYQDLLTGDELLSDSFPYREIENGILWEVDGKWVVQGAVEVDIGANPSAEGGDDEGVDDQAVKVVDIVDTFRLQEQPAFDKKQFVTFMKRYIKNLTAKLEPEQQAEFKKGIEGATKYLLGKLKDLQFFVGESMHDDGSLVFAYYKDGATDPTFLYFAHGLKEIKCYGGCALTPYLGCYHLCSTVLSFFVVAAAVASCVVVGYYIRLLVRDVLRRVLEDFRKIDGLCLKTNWTFSS

SEQ ID NO: 80636 - protein, 167 aa, Setaria italica
  Transcript Sequence Number=SeqID_14662
  Gene Ontology: Mol. function=calcium ion binding; Cellular component =cytoplasm; Biological process=translation
  Homolog annotation: Hit_ID=Q5J907; Match level="QueryCoverage=100%, HitCoverage=100%, E-value=3e-80, Identity=88%"; Hit description =Translationally-controlled tumor protein homolog
  Pfam annotation: Domain name=TCTP; Domain location=1-164; Score =361.6; E_value=1.4e-105; Accession=PF00838.9; Description =Translationally controlled tumour protein
MLVYQDLLTGDELLSDSFPYREIENGILWEVDGKWVVQGAVEVDIGANPSAEGGDDEGVDDQAVKVVDIVDTFRLQEQPAFDKKQFVTFMKRYIKNLTAKLEPEQQAEFKKGIEGATKYLLGKLKDLQFFVGESMHDDGSLVFAYYKDGATDPTFLYFAHGLKEIKC

SEQ ID NO: 80637 - protein, 83 aa, Setaria italica
  Transcript Sequence Number=SeqID_14663
ILEQSNEPSAGRNSEAIPYTANQNFYSAKTLPKEKVVTCSYILMKVGCQNKHGFLSEQHYNLQGSRECAVFTLFVPTLDPFTW

SEQ ID NO: 80638 - protein, 124 aa, Setaria italica
  Transcript Sequence Number=SeqID_14664
  Subcellular localization annotation: CTP_CleavageSite=5; ConfidenceScore=5.02e-01
RRQPRALAARRHRARPNRPQPPPQQQQRRPRLPLEMKKRKCKQLHFSAGSAKKTPQGSTITAFFVWFILAVSVMVNSSGGEQRAILSHFFCNKGGNRARGSYILGFRDTVGDWLIGLEIVLLFF

SEQ ID NO: 80639 - protein, 143 aa, Setaria italica
  Transcript Sequence Number=SeqID_14665
  Gene Ontology: Mol. function=protein serine/threonine kinase activity; Biological process=protein amino acid phosphorylation
  Homolog annotation: Hit_ID=Q9ATQ4; Match level="QueryCoverage=93%, HitCoverage=19%, E-value=7e-62, Identity=81%"; Hit description=TAK33
NSFVPMSAMRGTIGYIAPEMVSRSFGIISSKSDVYSFGMLLLEMAGGHRNTNPHAATSSQAYYPSWVYSRLSQHEVGEITDVVSMHELEKKLCIVGLWCIQMRSHDRPTMSDVIEMLEAGVDGLQMPPRPFFCDYEDGSVVDS

SEQ ID NO: 80640 - protein, 49 aa, Setaria italica
  Transcript Sequence Number=SeqID_14666
MMGTEGIAATVIEDPEPSIPPGFGPFVASASWATQDDIKPVDAHSSPVV

SEQ ID NO: 80641 - protein, 97 aa, Setaria italica
  Transcript Sequence Number=SeqID_14667
  Gene Ontology: Mol. function=nucleoside-triphosphatase activity; Cellular component=protein complex
  Homolog annotation: Hit_ID=Q9LIM2; Match level="QueryCoverage=95%, HitCoverage=4%, E-value=4e-10, Identity=48%"; Hit description =Similarity to 26S proteasome subunit 4
VEQGRVPLPSVLVEERDWLAALAAAPPPCSQREAGIAANDLVSSPLDSGLVPSLLKPLVHLLISLYLDERVWLPLSLLKASGSIKEVVFSSMEKNSV

SEQ ID NO: 80642 - protein, 112 aa, Setaria italica
  misc_feature (24)..(24): Xaa can be any naturally occurring amino acid
  misc_feature (42)..(42): Xaa can be any naturally occurring amino acid
  Transcript Sequence Number=SeqID_14668
  Homolog annotation: Hit_ID=B6TP95; Match level="QueryCoverage=99%, HitCoverage=73%, E-value=5e-42, Identity=72%"; Hit description =SAUR44-auxin-responsive SAUR family member
  Pfam annotation: Domain name=Auxin_inducible; Domain location=9-72; Score=95.8; E_value=1.5e-25; Accession=PF02519.6; Description=Auxin responsive protein
STSTSVAGKGCCVVYSADGRRFEXPLAYLGTAVFGELLNMSXQEEFGFAGDDGRITLPCDAAVMEYVLCLLRRDASEEVVRAFLSSMARPCHYGNGLAQSMGVSQQVAVASF

SEQ ID NO: 80643 - protein, 80 aa, Setaria italica
  Transcript Sequence Number=SeqID_14669
TPRGRQREQQHLPPPGSAAALHELAAPGEARGSRGAARRQAGADKGSAGSGGGSDQIALSLLAVAHQPCLPSRASCSFSA

SEQ ID NO: 80644 - protein, 94 aa, Setaria italica
  misc_feature (14)..(14): Xaa can be any naturally occurring amino acid
  Transcript Sequence Number=SeqID_14670
  Homolog annotation: Hit_ID=Q2RAC3; Match level="QueryCoverage=100%, HitCoverage=27%, E-value=7e-20, Identity=65%"; Hit description =Harpin-induced protein 1 containing protein, expressed
  Pfam annotation: Domain name=Hin1; Domain location=3-93; Score=-16.1; E_value=0.041; Accession=PF07320.5; Description=Harpin-induced protein 1 (Hin1)
  Subcellular localization annotation: CTP_CleavageSite=78; ConfidenceScore=5.72e-01
LTSLALSRVAYSPXNSSLSASFDAALLAANPNAKLSVTYFSPLASVSFAPSSPIAVASLAPFSQGPGNTTTLAFRLVVDDAYVGPDDAAPLKSG

SEQ ID NO: 80645 - protein, 140 aa, Setaria italica
  Transcript Sequence Number=SeqID_14671
  Gene Ontology: Mol. function=catalytic activity; Cellular component =intracellular; Biological process=RNA metabolic process
  Homolog annotation: Hit_ID=Q54W16; Match level="QueryCoverage=70%, HitCoverage=36%, E-value=3e-09, Identity=32%"; Hit description =UPF0406 protein
  Pfam annotation: Domain name=HVSL; Domain location=5-140; Score=25.6; E_value=3.5e-10; Accession=PF09749.1; Description=Uncharacterised conserved protein
LYAVDADYALSELCKDEQKLEKVLLSREFHVSLGRPVAVQVHQIDSFVAMLRQKFQLQQRSYWMEFNKWEHFVNDDCTRSFLSLEVTRTGLPELSKQILMVDEVYRLHGLPEFYKNPRPHISLVWALGDILFKVSQSFSF

SEQ ID NO: 80646 - protein, 280 aa, Setaria italica
  Transcript Sequence Number=SeqID_14672
  Gene Ontology: Mol. function=catalytic activity; Cellular component =intracellular; Biological process=RNA metabolic process
  Homolog annotation: Hit_ID=Q54W16; Match level="QueryCoverage=61%, HitCoverage=55%, E-value=4e-12, Identity=25%"; Hit description =UPF0406 protein
  Pfam annotation: Domain name=HVSL; Domain location=37-277; Score =248.1; E_value=2.2e-71; Accession=PF09749.1; Description =Uncharacterised conserved protein
MDALMANYASDSDSDGGEPAAAPAGAPEVPEASALLPPPPLDLLQPPNFVDYSAMAQGSRVRSFPHVEGNYAVHVYIPVVIPSDAKKQLALAMKRAASLVPDLYAVDADYALSELCKDEQKLEKVLLSREFHVSLGRPVAVQVHQIDSFVAMLRQKFQLQQRYWMEFNKWEHFVNDDCTRSFLSLEVTRTGLPELSKQILMVDEVYRLHGLPEFYKNPRPHISLVWALGDISSKLKQAIKDIEKYQSSMSSLQKCNVRCKFSRVVCKVGKKVYDICNVAD

SEQ ID NO: 80647 - protein, 366 aa, Setaria italica
  Transcript Sequence Number=SeqID_14673
  Gene Ontology: Mol. function=metal ion binding; Cellular component =plasma membrane
  Homolog annotation: Hit_ID=B4F8X0; Match level="QueryCoverage=100%, HitCoverage=69%, E-value=0.0, Identity=89%"; Hit description=Protein binding protein
  Pfam annotation: Domain name=zf-C3HC4; Domain location=2-37; Score =25.8; E_value=0.00012; Accession=PF00097.17; Description=Zinc finger, C3HC4 type (RING finger)
VDNVERPAIFTAQCSHSFHFLCIASNIRHGNITCPICRAQWSELPRDLKIPPLLHNQSDPILRILDDNIASSRVNRRSSIRAARYNDDDPVEPYTSTEHVDPCLRFALIPAPVAAHHHVLGHYPCGRMLPLRQHCQYSSSSMLSPPQIASPSGQRRAYLSVSLAPQPAMDLVLVASPNGPHLRLLKQAMALVVFSMRAIDRLAIVTNATTATRAFPLRRMTSHGKRIALQVIEHLCCVGGTDPVGAIHKGLKILEDRAHQNPSNCILHLSDHPVRSCVGVDMNHSNIPVHQFHVGHGFGVQSGFIMHEFEELLARLLGGVIGDTQLRIGEHGGMVRLGELRGGEERRIPLDLVADCGFILVGYSYL

SEQ ID NO: 80648 - protein, 73 aa, Setaria italica
  Transcript Sequence Number=SeqID_14674
EDVHELRRRRLLHGALSNKKALGFFKGLGQNLRFVGRYFAALEEIDSYKRHRSLRITVYWFVYNNYRFIAAFL

SEQ ID NO: 80649 - protein, 122 aa, Setaria italica
  misc_feature (49)..(49): Xaa can be any naturally occurring amino acid
  misc_feature (97)..(97): Xaa can be any naturally occurring amino acid
  Transcript Sequence Number=SeqID_14675
  Gene Ontology: Mol. function=glutathione transferase activity; Cellular component=cytoplasm; Biological process=aromatic amino acid family metabolic process
  Homolog annotation: Hit_ID=Q9FQC1; Match level="QueryCoverage=99%, HitCoverage=56%, E-value=8e-47, Identity=78%"; Hit description =Glutathione S-transferase
  Pfam annotation: Domain name=GST_C; Domain location=25-118; Score =7.6; E_value=0.019; Accession=PF00043.17; Description=Glutathione S -transferase, C-terminal domain
HLLTASPFQQVCLLLQIANIVCSSIQPLQGYAVIGLHEGSMSFDHGLQXVQHYIDKGFRAIEKLLDGCESKYATGDDVQLGDVFLAPQIHAGINRFXQIDMLKYPILARLHDEYMEIPAFQD

SEQ ID NO: 80650 - protein, 118 aa, Setaria italica
  Transcript Sequence Number=SeqID_14676
  Gene Ontology: Mol. function=glutathione transferase activity; Cellular component=cytoplasm; Biological process=aromatic amino acid family metabolic process
  Homolog annotation: Hit_ID=Q9FQC1; Match level="QueryCoverage=62%, HitCoverage=34%, E-value=2e-32, Identity=89%"; Hit description =Glutathione S-transferase
KFLRSLHTSAFNNKIYKSVIHVTCLFFSLNITYRGTILIQLSVSAIEKLLDGCESKYATGDDVQLGDVFLAPQIHAGINRFQIDMLKYPILARLHDEYMEIPAFQAALPKNQPDAPSS

SEQ ID NO: 80651 - protein, 57 aa, Setaria italica
  Transcript Sequence Number=SeqID_14677
  Pfam annotation: Domain name=DUF2008; Domain location=2-57; Score =65.5; E_value=2e-16; Accession=PF09415.2; Description=Protein of unknown function (DUF2008)
CVHLSANASALKVSCELLRIFVAEAIQRSAFIAEAEDATVIEPTHLERVLPQLLLDF

SEQ ID NO: 80652 - protein, 95 aa, Setaria italica
  Transcript Sequence Number=SeqID_14678
  Pfam annotation: Domain name=DUF2008; Domain location=31-95; Score =93.6; E_value=6.7e-25; Accession=PF09415.2; Description=Protein of unknown function (DUF2008)
SHLHPWRLASLLGLEVLVKGGGGNEDIDVEPALETSRRNRSTTANASALKVSCELLRIFVAEAIQRSAFIAEAEDATVIEPTHLERVLPQLLLDF

SEQ ID NO: 80653 - protein, 115 aa, Setaria italica
  Transcript Sequence Number=SeqID_14679
LPRLKLMCPNLGDPPKFTPFFRCSLKTHDGWPLCDFNEYIYGPMVMWPTEEEVREFESENAPWPCVSSPSDRCKCGILATEGVVPSELGYGSFYGNAHGDYWEGRTCDWEDFCGR

SEQ ID NO: 80654 - protein, 110 aa, Setaria italica
  Transcript Sequence Number=SeqID_14680
  Gene Ontology: Mol. function=nuclease activity; Cellular component =intracellular; Biological process=DNA repair
  Homolog annotation: Hit_ID=O81990; Match level="QueryCoverage=77%, HitCoverage=16%, E-value=8e-19, Identity=55%"; Hit description =Putative transcription repressor HOTR
ELLKARKKSTSADSSRGSGSQTRDYAAPICGAMADNGSCKVVPNAGRQICEKDRGIEVAGASFSRSSGWPCICGACTADGSPCMNKPVEGRKRCALHKGQRGSCTPTPSV

SEQ ID NO: 80655 - protein, 287 aa, Setaria italica
  Transcript Sequence Number=SeqID_14681
  Gene Ontology: Mol. function=hydrolase activity; Cellular component =chloroplast; Biological process=meiosis
  Homolog annotation: Hit_ID=Q7XS73; Match level="QueryCoverage=98%, HitCoverage=24%, E-value=1e-114, Identity=72%"; Hit description =OSJNBa0020I02.9 protein
RTGKDFLQHPDDAQSFSVLGIPCHDLCRLMHFGPPSVKLIASQCLLELLTRISDQRTCTQAELRCSVKYLKSIIAVTEGLVFSEDCKVAGNCGACLSVILGWEKFGSQEKVATRESKWFRLIMEEFAVALTAPGLTSKSFTNQQKFAANLAVSLLRLSQVPDWLTSLFDSHLISGIVTNLSARNVTAEIVNLFTELMARKYLSQEHIVALHNLFQMCRSHVYEGSSKAQMLEQNVKKVARSTDDVLALLFGLMLNQCTESGVVQPEQQRLLRAIDLFVQESSGREQR

SEQ ID NO: 80656 - protein, 109 aa, Setaria italica
  Transcript Sequence Number=SeqID_14682
ACSQRPQIGGPAAQKNRLASHFLCCQILKSVCTCANQISLATIHHLIHPVLSSVTSCVVKMHLNKEFVCLVEVSTCNCPRMSMDNQATTCHPLQISARNCAAAQAVYWH

SEQ ID NO: 80657 - protein, 317 aa, Setaria italica
  Transcript Sequence Number=SeqID_14683
  Gene Ontology: Mol. function=acetylglutamate kinase activity; Cellular component=cytoplasm; Biological process=amino acid biosynthetic process
  Homolog annotation: Hit_ID=B6TEB2; Match level="QueryCoverage=86%, HitCoverage=79%, E-value=1e-133, Identity=87%"; Hit description =Acetylglutamate kinase
  Pfam annotation: Domain name=AA_kinase; Domain location=56-294; Score= 187.7; E_value=3.3e-53; Accession=PF00696.20; Description=Amino acid kinase family
  Subcellular localization annotation: CTP_CleavageSite=26; ConfidenceScore=5.40e-01
PKHGPTANRVVTPLASSSSRRGLRVSAASVAAAAAALSRVDVLSEALPFIQRFKGKTVVVKYGGAAMKSPELQASVIRDLVLLSCVGLRPVLVHGGGPEINSWLLRVGVEPQFRDGLRVTDAVTMEVVEMVLVGKVNKQLVSLISLAGATAVGLCGKDARLITARPSRDAAALGFVGEVTRVDPSVLHPIIAAGHIPVIATVAADETGQAYNINADTAAGEIAAAIGAEKLLLLTDVSGVLADRDDPGSLVREVDVAWVRQMVADGKVAGGMIPKVECCVRALAQGVHTASIIDGRVPHSLLLEILTDEGTGTMITG

SEQ ID NO: 80658 - protein, 218 aa, Setaria italica
  misc_feature (135)..(135): Xaa can be any naturally occurring amino acid
  Transcript Sequence Number=SeqID_14684
  Gene Ontology: Mol. function=aminoacyl-tRNA ligase activity; Cellular component=cytoplasm; Biological process=tRNA aminoacylation for protein translation
  Homolog annotation: Hit_ID=B9SKB0; Match level="QueryCoverage=97%, HitCoverage=19%, E-value=1e-89, Identity=71%"; Hit description =Leucyl-tRNA synthetase, putative
EGCHFLVFCNGPTPKSDIPPTLLSKMKQEFEYWYPFDIRVSGKDLIQNHLTFCIYNHTAILPEHHWPRGFRCNGHLMLNSEKMSKSTGNFRTLKEAIQEFSSDATRFALADAGDGMDDANFVFETANAAILRLTXEIAWMEEVVAAESSLRAGPPSSYADHVFANEINIAVKETEKSYNAFMFRDALKSGFYDLQLARDEYRLSCGAAGMNRDLLWQI

SEQ ID NO: 80659 - protein, 128 aa, Setaria italica
  Transcript Sequence Number=SeqID_14685
  Gene Ontology: Mol. function=aminoacyl-tRNA ligase activity; Cellular component=cytoplasm; Biological process=tRNA aminoacylation for protein translation
  Homolog annotation: Hit_ID=B9SKB0; Match level="QueryCoverage=95%, HitCoverage=11%, E-value=2e-48, Identity=72%"; Hit description =Leucyl-tRNA synthetase, putative
MSSNPDGGKSYARRDLLIAIQSEAQKLWDEKRVFEAEPGNGRPGPGEKFFGNFPYPYMNGLLHLGHAFSLSKLEFGAAYHRLRGSNVLLPFGFHCTGMPIKASADKLAREIQQYGNPPVFPAVEDEVS

SEQ ID NO: 80660 - protein, 957 aa, Setaria italica
  misc_feature (53)..(53): Xaa can be any naturally occurring amino acid
  misc_feature (109)..(109): Xaa can be any naturally occurring amino acid
  Transcript Sequence Number=SeqID_14686
  Gene Ontology: Mol. function=aminoacyl-tRNA ligase activity; Cellular component=cytoplasm; Biological process=tRNA aminoacylation for protein translation
  Homolog annotation: Hit_ID=B9SKB0; Match level="QueryCoverage=96%, HitCoverage=85%, E-value=0.0, Identity=72%"; Hit description=Leucyl -tRNA synthetase, putative
  Pfam annotation: Domain name=Anticodon_1; Domain location=658-795; Score=51.8; E_value=2.7e-12; Accession=PF08264.5; Description =Anticodon-binding domain
  Pfam annotation: Domain name=tRNA-synt_1; Domain location=6-620; Score=-357.0; E_value=0.00014; Accession=PF00133.14; Description =tRNA synthetases class I (I, L, M and V)
  Pfam annotation: Domain name=tRNA-synt_1g; Domain location=335-632; Score=-269.6; E_value=0.0023; Accession=PF09334.3; Description=tRNA synthetases class I (M)
  Pfam module annotation: Pfam domain module=Anticodon_1::tRNA-synt _1::tRNA-synt_1g; Domain location=658-795::6-620::335-632
EQKIVKTKVNFKRKVKLKVKLQRTGQPKIMRGFGLSDEEIAKFQDPYHWLTYXPPLAKEDLKAFGLGCDWRRSFITTDMNPFYDAFVRWQMRKLKKMGKVVKDMRYTIXLPLNGQPCADHDRASGEGVQPQEYVLIKMEVIPPFPPQLKALEGKKVYLAAATLRPETMYGQTNCWVLPDGKYGAFEINDTDVFILTARSALNLAYQNLSRVPQKPTCLAEISGNDLIGLPLKSPLAFNEIIYALPMMTILTDKGTGIVTSVPSDSPDDFMALQDLVTKPALRAKFAVKDEWVLPFKVVPIINIPEFGDKSAEKVCLDLKIKSQNDKEKLAEAKRMTYLKGFTDGTMIVGEFKGRKVQDAKPLIKNKLLEEGAAVLYSEPEKKVMSRSGDECVVALTDQWYITYGEAEWKQMAEKCLENMNTFSAETRNGFEHTLGWLNQWACSRSFGLGTRIPWDEQFLVESLSDSTLYMAYYTVAHLLQNGNLYGKEISAIRPEQMTDDIWEYVFCNGPTPKSDIPPTLLSKMKQEFEYWYPFDIRVSGKDLIQNHLTFCIYNHTAILPEHHWPRGFRCNGHLMLNSEKMSKSTGNFRTLKEAIQEFSSDATRFALADAGDGMDDANFVFETANAAILRLTKEIAWMEEVVAAESSLRAGPPSSYADHVFANEINIAVKETEKSYNAFMFRDALKSGFYDLQLARDEYRLSCGAAGMNRDLLWQFMDVQTRLITPICPHYAEHVWQKILKKEGFAIKAGWPVADTPNPTLRIANKYLQDSIVLMRKLLQKQESGSKKPKKGAASAPPPSENKMSIGLIYVNEHYYGWKEQCLKVLQSKFDSQARSFSPDQEIIEALKNCSIGQEANFKQVQKLCMPFIRFKKDEAREVGPQALELKLPFGEMDVLQENLELIRRQLGLEHVEVLSASDEAARAKAGKYASLLNQNPPSPGEPVAIFMSKQEFEAQN

SEQ ID NO: 80661 - protein, 98 aa, Setaria italica
  Transcript Sequence Number=SeqID_14687
  Homolog annotation: Hit_ID=B6TRC6; Match level="QueryCoverage=96%, HitCoverage=21%, E-value=2e-19, Identity=57%"; Hit description=Amino acid transport protein
  Subcellular localization annotation: CTP_CleavageSite=77; ConfidenceScore=5.09e-01
MGFDKEASSSSSRLDAAAPLLPQHGGLHGGGAGGKLSSQPKTFANVFIAVVGSGVLGLPYTFSRTGWAAGTLLLLAVAALTFHCMMLLVAARRRIEYD

SEQ ID NO: 80662 - protein, 301 aa, Setaria italica
  misc_feature (139)..(139): Xaa can be any naturally occurring amino acid
  Transcript Sequence Number=SeqID_14688
  Gene Ontology: Mol. function=transferase activity, transferring glycosyl groups; Cellular component=integral to membrane; Biological process=metabolic process
  Homolog annotation: Hit_ID=B2CW78; Match level="QueryCoverage=99%, HitCoverage=61%, E-value=2e-76, Identity=45%"; Hit description=UDP -glucoronosyl/UDP-glucosyl transferase protein
GRRPAASCVVSDTCHPWTGAVARELGVPRLALETSCAFSSFCMRLMSTHGIFEGVDDDELPVRVPGFPIDMEMSRARSPGNFSGFGKVFADEVMAENARADGLLVNSFAELEPLFVDAYEAALGKKIWTVGPLLLEHRXSTASDEDADAVRCASWLESKKPRSVVFVSFGSLVRSSLPQLAEIAQGLEASDRPFIWAVKPSNLADFERWLSDDGFESRVAERGLVVTGWAPQRAILSHPATGAFVTHCGWNSVLECVAAGLPMATWPHFAEQFMNEKLVVDVLRVGVPVGVKGAAQWGVEA

SEQ ID NO: 80663 - protein, 84 aa, Setaria italica
  Transcript Sequence Number=SeqID_14689
FGPTPTPPPTLEAADETWMERHEKEPVAEVKPPVAKLAVSEPATAEERPPQMAAEKEKAIEEMVANLPPSKPIVRKPPKAPGRP

SEQ ID NO: 80664 - protein, 196 aa, Setaria italica
  misc_feature (152)..(152): Xaa can be any naturally occurring amino acid
  misc_feature (162)..(162): Xaa can be any naturally occurring amino acid
  Transcript Sequence Number=SeqID_14690
SSASACDEEVPTSSQSGPAPEGSGEASALTPLSSKCAGKRPAAEQPTSEQANAPNKRASQHTMRAPPVGVGAAGYYDYRRVPAQLPPLMQWPPAIYSSMQGPVKMQRRPPLMNAHNGQPPVQGPPVLRLYPPHRAAATVPNSLGRTVMMRPXNLAAGPPVRXAVLPRPPPPQQQQMEDMMMRQQRVYAQLLAEMKL

SEQ ID NO: 80665 - protein, 93 aa, Setaria italica
  Transcript Sequence Number=SeqID_14691
  Gene Ontology: Mol. function=protein serine/threonine kinase activity; Biological process=protein amino acid phosphorylation
  Homolog annotation: Hit_ID=Q3E9E7; Match level="QueryCoverage=97%, HitCoverage=18%, E-value=7e-14, Identity=47%"; Hit description =Protein kinase family protein
  Subcellular localization annotation: CTP_CleavageSite=34; ConfidenceScore=5.56e-01
MSCLPCSGSSGKEAKSLDALSPSPRPAAKSAPVRSKSRASGSRKEDSVPVRRGGNTAHGPTQIFTFRELAIATKNFRKDCLLGEGGFGRVYKG

SEQ ID NO: 80666 - protein, 139 aa, Setaria italica
  Transcript Sequence Number=SeqID_14692
  Gene Ontology: Mol. function=protein kinase activity; Cellular component=integral to membrane; Biological process=protein amino acid phosphorylation
  Homolog annotation: Hit_ID=Q5GAP9; Match level="QueryCoverage=92%, HitCoverage=18%, E-value=2e-65, Identity=93%"; Hit description =Leucine-rich repeat transmembrane protein kinase 1-like protein
  Pfam annotation: Domain name=LRRNT_2; Domain location=25-66; Score =41.3; E_value=3.7e-09; Accession=PF08263.4; Description=Leucine rich repeat N-terminal domain
  Pfam annotation: Domain name=LRR_1; Domain location=116-138; Score =10.7; E_value=2.7; Accession=PF00560.25; Description=Leucine Rich Repeat
  Pfam annotation: Domain name=LRR_1; Domain location=93-113; Score =7.2; E_value=13; Accession=PF00560.25; Description=Leucine Rich Repeat
  Pfam module annotation: Pfam domain module=LRRNT_2::LRR_1::LRR_1; Domain location=25-66::116-138::93-113
  Subcellular localization annotation: CTP_CleavageSite=66; ConfidenceScore=5.27e-01
MVGAAIGVVVLFLAAAPFGANANTDSNDVNALNVFYTTMNSPPQLTNWVSQNGDPCGQSWLGVTCSGSRVTTIKLPGMRLNGTLGYNMNQMTALIQLDMSNNNLGGSDIPYNLPPNMEILNLASNNFTGTVPYSISQMV

SEQ ID NO: 80667 - protein, 95 aa, Setaria italica
  Transcript Sequence Number=SeqID_14693
  Gene Ontology: Mol. function=transcription factor activity; Cellular component=nucleus; Biological process=regulation of transcription, DNA-dependent
  Homolog annotation: Hit_ID=Q7XAD7; Match level="QueryCoverage=34%, HitCoverage=11%, E-value=6e-10, Identity=90%"; Hit description=Ap24
RVWLGTFDTAEEAAKVYDSAAIQLRGPDATTNFEQVDDPVPTEVAERLPQPPPPAASKNASSSATSYDSGEESHAAAASPTSVLRSFPPSAVAED

SEQ ID NO: 80668 - protein, 53 aa, Setaria italica
  Transcript Sequence Number=SeqID_14694
KQPVLRSTIIDETCMNSAERMNISNDAQLCSTVALTIYAYTDSVIQRSSSNIC

SEQ ID NO: 80669 - protein, 231 aa, Setaria italica
  misc_feature (13)..(13): Xaa can be any naturally occurring amino acid
  Transcript Sequence Number=SeqID_14695
  Gene Ontology: Cellular component=mitochondrion
  Homolog annotation: Hit_ID=B4G0H5; Match level="QueryCoverage=87%, HitCoverage=43%, E-value=2e-77, Identity=72%"; Hit description =Membrane-associated salt-inducible protein like
  Pfam annotation: Domain name=PPR; Domain location=15-49; Score=24.5; E_value=0.00044; Accession=PF01535.12; Description=PPR repeat
  Pfam annotation: Domain name=PPR; Domain location=50-84; Score=36.0; E_value=1.6e-07; Accession=PF01535.12; Description=PPR repeat
  Pfam annotation: Domain name=PPR; Domain location=85-119; Score=12.5; E_value=0.3; Accession=PF01535.12; Description=PPR repeat
  Pfam module annotation: Pfam domain module=PPR::PPR::PPR; Domain location=15-49::50-84::85-119
CGRRMVESGCKPXVAAYNVKAMNYGLNGKPEEVLEVMMEMEADGVKPDTITYNFLMTSYCRSGKLEDAKVLYHSLAEKGCSANAATYKHMLAALCAHGDFDAGLGIAKESLKRHKVPDFKTMKGLVEGLAKGGRVAEAKEIIAEVKKRFPENSMSGWKKLEKELGLDSDSRDTQSKGTSGETAVESKSVAADAHELEGSVIEETAVSEESSDDEVPVPEVSSSKEVPQGPA

SEQ ID NO: 80670 - protein, 107 aa, Setaria italica
  Transcript Sequence Number=SeqID_14696
  Gene Ontology: Mol. function=glutathione transferase activity
  Homolog annotation: Hit_ID=Q6ZJH9; Match level="QueryCoverage=96%, HitCoverage=33%, E-value=1e-40, Identity=74%"; Hit description =Putative glutathione S-transferase GST 16
MTSMGTGAPIVKVYHEKSIILPDVSRVLACLYEKDIKFETHKTSYRSLLRLQASSHAPVPFYDGPTFLEESRGICRYIAEKYEHQGDAFLLRKDALERASVEQWLHN

SEQ ID NO: 80671 - protein, 167 aa, Setaria italica
  misc_feature (40)..(40): Xaa can be any naturally occurring amino acid
  Transcript Sequence Number=SeqID_14697
  Subcellular localization annotation: CTP_CleavageSite=30; ConfidenceScore=5.62e-01
APETARVPAPPAPPHSSPPRHRRQRQRPPRPSSARHPPCXRPKHQNQTLEPPPAPFPAACPPKPASPTRNPTELTLFHTTARRIPPDSVESARPATARRPLLLARAIRERVPGEVGGGRLSSRPYTCARLGPRESDGSARRGDGGGGGGRRLASALKGRGREGWGLR

SEQ ID NO: 80672 - protein, 111 aa, Setaria italica
  Transcript Sequence Number=SeqID_14698
  Gene Ontology: Cellular component=integral to membrane
  Homolog annotation: Hit_ID=B0WGS0; Match level="QueryCoverage=82%, HitCoverage=80%, E-value=4e-11, Identity=38%"; Hit description =Transmembrane protein 93
  Pfam annotation: Domain name=DUF786; Domain location=2-111; Score =161.1; E_value=3.4e-45; Accession=PF05646.5; Description=Protein of unknown function (DUF786)
MAAAGGVSSDDVPILQAENLTSNVKSIYYSRTFLSIIGGVVAGIWGFTGLMGFVFYFLIMMVASIGLLAKSKFSVQTYFDSWNRILIEGVFGSLMSFVLFWSFAYDIVHIF

SEQ ID NO: 80673 - protein, 39 aa, Setaria italica
  Transcript Sequence Number=SeqID_14699
IIVYVYCRCYQLGNFKRFFCMIAAEATDLQLRLVEPFSQ

SEQ ID NO: 80674 - protein, 205 aa, Setaria italica
  Transcript Sequence Number=SeqID_14700
  Gene Ontology: Mol. function=DNA binding; Cellular component=nuclear envelope; Biological process=protein import into nucleus
  Homolog annotation: Hit_ID=B9SHV9; Match level="QueryCoverage=67%, HitCoverage=31%, E-value=2e-52, Identity=67%"; Hit description=Leng8 protein, putative
  Subcellular localization annotation: CTP_CleavageSite=53; ConfidenceScore=5.23e-01
MDRRGEASHRGWSSSRGRDWRGRGRGRGGGGGGRPSPPPPSSTASSAAVNLAPASTVDDAAPIMGTCPDMCPARERAQRERLRDLAVLERVGGDPARTSPSLAVKKFCRTISSTNVMASDIRPLPVLRETMDYLLHLLDSSEHPFETIHDFIFDRTRSIRQDLSMQNIVNDQAVQIYEDVVTFHIRSHQRLARSCQDSDASLCFP

SEQ ID NO: 80675 - protein, 173 aa, Setaria italica
  misc_feature (151)..(151): Xaa can be any naturally occurring amino acid
  misc_feature (158)..(158): Xaa can be any naturally occurring amino acid
  misc_feature (161)..(161): Xaa can be any naturally occurring amino acid
  misc_feature (171)..(171): Xaa can be any naturally occurring amino acid
  Transcript Sequence Number=SeqID_14701
  Homolog annotation: Hit_ID=B9SHV9; Match level="QueryCoverage=85%, HitCoverage=33%, E-value=7e-27, Identity=44%"; Hit description=Leng8 protein, putative
LYLIPVYFLGNPFHISSHQRLARSCQDSDASLCFLNMEQLTKCLLSLFDMYHVIHESDSHSKREAEYYSFYVLLHLGCKIPKMVDSLSLWYSRLATQVRQSKEMIFVRNLLRCYQLGNFKRFFCMIAAEATDLQLRLVEPFLNEVRARALXMYFNHSXYKXLQHHPLEHLXES

SEQ ID NO: 80676 - protein, 182 aa, Setaria italica
  misc_feature (30)..(30): Xaa can be any naturally occurring amino acid
  Transcript Sequence Number=SeqID_14702
  Homolog annotation: Hit_ID=B9SHV9; Match level="QueryCoverage=83%, HitCoverage=34%, E-value=9e-29, Identity=45%"; Hit description=Leng8 protein, putative
FIADYFHAEPCFFCFPSKEAEYYSFYVLLXHLGCKIPKMVDSLSLWYSRLATQVRQSKEMIFVRNLLRCYQLGNFKRFFCMIAAEATDLQLRLVEPFLNEVRARALMYFNHSGYKLQHHPLEHLSGILMIEELELETLCGICGLEIRTSEGMKAFAPKQTSFSLPTSMPRSNGIYISREVER

SEQ ID NO: 80677 - protein, 230 aa, Setaria italica
  misc_feature (5)..(5): Xaa can be any naturally occurring amino acid
  misc_feature (183)..(183): Xaa can be any naturally occurring amino acid
  Transcript Sequence Number=SeqID_14703
  Gene Ontology: Mol. function=microtubule motor activity; Cellular component=microtubule associated complex; Biological process =microtubule-based movement
  Homolog annotation: Hit_ID=Q2R2P7; Match level="QueryCoverage=100%, HitCoverage=30%, E-value=1e-54, Identity=54%"; Hit description =Centromeric protein E, putative, expressed
PDSKXMPDGFVACRSRYSNDVEFSPIPENVDNTADEDLWMRLNKGCVTDLDMLEMTPGLKRETSLRRDATSAAPLEEPTDARCQKLEKDCISDPQQLEESNARCEALEKECDLLRDKNSSLQQELSESKREADRLVAEKQAELEDSKATCALLERELSKSRQDAERLAIEKQELAGELGVERXQKMEELKQDIRVISRAFSQREGQLTSLYTKSKAILENCKASHVATLP

SEQ ID NO: 80678 - protein, 199 aa, Setaria italica
  misc_feature (50)..(50): Xaa can be any naturally occurring amino acid
  Transcript Sequence Number=SeqID_14704
  Gene Ontology: Mol. function=nucleic acid binding; Cellular component= intracellular
  Homolog annotation: Hit_ID=B7EI10; Match level="QueryCoverage=84%, HitCoverage=86%, E-value=8e-61, Identity=74%"; Hit description=(RAP Annotation release2) D111/G-patch domain containing protein
LNIELEETEEHIKKREVCTHLDLISVCSSRWLASTIKILEHLVHFLFGGXSFPCLVQIMTIQVIAEREHKIRSEVKEIQKVFFCSLCNKQYKLAHEFESHLSSYDHNHRKRFKEMREMQSSSGSRDDRQKREQQREEKELAKIAQLADAHRKQQKQENSEAPAEGVVPKNIAGPSNQDQRRTLKFGFSKMAPSKALAGI

SEQ ID NO: 80679 - protein, 293 aa, Setaria italica
  Transcript Sequence Number=SeqID_14705
  Gene Ontology: Mol. function=nucleic acid binding; Cellular component= intracellular; Biological process=biological_process
  Homolog annotation: Hit_ID=Q01MP9; Match level="QueryCoverage=90%, HitCoverage=88%, E-value=1e-118, Identity=81%"; Hit description =OSIGBa0112G01.4 protein
  Pfam annotation: Domain name=G-patch; Domain location=57-101; Score =76.8; E_value=8.1e-20; Accession=PF01585.15; Description=G-patch domain
MESKQRGKAEGGGGGHRVDLDEEDDLEEFRLPMSHRPTENLDTEGLEQASVHTQLTASNVGFRLLQKMGWKTGKGLGKNEQGILEPIRADIRDAKLGVGKQEEDDFFTSEENVQRKKLNIELEETEEHIKKREVIAEREHKIRSEVKEIQKVFFCSLCNKQYKLAHEFESHLSSYDHNHRKRFKEMREMQSSSGSRDDRQKREQQREEKELAKIAQLADAHRKQQKQENSEAPAEGVVPKNIAGPSNQDQRRTLKFGFSKMAPSKAPVGNASKRPKVATKVSSVFGNDSDEDS

SEQ ID NO: 80680 - protein, 39 aa, Setaria italica
  Transcript Sequence Number=SeqID_14706
MASETHPSRHRRLRKASDLSTVTTASPLSKRVRIRSKDS

SEQ ID NO: 80681 - protein, 77 aa, Setaria italica
  Transcript Sequence Number=SeqID_14707
ENNTGLKREIAIPTGRIQSHDNCPHFPKELTIRVGGLSCLIIVANIFSTRAASSEYLPIFIQQLHKAHLIKFGPQLC

SEQ ID NO: 80682 - protein, 91 aa, Setaria italica
  Transcript Sequence Number=SeqID_14708
YLIIFPDSERRLIELAQALFSNRYETVRESLKKRIPSTDLLAMLRSLWEDASAIDEVIPEAALPAFSLETTRDIIRQHIATAFLHLQSEIS

SEQ ID NO: 80683 - protein, 700 aa, Setaria italica
  misc_feature (89)..(89): Xaa can be any naturally occurring amino acid
  Transcript Sequence Number=SeqID_14709
  Gene Ontology: Mol. function=molecular_function; Cellular component =integral to membrane; Biological process=Golgi organization and biogenesis
  Homolog annotation: Hit_ID=Q54KG3; Match level="QueryCoverage=95%, HitCoverage=76%, E-value=5e-42, Identity=26%"; Hit description =Protein fat-free homolog
  Pfam annotation: Domain name=Dor1; Domain location=1-318; Score= -131.2; E_value=0.094; Accession=PF04124.4; Description=Dor1-like family
  Pfam annotation: Domain name=Vps51; Domain location=1-76; Score=75.2; E_value=2.4e-19; Accession=PF08700.3; Description=Vps51Vps67
  Pfam module annotation: Pfam domain module=Dor1::Vps51; Domain location=1-318::1-76
MNVLVQQSNLEGLLQRHVKMAAEIKNLDTDLQMLVYENYNKFISATDTIKRMKTNIVGMEAGMEQLLSKITSVQSKSDTVNTSLFDKRXNIEKLHRTRNLLRKVQFIYDLPTRLNKCIKTEAYADAVRFFTGAKPIFEAYGDTSFQDCKKASEEAMDLVIQHLQAKLYSDSEPIEERAEAVVLLKQLNFPVDNLKSNLLEKLEDCLLNLQNESTQASIGDISKTFRAYLIIFPDSERRLIELAQALFSNRYETVRESLKKRIPSTDLLAMLRSLWEDASAIDEVIPEAALPAFSLETTRDIIRQHIATAFLHLQSEISGALVRTHSTSNEKLEESQLQTAMDTSKIKVSQGCIDLLQEFHNLIDGNTELLVKLRDLIIDWVQEGFQDFFQKLDGHFHVLSGRSKGFPQESSALDSVQIDKVPTVLVLMLAQLCVYIEQTTIPKVTEELASSFSGGGARSYEYGPPFVPGEICRLYRSSGEKFLHHYINMKTQKISKLLNKRFTTPVWIKHKEPREVNMFVDLLLLEFNGVVSEVKQILPGQIRRHRHSDSTGSTTSSRSNPMREDMLNRSNTHRARSQFLENHLAKLFEQKMEIFTKVEYTQESVISTVLKLCLKSLQEFVRLQTFNRSGFQQIQLDMEFLKSSLKEFVDDEAAISFLLKEVNNAAHERCLDPIPLEPPILDKLTNAKLAKIKEQNPNMQ

SEQ ID NO: 80684 - protein, 310 aa, Setaria italica
  misc_feature (299)..(299): Xaa can be any naturally occurring amino acid
  Transcript Sequence Number=SeqID_14710
  Gene Ontology: Mol. function=RNA binding; Cellular component=signal recognition particle, endoplasmic reticulum targeting
  Homolog annotation: Hit_ID=B6U4F2; Match level="QueryCoverage=99%, HitCoverage=51%, E-value=1e-157, Identity=87%"; Hit description =Signal recognition particle 68 kDa protein
MSKTGDQQPADMEVESSAVAEEKPAVRFSINVLELMREAQMQHGLRQSDYTRYRRYCSARLRRLYKSLKFLHGRGKYTRRNITESTVTDVRYLHIVFYMAERAWSHAMEKKTAGTNAQQRIYMLGRFRKAVKWASLFSQLCSVKGDSRTSLEAEAYASYMKGALFFEQDKNIEAAMINFKNTRAVYEELGKYGSIENQLLCRQRIEEVEPMIDFCSHKLGGSSLQAHELLDTANDLLKAKMEAVLSETRSQQAASMTEFNWLGRRFPITNAKTRVSILKAQQLEKDLNGSATESIASEXKSLGIFDKIFL

SEQ ID NO: 80685 - protein, 228 aa, Setaria italica
  Transcript Sequence Number=SeqID_14711
  Gene Ontology: Mol. function=oxidoreductase activity; Biological process=oxidation reduction
  Homolog annotation: Hit_ID=B6TE77; Match level="QueryCoverage=100%, HitCoverage=72%, E-value=1e-102, Identity=81%"; Hit description=1 -aminocyclopropane-1-carboxylate oxidase 1
  Pfam annotation: Domain name=2OG-FeII_Oxy; Domain location=158-228; Score=36.1; E_value=1.4e-07; Accession=PF03171.12; Description=2OG -Fe(II) oxygenase superfamily
MTGPMEIPVIDLGGLGGGEEQRSWTMARLHEACKDWGFFWVENHGVDAALMDEVKRFVYGHYEEHLEAKFYASNVARNLPAEDGGGEPSDEVDWESTYFIQHRPRNNAADFPEIAPAAREALDAYIAQMASLAERLAECVSLNLGLPGGHVAGAFAPPFVGTKFAMYPPCPRPERVWGLRAHTDAGGIILLLQDDAVGGLEFLRGGAEWVPVGPTRSGRLFVNIGDQI

SEQ ID NO: 80686 - protein, 124 aa, Setaria italica
  Transcript Sequence Number=SeqID_14712
  Homolog annotation: Hit_ID=Q7XXF8; Match level="QueryCoverage=54%, HitCoverage=9%, E-value=2e-10, Identity=38%"; Hit description =OSJNBa0095E20.14 protein
CLGFLLVVLEIVSVCRAVGSTWMCALLYCLDWGQPLSLLKSLRRHVRAARKRRWSGSIGQFNIFDVCTRDTAKIASRVASKMGLKHWWNKVHFSGTVTLTASLKDLLLETLPRIDVKKSRGVRM

SEQ ID NO: 80687 - protein, 90 aa, Setaria italica
  Transcript Sequence Number=SeqID_14713
SLFKSEIKVNVQLPVFHRSIQPKQLLTPPRGPAGAGRRRLGWDGGADRDERVSCLRRVRRERGAGGGGEDKRGGRAGEERRGRGRDEGEK

SEQ ID NO: 80688 - protein, 71 aa, Setaria italica
  Transcript Sequence Number=SeqID_14714
YFGVPMFLGNAVCVEAHLLNCEIHFEYLHIIGMHTQTDWRSYALIHFCSVQVVTIFLLIMYIFALFCGRDM

SEQ ID NO: 80689 - protein, 81 aa, Setaria italica
  Transcript Sequence Number=SeqID_14715
  Gene Ontology: Mol. function=ubiquitin binding; Cellular component =cytoplasm; Biological process=ubiquitin-dependent protein catabolic process
  Homolog annotation: Hit_ID=B6TM27; Match level="QueryCoverage=92%, HitCoverage=30%, E-value=1e-33, Identity=89%"; Hit description=DCN1 -like protein 2
  Pfam annotation: Domain name=DUF298; Domain location=1-81; Score =64.1; E_value=5.4e-16; Accession=PF03556.7; Description=Domain of unknown function (DUF298)
ERLLTLFPCPSEQGQKSLSLETAIGMWQLLFAERNWPLLDHWCQFLQVRHNKAISRDTWAQLLEFVKTIDPQLSNYDDEGA

SEQ ID NO: 80690 - protein, 134 aa, Setaria italica
  misc_feature (120)..(120): Xaa can be any naturally occurring amino acid
  Transcript Sequence Number=SeqID_14716
  Gene Ontology: Mol. function=ubiquitin binding; Cellular component =cytoplasm; Biological process=ubiquitin-dependent protein catabolic process
  Homolog annotation: Hit_ID=B6TM27; Match level="QueryCoverage=100%, HitCoverage=53%, E-value=3e-72, Identity=95%"; Hit description=DCN1 -like protein 2
  Pfam annotation: Domain name=DUF298; Domain location=33-134; Score =151.7; E_value=2.2e-42; Accession=PF03556.7; Description=Domain of unknown function (DUF298)
MLVISWHMKAATMCEFTRQEFIGGLQSIGVDSIEKFRGKLPSLRAELKDDNKFREIYNFAFTWAREKGQKSLSLETAIGMWQLLFAERNWPLLDHWCQFLQVRHNKAISRDTWAQLLEFXKAIDPQLSNYDDEG

SEQ ID NO: 80691 - protein, 250 aa, Setaria italica
  Transcript Sequence Number=SeqID_14717
  Gene Ontology: Mol. function=molecular_function; Cellular component =cellular_component; Biological process=ubiquitin-dependent protein catabolic process
  Homolog annotation: Hit_ID=B6TM27; Match level="QueryCoverage=100%, HitCoverage=100%, E-value=1e-143, Identity=96%"; Hit description =DCN1-like protein 2
  Pfam annotation: Domain name=DUF298; Domain location=126-241; Score =219.0; E_value=1.2e-62; Accession=PF03556.7; Description=Domain of unknown function (DUF298)
  Pfam annotation: Domain name=UBA; Domain location=7-44; Score=22.0; E_ value=0.0025; Accession=PF00627.23; Description=UBATS-N domain
  Pfam module annotation: Pfam domain module=DUF298::UBA; Domain location=126-241::7-44
MYKLGRGNRDKVQQFMTITGASEKVALQALKASDWHLEGAFDFFYSQPQISAVNTRHLEDIFNRYKEPDADMIMVEGVSQLCNDLQVDPQDIVMLVISWHMKAATMCEFTRQEFIGGLQSIGVDSIEKFRGKLPSLRAELKDDNKFREIYNFAFTWAREKGQKSLSLETAIGMWQLLFAERNWPLLDHWCQFLQVRHNKAISRDTWAQLLEFVKTIDPQLSNYDDEGAWPYLIDEFVEYLTENGFVQRKK

SEQ ID NO: 80692 - protein, 511 aa, Setaria italica
  misc_feature (505)..(505): Xaa can be any naturally occurring amino acid
  Transcript Sequence Number=SeqID_14718
  Gene Ontology: Mol. function=protein serine/threonine kinase activity; Cellular component=peroxisome; Biological process=protein amino acid phosphorylation
  Homolog annotation: Hit_ID=B6U4H5; Match level="QueryCoverage=100%, HitCoverage=90%, E-value=0.0, Identity=86%"; Hit description=ATP binding protein
  Pfam annotation: Domain name=Pkinase; Domain location=197-463; Score =129.7; E_value=9.5e-36; Accession=PF00069.17; Description=Protein kinase domain
  Pfam annotation: Domain name=Pkinase_Tyr; Domain location=197-463; Score=95.6; E_value=1.7e-25; Accession=PF07714.9; Description =Protein tyrosine kinase
  Pfam module annotation: Pfam domain module=Pkinase::Pkinase_Tyr; Domain location=197-463::197-463
ATVSSEDQNDRHGNDSNIQCAESDGACKPMPEMDSKSINGECPDEVPEIGSKSSNDDNCGSSEEMPRIGTKSSSDDNSECADRSSPRAVLDISVSGSVDSDDSASVEQSAESNHNVQWRNLISGLILRRKKSMGRAVTFPQRSKSRGLRGYLERMRSGKNQMDCSAIAPEILPEIGKWRPSWRSFDYEELCTATDRFSSEKLIGKGGHAEVYKGQLADGQFVAVKRLTKGGNKEDRVSDFLSELGIIAHVNHPNAAQLLGFSVEGGLHLVLQFSPHGSLASVLHGTKEPLKWKVRFNIALGIAEGLLYLHEGCHRRIIHRDIKASNILLTEDYQPQISDFGLAKWLPDQLTHLVVYPIEGTFGYMAPEYFMHGIINEKTDVFAYGVLLLELVTGRKAVDSSRQSLVIWAKPLLDANNIKELVDPSLGNEYDPEEMVYILAVASLCIHHSSTSRPSMKSVVCFLKGDRESLELVRRPKIVKPLMFDSCDSEDYTRSSYLNDLNRHXQLALEQ

SEQ ID NO: 80693 - protein, 153 aa, Setaria italica
  misc_feature (29)..(29): Xaa can be any naturally occurring amino acid
  Transcript Sequence Number=SeqID_14719
  Gene Ontology: Mol. function=hydrolase activity, acting on acid anhydrides, catalyzing transmembrane movement of substances; Cellular component=integral to membrane; Biological process =metabolic process
  Homolog annotation: Hit_ID=B9R933; Match level="QueryCoverage=100%, HitCoverage=16%, E-value=1e-44, Identity=56%"; Hit description =H(\\+)-transporting atpase plant/fungi plasma membrane type, putative
VLGGYLAMMTVIFFWAAYKTDFFPVWTKXFLKHLKVLGNLLYMSIGVVITLVMVPNLQRVFGVESLEKTAQDDFQKLASAVYLQVSTISQALIFVTRSRSWSFVERPGFLLVFAFLVAQLGIGWGWAGVIWLYNVVFYFPLDVIKFLTRYALS

SEQ ID NO: 80694 - protein, 96 aa, Setaria italica
  Transcript Sequence Number=SeqID_14720
  Gene Ontology: Mol. function=hydrolase activity, acting on acid anhydrides, catalyzing transmembrane movement of substances; Cellular component=integral to membrane; Biological process =metabolic process
  Homolog annotation: Hit_ID=Q43243; Match level="QueryCoverage=52%, HitCoverage=5%, E-value=2e-18, Identity=90%"; Hit description=H(+) -transporting ATPase
FTYSVICCLWSFIVFLCRLVLLVSFVLSLPFMVLIIAILNDGTIMTISKDRVKPSPQPDSWKLAEIFATGVVLGGYLAMIIAILNDGTIIYQQDLE

SEQ ID NO: 80695 - protein, 147 aa, Setaria italica
  Transcript Sequence Number=SeqID_14721
  Subcellular localization annotation: CTP_CleavageSite=37; ConfidenceScore=5.11e-01
IRISSSSCDHAPLLLNETVPSGSSSSKYSEACRGSSCSSAIQSISREQLVGLVDVPRLWTPPALLTMAASRGDQFQLGLSSDRSNETQLPRRSYAHLSASRNRRCPRGRYQAVPKEQACSSFLAWLLEGRREECHGWGAVAAFGGCS

SEQ ID NO: 80696 - protein, 115 aa, Setaria italica
  Transcript Sequence Number=SeqID_14722
  Gene Ontology: Mol. function=hydrolase activity
  Homolog annotation: Hit_ID=B6TUZ9; Match level="QueryCoverage=69%, HitCoverage=29%, E-value=1e-35, Identity=91%"; Hit description =Receptor protein kinase-like protein
  Subcellular localization annotation: CTP_CleavageSite=67; ConfidenceScore=5.18e-01
MATATLLLLLVCFLAASFLAAGGGRRTVVFLLAGQSNMGGRGGATNGTWDRVVPPECAPSPRILRLSPDLRWEEAREPLHQGIDLHNVLGVGPGMPFAHAVLRSRRLPPHAAVGL

SEQ ID NO: 80697 - protein, 424 aa, Setaria italica
  misc_feature (220)..(220): Xaa can be any naturally occurring amino acid
  Transcript Sequence Number=SeqID_14723
  Gene Ontology: Mol. function=peptidyl-prolyl cis-trans isomerase activity; Cellular component=spliceosome; Biological process=protein folding
  Homolog annotation: Hit_ID=Q6ZJ09; Match level="QueryCoverage=100%, HitCoverage=100%, E-value=0.0, Identity=95%"; Hit description =Putative cyclophilin (70.8 kD) (Cyp-15)
  Pfam annotation: Domain name=Pro_isomerase; Domain location=270-422; Score=270.6; E_value=3.6e-78; Accession=PF00160.13; Description =Cyclophilin type peptidyl-prolyl cis-tr
MKYNHVHNVVISADAKGLLDYWSPSTLEFPEQEVRFRVKSDTNLFEIAKCKTSVSAIEVSNDGSQFAVTSPDRRIRVFWFKTGKLRRVYDESLEVAQDLQRSDVPLYHLDAIDFGRRMAVEKEIEKTENVPQPNAVFDESSNFLIYATLLGIKIVNLHTNKVSRILGKVENNERFLKIALYQGDKGNKKVRKIPSVAANVNDTKEPLSDPTLLCCAFKKXHRIYLFSRREPEEPEDATKGRDVFNEKPPPEELLAVSDLGKTATTSLPDNLVMHTSMGDIHLRLYPEECPKTVENFTTHCRNGYYDNLIFHRVIKGFMIQTGDPLGDGTGGQSIWGSEFEDEFHKSLRHDRPFTLSMANAGPNTNGSQFFITTVATPWLDNKHTVFGRVVKGMDVVQQIEKVKTDKNDKPYQDVKILNVTVPKT

SEQ ID NO: 80698 - protein, 36 aa, Setaria italica
  Transcript Sequence Number=SeqID_14724
MGSLDSNPATFDAFAAEADGFQPLNADDVRSYLHKS

SEQ ID NO: 80699 - protein, 107 aa, Setaria italica
  Transcript Sequence Number=SeqID_14725
  Gene Ontology: Mol. function=pyridoxal phosphate binding; Biological process=cellular amino acid and derivative metabolic process
  Homolog annotation: Hit_ID=Q75PZ8; Match level="QueryCoverage=98%, HitCoverage=20%, E-value=1e-41, Identity=76%"; Hit description =Tryptophan decarboxylase
RSDVAMAKLFEEWVRADDRFEVVVPRNFALVCFRVKPHAGMTEEETEAANRELMERLNRTGKAYLAHTVIGGKFVLRFAVGSSLQEERHVRSAWELIRKKTTEIMSG

SEQ ID NO: 80700 - protein, 79 aa, Setaria italica
  Transcript Sequence Number=SeqID_14726
MQKRALVVCAAAAVLGLAAAVLGFAAERFKNKAFVRSDVFRCEYRRTPALGCGVLAALLSLAAVALVTAASGCFGRFGA

SEQ ID NO: 80701 - protein, 527 aa, Setaria italica
  Transcript Sequence Number=SeqID_14727
  Gene Ontology: Mol. function=pyridoxal phosphate binding; Biological process=cellular amino acid and derivative metabolic process
  Homolog annotation: Hit_ID=Q75PZ8; Match level="QueryCoverage=97%, HitCoverage=99%, E-value=0.0, Identity=74%"; Hit description =Tryptophan decarboxylase
  Pfam annotation: Domain name=Pyridoxal_deC; Domain location=58-443; Score=589.5; E_value=3.5e-174; Accession=PF00282.11; Description =Pyridoxal-dependent decarboxylase con
MGSLDSNPASFDAFAAEADGFQPLNAEDVRSYLHKSVDFIYDYYKSVESLPVLPDVEPGYLSRLLQCAPPSAAAPFDIAMKEVREAVVPGMTHWASPNFFAFFPATNSAAAIAGELIASAMNTVGFTWQANPAATEMEVLALDWLAQLLRLPESFMMHRTDAGEGRGTGGGVILGTTSEAMLVTLVAARDAALRRMGSSGVAGITRLVVYAADQTHSTFFKACRLTGFDPANIRSIPTGADTDYGLDPSKLLEAMQADVDTGLVPTYVCATVGTTSTNAVDPVGAIADVAARFNAWVHVDAAYAGSACICPEFRHHLDGVERVDSISMSPHKWLMTCLDCTCLWVRDAHRLTDSLETNPEYLKNDASDSGTVTDLKDMQVGVGRRFRGLKLWMVMRTYGSTRLQEHIRSDVAMAKMFEESVRSDDRFEVVVPRNFALVCFRIKPHGGGMTTEEDADGANHELMERLNRTGKAYLAHTVVGGKFVLRFAVGSSLQEERHVRSAWELIRKTTDEIMKEGEKKCVHEDGC

SEQ ID NO: 80702 - protein, 79 aa, Setaria italica
  Transcript Sequence Number=SeqID_14728
  Subcellular localization annotation: CTP_CleavageSite=57; ConfidenceScore=5.84e-01
TAGSSPKTNLHRPASLHSADFTLLPPCLRPSFFFVSVSRDARGGAGARRRGGLPVARLAQRRQAARDRGRRRRAGPARR

SEQ ID NO: 80703 - protein, 207 aa, Setaria italica
  Transcript Sequence Number=SeqID_14729
  Gene Ontology: Mol. function=glutathione peroxidase activity; Cellular component=cytoplasm; Biological process=response to oxidative stress
  Homolog annotation: Hit_ID=Q53MS9; Match level="QueryCoverage=80%, HitCoverage=78%, E-value=6e-81, Identity=84%"; Hit description =Glutathione peroxidase
  Pfam annotation: Domain name=AhpC-TSA; Domain location=40-185; Score=- 13.2; E_value=0.01; Accession=PF00578.13; Description=AhpCTSA family
  Pfam annotation: Domain name=GSHPx; Domain location=48-156; Score =222.5; E_value=1.1e-63; Accession=PF00255.11; Description =Glutathione peroxidase
  Pfam annotation: Domain name=Redoxin; Domain location=39-203; Score= -10.2; E_value=0.027; Accession=PF08534.2; Description=Redoxin
  Pfam module annotation: Pfam domain module=AhpC-TSA::GSHPx::Redoxin; Domain location=40-185::48-156::39-203
MIAAATRGGLSGPRILLSLAVLALAIALVSRSLAPTVPDMADDLPASIYDIAVKDIRGNDIKLSDYAGKVLLIVNVASQCGLTNSNYKELNVLYDKYRQKGLEILAFPCNQFAGQEPGSNEDIQETVCTRFKAEFPIFEKINVNGKDAAPLFKYLKSQKGGFLGDGIKWNFTKFLVDKDGKVAGRYAPTSSPLKIENDIQKLLDTTP

SEQ ID NO: 80704 - protein, 61 aa, Setaria italica
  Transcript Sequence Number=SeqID_14730
KIKQVYLAKMAQAKEISETSRANRVIRRDINETLYGLSPIVMFKYMKDAPYQCTESKIGAV

SEQ ID NO: 80705 - protein, 159 aa, Setaria italica
  Transcript Sequence Number=SeqID_14731
DLPHSLLWCKELLLPALYLVLTAIDWSRPELFRCYQEQMKMMIGPLSGWYGGAHGKQQSTNWPHGHGRCLRIFMPSSFLLDLSRPFGIKKGVSIGLKWMGKAGSSGSEKDTLLELSRGKNQAQDDRTEQESKFLISNGRDKESRGIGREPREGRKERVV

SEQ ID NO: 80706 - protein, 116 aa, Setaria italica
  Transcript Sequence Number=SeqID_14732
  Homolog annotation: Hit_ID=B4FXN3; Match level="QueryCoverage=99%, HitCoverage=26%, E-value=7e-61, Identity=97%"; Hit description =Carboxyl-terminal proteinase
  Pfam annotation: Domain name=DUF239; Domain location=5-116; Score =123.9; E_value=5.2e-34; Accession=PF03080.7; Description=Arabidopsis proteins of unknown function
PGDEYYGAKASINVWAPKVSTASEFSLSQIWVIAGSFGNDLNTIEAGWQVSPQLYGDNSPRFFTYWTTDAYQTTGCYNLLCSGFIQTNSRIAMGAAISPTSAYNAGQFDISLLVWK

SEQ ID NO: 80707 - protein, 88 aa, Setaria italica
  misc_feature (8)..(8): Xaa can be any naturally occurring amino acid
  Transcript Sequence Number=SeqID_14733
  Homolog annotation: Hit_ID=B6SXW9; Match level="QueryCoverage=100%, HitCoverage=19%, E-value=2e-42, Identity=93%"; Hit description =Carboxyl-terminal proteinase
  Subcellular localization annotation: CTP_CleavageSite=30; ConfidenceScore=5.02e-01
GGEVVNSXPSGSHTPTQMGSGHFPREGFNRAAYFRNVQVVDGDNSLVPAATLRLVADHPGCYDSRGGYNRAWGNYFYYGGPGRNVHCP

SEQ ID NO: 80708 - protein, 235 aa, Setaria italica
  Transcript Sequence Number=SeqID_14734
  Homolog annotation: Hit_ID=B4FXN3; Match level="QueryCoverage=100%, HitCoverage=54%, E-value=1e-118, Identity=85%"; Hit description =Carboxyl-terminal proteinase
  Pfam annotation: Domain name=DUF239; Domain location=1-187; Score =376.8; E_value=3.8e-110; Accession=PF03080.7; Description =Arabidopsis proteins of unknown function
AKASLNVWSAKVASAAEFSLSQIWVISGSFGNDLNTIEAGWQVSPELYGDRLASFFTYWTTDAYQATGCYNLHCSGFVQTNSRIAIGAAISPTSVYNGRQFDISLLIWKDPNHGNWWLEFGSGELVGYWPSLLFSHLASHASMVQFGGEVVNTRASGSHTATQMGSGHFAGEGFGRASYFRNLEVVDWDNSLVPLAAGFHVTADHPNCYDIQGGVNAVWGNYFYYGGPGRNVKCT

SEQ ID NO: 80709 - protein, 126 aa, Setaria italica
  Transcript Sequence Number=SeqID_14735
  Gene Ontology: Mol. function=receptor activity; Cellular component =spliceosome; Biological process=imaginal disc-derived wing morphogenesis
  Homolog annotation: Hit_ID=B9STP9; Match level="QueryCoverage=66%, HitCoverage=24%, E-value=2e-39, Identity=88%"; Hit description =Serine-threonine kinase receptor-associated protein, putative
  Pfam annotation: Domain name=WD40; Domain location=52-88; Score=11.1; E_value=1.9; Accession=PF00400.24; Description=WD domain, G-beta repeat
  Pfam annotation: Domain name=WD40; Domain location=7-48; Score=9.6; E_ value=2.9; Accession=PF00400.24; Description=WD domain, G-beta repeat
  Pfam module annotation: Pfam domain module=WD40::WD40; Domain location=52-88::7-48
MEQKKKVTIPLVCHGHSRPVVDLFYSPVTPDGYFLISASKDTNPMLRNGETGDWIGTFQGHKGAVWSACLDTNALRAASGSADFSAYDSHSAKSPWCYLDYNPSAGVPFHLTSAHQSLAEKIVCYL

SEQ ID NO: 80710 - protein, 150 aa, Setaria italica
  Transcript Sequence Number=SeqID_14736
  Gene Ontology: Mol. function=receptor activity; Cellular component =spliceosome; Biological process=imaginal disc-derived wing morphogenesis
  Homolog annotation: Hit_ID=B6T3R6; Match level="QueryCoverage=98%, HitCoverage=43%, E-value=1e-70, Identity=84%"; Hit description =Serine-threonine kinase receptor-associated protein
  Pfam annotation: Domain name=WD40; Domain location=27-65; Score=12.2; E_value=1.4; Accession=PF00400.24; Description=WD domain, G-beta repeat
  Pfam annotation: Domain name=WD40; Domain location=69-107; Score =43.3; E_value=9.6e-10; Accession=PF00400.24; Description=WD domain, G-beta repeat
  Pfam module annotation: Pfam domain module=WD40::WD40; Domain location=27-65::69-107
YVEVSQDGRFITTTDGSSVKFWDANHYGLVKSYNMPCAVESASLEPKYGNKFVTGGEDMWVRVFDFFTGEELACNKGHHGPVHCVRFSPVGESYASGSEDGTIRIWQLGPANSEDQEVANANGKTKVGVNDVARKIEGFHIPKDGQAEGS

SEQ ID NO: 80711 - protein, 338 aa, Setaria italica
  Transcript Sequence Number=SeqID_14737
  Gene Ontology: Mol. function=receptor activity; Cellular component =spliceosome; Biological process=imaginal disc-derived wing morphogenesis
  Homolog annotation: Hit_ID=B6T3R6; Match level="QueryCoverage=100%, HitCoverage=100%, E-value=0.0, Identity=95%"; Hit description=Serine- threonine kinase receptor-associated protein
  Pfam annotation: Domain name=WD40; Domain location=135-174; Score =5.6; E_value=8.7; Accession=PF00400.24; Description=WD domain, G -beta repeat
  Pfam annotation: Domain name=WD40; Domain location=178-214; Score =16.3; E_value=0.12; Accession=PF00400.24; Description=WD domain, G -beta repeat
  Pfam annotation: Domain name=WD40; Domain location=218-256; Score =2.9; E_value=18; Accession=PF00400.24; Description=WD domain, G-beta repeat
  Pfam annotation: Domain name=WD40; Domain location=260-298; Score =44.1; E_value=5.4e-10; Accession=PF00400.24; Description=WD domain, G-beta repeat
  Pfam annotation: Domain name=WD40; Domain location=51-89; Score=35.2; E_value=2.6e-07; Accession=PF00400.24; Description=WD domain, G-beta repeat
  Pfam annotation: Domain name=WD40; Domain location=6-47; Score=9.1; E_ value=3.3; Accession=PF00400.24; Description=WD domain, G-beta repeat
  Pfam annotation: Domain name=WD40; Domain location=93-130; Score =26.6; E_value=0.0001; Accession=PF00400.24; Description=WD domain, G- beta repeat
  Pfam module annotation: Pfam domain module=WD40::WD40::WD40::WD40::WD4 0::WD40::WD40; Domain location=135-174::178-214::218-256::260-298::51- 89::6-47::93-130
MDKKKVAVPLVCHGHSRPVVDLFYSPVTPDGYFLISASKDSNPMLRNGETGDWIGTFQGHKGAVWCCCLDKNALRAASASADFSAKVWDALTGDELHSFEHKHIVRACAFSEDTHLLLTGGMEKTLRVYDMNRPDAAPRELDKSPGSVRTAAWLHSDQTILSSCTDMGGVRLWDVRTGKIVQTLETKASVTSAEVSQDGRFITTADGSSVKFWDANHFGLVKSYDMPCNVESASLEPKSGSKFVAGGEDLWVHLFDFFTGEEITCNKGHHGPVHCVRFAPGGESYASGSEDGTIRIWQLSPPNADDNEAANGKPADGVNEVTTKIEGFHIPKEGQTEG

SEQ ID NO: 80712 - protein, 67 aa, Setaria italica
  Transcript Sequence Number=SeqID_14738
HNQVFMLTAKSDGTVRSYELIQQHGTEKKGVHRELMTSYITTERKVYTLFMKHCHKHIKYRNPYFPL

SEQ ID NO: 80713 - protein, 177 aa, Setaria italica
  Transcript Sequence Number=SeqID_14739
  Gene Ontology: Cellular component=intracellular; Biological process =intracellular protein transport
  Homolog annotation: Hit_ID=B6SSW4; Match level="QueryCoverage=93%, HitCoverage=24%, E-value=1e-47, Identity=63%"; Hit description=VHS and GAT domain protein
  Subcellular localization annotation: CTP_CleavageSite=55; ConfidenceScore=5.68e-01
TTRTISKHPSPTHVHVSQQGNGFMPVQPMSRGQPGGMQLQPVTGTQLVPPQPQPMQMNMQYGVMYPLMQMNQRMGMYSQPAFGGGFYGMNQAQLYGVQMSGYGYGQPSGGYYIPNAAYAYASANEHSQRMNGLSVQNGGPNGTTTNKQSRPEDSLFGDLLSIAKMKQSKPAAGKVGS

SEQ ID NO: 80714 - protein, 58 aa, Setaria italica
  Transcript Sequence Number=SeqID_14740
  Subcellular localization annotation: CTP_CleavageSite=23; ConfidenceScore=5.31e-01
LNPCALVPVSSSSGKTQNSNSIFCVKNSPFFWIKALPFGLVLETSYFVLYEALLLQAR

SEQ ID NO: 80715 - protein, 62 aa, Setaria italica
  Transcript Sequence Number=SeqID_14741
YLQKFTSTTYAEATQIQNSENLTTYVTRFQLVQQVQCPSITPANSKCVYCRETFLLRQGLYC

SEQ ID NO: 80716 - protein, 64 aa, Setaria italica
  Transcript Sequence Number=SeqID_14742
  Gene Ontology: Mol. function=hydrolase activity
  Homolog annotation: Hit_ID=B6THD4; Match level="QueryCoverage=90%, HitCoverage=17%, E-value=7e-23, Identity=91%"; Hit description =Pyrimidine-specific ribonucleoside hydrolase rihA
YVQYDSMTILMAFRTPSVEIIGLTTIFGNVSTEGATRNALLLCERAGHPEVPVAEGSPEPLKVC

SEQ ID NO: 80717 - protein, 169 aa, Setaria italica
  misc_feature (149)..(149): Xaa can be any naturally occurring amino acid
  Transcript Sequence Number=SeqID_14743
  Gene Ontology: Mol. function=hydrolase activity; Biological process =metabolic process
  Homolog annotation: Hit_ID=B6THD4; Match level="QueryCoverage=99%, HitCoverage=51%, E-value=2e-86, Identity=92%"; Hit description =Pyrimidine-specific ribonucleoside hydrolase rihA
  Pfam annotation: Domain name=IU_nuc_hydro; Domain location=1-169; Score=-71.2; E_value=1.8e-05; Accession=PF01156.11; Description =Inosine-uridine preferring nucleoside hydrolase
KREGKPRIADFVHGSDGIGNMFLPEPTSKKVEESAAEFLVNKVSEFPGEVSVLALGPLTNVALAIKRDPSFASKVKKIVVLGGAFFAAGNVNPAAEANIHGDPEAADIVFTSGADIVVVGINITTQVCLKDEDLLELRNSKGKHAQFYXEMCKFYRDWHAKSDGFHGIF

SEQ ID NO: 80718 - protein, 78 aa, Setaria italica
  Transcript Sequence Number=SeqID_14744
  Gene Ontology: Mol. function=hydrolase activity; Biological process =metabolic process
  Homolog annotation: Hit_ID=B6THD4; Match level="QueryCoverage=76%, HitCoverage=18%, E-value=1e-23, Identity=90%"; Hit description =Pyrimidine-specific ribonucleoside hydrolase rihA
GINLHISLSVLFTFLFLDDSMTILMAFRTPSVEIIGLTTIFGNVSTEGATRNALLLCERAGHPEVPVAEGSPEPLKVC

SEQ ID NO: 80719 - protein, 331 aa, Setaria italica
  misc_feature (147)..(147): Xaa can be any naturally occurring amino acid
  Transcript Sequence Number=SeqID_14745
  Gene Ontology: Mol. function=hydrolase activity; Cellular component =integral to membrane; Biological process=metabolic process
  Homolog annotation: Hit_ID=B6THD4; Match level="QueryCoverage=100%, HitCoverage=100%, E-value=1e-176, Identity=91%"; Hit description =Pyrimidine-specific ribonucleoside hydrolase rihA
  Pfam annotation: Domain name=IU_nuc_hydro; Domain location=10-325; Score=206.5; E_value=7.1e-59; Accession=PF01156.11; Description =Inosine-uridine preferring nucleoside hydrolase
MGQDGHQIRGNKLIIDTDPGIDDSMTILMAFRTPSVEIIGLTTIFGNVSTEGATRNALLLCERAGHPEVPVAEGSPEPLKGGKPRIADFVHGSDGIGNMFLPEPTSKKVEESAAEFLVNKVSEFPGEVSVLALGPLTNVALCLFLLXAIKRDPSFASKVKKIVVLGGAFFAAGNVNPAAEANIHGDPEAADIVFTSGADIVVVGINITTQVCLKDEDLLELRNSKGKHAQFLSEMCKFYRDWHAKSDGFHGIFLHDPVSFTALVHPEYFTFKKGVVRVETQGICTGHTLMDQGLKKWNSENPWSGYKPISVAWMVDVPKVISFIKKLLMAP

SEQ ID NO: 80720 - protein, 71 aa, Setaria italica
  Transcript Sequence Number=SeqID_14746
  Gene Ontology: Mol. function=prephenate dehydratase activity; Biological process=L-phenylalanine biosynthetic process
  Homolog annotation: Hit_ID=B6UA96; Match level="QueryCoverage=94%, HitCoverage=17%, E-value=1e-30, Identity=94%"; Hit description=P -protein
GAGARPPVMILDTSARGAPTLRAFPHVLYVDCAGAAHDPRVREAIQEIEKFAVFVRVLGCYAADSTVYDLQ

SEQ ID NO: 80721 - protein, 73 aa, Setaria italica
  misc_feature (16)..(16): Xaa can be any naturally occurring amino acid
  Transcript Sequence Number=SeqID_14747
  Subcellular localization annotation: CTP_CleavageSite=36; ConfidenceScore=5.37e-01
STCCKPNCGSCCKPKXCSCFGLPSCCKFQCSPNCCTCTMPSCSGCNPCGSCKGCCSCPSDCCNRKPNCSCFSA

SEQ ID NO: 80722 - protein, 156 aa, Setaria italica
  misc_feature (13)..(13): Xaa can be any naturally occurring amino acid
  misc_feature (74)..(74): Xaa can be any naturally occurring amino acid
  misc_feature (139)..(140): Xaa can be any naturally occurring amino acid
  misc_feature (143)..(143): Xaa can be any naturally occurring amino acid
  Transcript Sequence Number=SeqID_14748
  Subcellular localization annotation: CTP_CleavageSite=34; ConfidenceScore=5.46e-01
AAALPSCCKFQCXPNCCTCTMPSCSGCNRKPNCSCFSAQCCSCAECYSCTCPSCSSCFSCFGCFKSWKCSNLFXGCCSCKQCFKCQSSCCKGAPSCCKCQSSCCEGEDGSSCCWRSCCSVPKPSCPGCSCGCVWSCKKXXEGXRCSGCRNPCCATG

SEQ ID NO: 80723 - protein, 526 aa, Setaria italica
  Transcript Sequence Number=SeqID_14749
  Gene Ontology: Mol. function=ubiquitin-protein ligase activity; Cellular component=ubiquitin ligase complex; Biological process =protein ubiquitination
  Homolog annotation: Hit_ID=B6TRQ7; Match level="QueryCoverage=100%, HitCoverage=100%, E-value=0.0, Identity=93%"; Hit description=Pre -mRNA-splicing factor 19
  Pfam annotation: Domain name=Prp19; Domain location=64-133; Score =162.5; E_value=1.3e-45; Accession=PF08606.3; Description=Prp19Pso4 -like
  Pfam annotation: Domain name=U-box; Domain location=8-70; Score=-6.6; E_value=0.003; Accession=PF04564.7; Description=U-box domain
  Pfam annotation: Domain name=WD40; Domain location=211-249; Score =11.9; E_value=1.5; Accession=PF00400.24; Description=WD domain, G -beta repeat
  Pfam annotation: Domain name=WD40; Domain location=253-291; Score =45.8; E_value=1.7e-10; Accession=PF00400.24; Description=WD domain, G-beta repeat
  Pfam annotation: Domain name=WD40; Domain location=298-336; Score =32.7; E_value=1.4e-06; Accession=PF00400.24; Description=WD domain, G-beta repeat
  Pfam annotation: Domain name=WD40; Domain location=343-380; Score =18.1; E_value=0.038; Accession=PF00400.24; Description=WD domain, G -beta repeat
  Pfam annotation: Domain name=WD40; Domain location=384-421; Score =32.3; E_value=1.9e-06; Accession=PF00400.24; Description=WD domain, G-beta repeat
  Pfam annotation: Domain name=WD40; Domain location=474-511; Score =20.2; E_value=0.0083; Accession=PF00400.24; Description=WD domain, G- beta repeat
  Pfam module annotation: Pfam domain module=Prp19::U-box::WD40::WD40::W D40::WD40::WD40::WD40; Domain location=64-133::8-70::211-249::253 -291::298-336::343-380::384-421::474-511
MICAISGEVPDEPVVSKKSGLLFERRLIERYVEDHGKCPVTKEELTMDDIVPVKTNKVVKPRPLQAASIPGLLGIFQNEWDALMLSNYSLEQQLHTARQELSHALYQHDAACRVIARLKKERDEARTLLAQAERQIPASVAAAAPAAVVSNGKRATEDEIGPDGKKIRPGINPVMIDELTECNTMLSAQRKKRQVPPTLAPIDALERYTQISSHPLHKTNKPGILSMDIHPSKDIVATGGIDTNAVLFDRPSGQILCTLTGHSKKITTLKFVPRDGLFVTGSADKTVRIWQESENGNYNCIHTLKDHTAEVEAVTVHATQKYFVTASKDNSWCFYDISTGSCLTQVGEASGQEGYTSASFHPDGLILGTGTTDAVVKIWDVKTQSNVAKFEGHVGPVTAMSFSENGYFLATAAHDGVKLWDLRKLRNFRTFSPYDSDTPTNAVEFDFSGNYLAIGGSDIRVHQVANVKVEWNLIKTLPDLSGTGKVTSVKFGADAKYIAVGSMDRNLRIFGLPGDDQMEESNTAAE

SEQ ID NO: 80724 - protein, 326 aa, Setaria italica
  Transcript Sequence Number=SeqID_14750
  Gene Ontology: Mol. function=hydrolase activity, hydrolyzing O -glycosyl compounds; Cellular component=anchored to membrane; Biological process=carbohydrate metabolic process
  Homolog annotation: Hit_ID=Q84L67; Match level="QueryCoverage=72%, HitCoverage=100%, E-value=1e-126, Identity=92%"; Hit description =Putative beta 1-3-glucanase (Fragment)
  Pfam annotation: Domain name=Glyco_hydro_17; Domain location=1-174; Score=-18.4; E_value=7.5e-10; Accession=PF00332.10; Description =Glycosyl hydrolases family 17
  Pfam annotation: Domain name=X8; Domain location=189-274; Score =175.9; E_value=1.1e-49; Accession=PF07983.5; Description=X8 domain
  Pfam module annotation: Pfam domain module=Glyco_hydro_17::X8; Domain location=1-174::189-274
RSLDNVLVPMLKFLQSTGSPLMLNVYPYYDYMRSNGVIPLDYALFRPLPPNKEAVDANTLLHYTNVFDAVVDAAYFAMAYLNVTNVPVMVTETGWPHKGDPSSEPDATSDNADTYNSNLIRHVMNSTGTPKHPGVAVPTYIYELYDEDTRPGSTSEKYWGLFDMNGVPAYTLHLTGSGVLLANDTTNQTYCVAREGADPKMLQAALDWACGPGKVDCSALMQGQPCYDPDNVEAHATYAFNAYYHGMGMGSGTCYFSGVAVITTTDPSHGSCVYSGKNGSALLNGTSLAPSSNSTDGSSGVHRGIGDVSSVARVVSTALLLSLLLL

SEQ ID NO: 80725 - protein, 101 aa, Setaria italica
  Transcript Sequence Number=SeqID_14751
  Gene Ontology: Mol. function=metal ion binding; Biological process =metal ion transport
  Homolog annotation: Hit_ID=B9S5N9; Match level="QueryCoverage=99%, HitCoverage=29%, E-value=3e-15, Identity=47%"; Hit description =Copper ion binding protein, putative
CHKIKRCLLRCKGVERVEVNMAQNQVMVKGIVDLQGICERLRKRTMRNATVISPPPPPPAEADAAAALKEEPVVVHSQVSEVTTVELFVNMHCEACAQQLT

SEQ ID NO: 80726 - protein, 399 aa, Setaria italica
  misc_feature (200)..(200): Xaa can be any naturally occurring amino acid
  misc_feature (359)..(359): Xaa can be any naturally occurring amino acid
  misc_feature (388)..(388): Xaa can be any naturally occurring amino acid
  Transcript Sequence Number=SeqID_14752
  Gene Ontology: Mol. function=acid phosphatase activity; Cellular component=chloroplast
  Homolog annotation: Hit_ID=B6UE38; Match level="QueryCoverage=100%, HitCoverage=62%, E-value=1e-168, Identity=69%"; Hit description =Hydrolase/ protein serine/threonine phosphatase
  Pfam annotation: Domain name=Metallophos; Domain location=9-242; Score=43.3; E_value=9.5e-10; Accession=PF00149.20; Description =Calcineurin-like phosphoesterase
SRDTEADETVAFLFGDLGTYVPYNTYFQTPLESLSTVKWILRDLEALGDKPAIISHIGDISYAKGYAWLWDHFFEQIEPIAANTPYHVCIGNHEYDWPSQPWKPSWAANIYNGKDSGGECGIPYSIKFRMPGNSSFPTGTGAPETRNLYYSFDAGVVHFVYMSTETDFTQGSDQYNFIKADLEHVNQSRTPYIVFQGHRXPMYTSSNETKDTAHREQMIQHLEPLFVKHNVTLALWGHIHRYERFCPMENYQCLNTSSRFVYPGAPAHVVIGMAGQDHQPSWEPRPDHPNVPIFPQPQRSMYRGGEFGYTKLVATREKLILTYTGNHDGQVHDKVEIFSLQMDNDTTPDKLVSGLPKNXTYVEIAGCALLALLLGFVAGFGVRKKKEXARWTPVQNEES

SEQ ID NO: 80727 - protein, 143 aa, Setaria italica
  Transcript Sequence Number=SeqID_14753
  Gene Ontology: Mol. function=transferase activity, transferring glycosyl groups; Biological process=metabolic process
  Homolog annotation: Hit_ID=B6EWX9; Match level="QueryCoverage=84%, HitCoverage=24%, E-value=6e-39, Identity=57%"; Hit description =Glycosyltransferase
VFLYLDVARQHERHKYSDGGGREAHVVCMPFPAQGHVTPMMKLAKILHGRGFHVTYVNSAYNHRRFVRSRGAGAVAGLPGFSFATIPDGLPPCDADATQDTVALCYSTMTTCLPHFKALLADLNRRAAAGDAPPVTCVVADGC

SEQ ID NO: 80728 - protein, 115 aa, Setaria italica
  Transcript Sequence Number=SeqID_14754
MDFDEYEYLEKTVEASGVPSNGAAAPGSGEKEKDKERSSRRRSSGGDEERDDVERRSKRSRSEEGRDRDKERHRDRDRDRDRHRSSRERRDRDRDDKEKERERDKDRRSRDRDRR

SEQ ID NO: 80729 - protein, 82 aa, Setaria italica
  Transcript Sequence Number=SeqID_14755
VQEEKQNMNIPVFFVVIHCHFVRQKSAQFKAASFVVNSDHVTTSVDFYKPCDTLLSYNHPIIWSGYWTWNGSIPVNTDHGTT

SEQ ID NO: 80730 - protein, 149 aa, Setaria italica
  misc_feature (97)..(97): Xaa can be any naturally occurring amino acid
  Transcript Sequence Number=SeqID_14756
MAGAAAQDDAEQLLHLKLAFLAGEPPACILALARKAGGGSITPHVQKFLLENCTDTNVYGRQNSTYTTTIFKRIISEVELSSDIVIDALYEEFAQQXSLLNKTNHIYKEISFLSSTHDNVSSSLISVVARLSCSSNMLEGDTGCSLWPF

SEQ ID NO: 80731 - protein, 255 aa, Setaria italica
  Transcript Sequence Number=SeqID_14757
  Gene Ontology: Mol. function=methyltransferase activity
  Homolog annotation: Hit_ID=Q5XJN3; Match level="QueryCoverage=96%, HitCoverage=69%, E-value=3e-18, Identity=30%"; Hit description =Family with sequence similarity 86, member A
  Pfam annotation: Domain name=Methyltransf_16; Domain location=21-204; Score=29.4; E_value=1.7e-10; Accession=PF10294.1; Description =Putative methyltransferase
  Subcellular localization annotation: CTP_CleavageSite=30; ConfidenceScore=5.08e-01
HIYKEISFLSSTHDNVSSSLISVVARLSCSSNMLEGDTGCSLWPSSLFLSEFILSYPEIFSTKCCFELGSGVGLVGICLNYVGASKVILTDGDTSTLTNMKENMELNNVCIKLEDFEELKESKNKVECKYLSWEEASESDLRGYQPDIVLGADIVYDPVCVPHLVRVLSMLLRRDSKQGEVNRKSGDELEMDGPVAYIATVVRNAETFNCFAKAAADAKLSAINIGSSTAPSNFLPYMLSYDRSSVQLLKITLSS

SEQ ID NO: 80732 - protein, 46 aa, Setaria italica
  Transcript Sequence Number=SeqID_14758
MAQCTRKSRRQIQSCTNAVAVFVFQTCWWKSVLHKDEDSLLGTELD

SEQ ID NO: 80733 - protein, 74 aa, Setaria italica
  Transcript Sequence Number=SeqID_14759
VMLAGLFFPLITDGSWCHRSIIGLPQDINATVLFCGHLCARSIKLPQLHHDLWCHWKSFDTGNSLTTLLINKLV

SEQ ID NO: 80734 - protein, 38 aa, Setaria italica
  Transcript Sequence Number=SeqID_14760
  Homolog annotation: Hit_ID=Q6Z1D5; Match level="QueryCoverage=86%, HitCoverage=27%, E-value=4e-09, Identity=90%"; Hit description =Autophagy-related protein 8C
  Pfam annotation: Domain name=MAP1_LC3; Domain location=7-38; Score= -43.6; E_value=0.045; Accession=PF02991.8; Description=Microtubule associated protein 1A1B, light chain 3
MPCVTEKRQSEADRIREKYPDRIPVIVEKAERSDIPDI

SEQ ID NO: 80735 - protein, 76 aa, Setaria italica
  Transcript Sequence Number=SeqID_14761
  Gene Ontology: Mol. function=protein binding; Cellular component =cytoplasmic vesicle; Biological process=ubiquitin-dependent protein catabolic process
  Homolog annotation: Hit_ID=Q6Z1D5; Match level="QueryCoverage=92%, HitCoverage=58%, E-value=2e-33, Identity=98%"; Hit description =Autophagy-related protein 8C
  Pfam annotation: Domain name=MAP1_LC3; Domain location=1-74; Score =138.0; E_value=2.9e-38; Accession=PF02991.8; Description=Microtubule associated protein 1A1B, light chain 3
CPSLCRYLVPADLTVGQFVYVVRKRIKLSAEKAIFIFVKNTLPPTAALMSAIYEENKDEDGFLYMTYSGENTFGLH

SEQ ID NO: 80736 - protein, 121 aa, Setaria italica
  Transcript Sequence Number=SeqID_14762
  Gene Ontology: Mol. function=protein binding; Cellular component =cytoplasmic vesicle; Biological process=ubiquitin-dependent protein catabolic process
  Homolog annotation: Hit_ID=Q6Z1D5; Match level="QueryCoverage=95%, HitCoverage=95%, E-value=1e-59, Identity=97%"; Hit description =Autophagy-related protein 8C
  Pfam annotation: Domain name=MAP1_LC3; Domain location=16-119; Score =282.9; E_value=6.9e-82; Accession=PF02991.8; Description=Microtubule associated protein 1A1B, light chain 3
MMAKTSSFKLEHPLEKRQSEADRIREKYPDRIPVIVEKAERSDIPDIDKKKYLVPADLTVGQFVYVVRKRIKLSAEKAIFIFVKNTLPPTAALMSAIYEENKDEDGFLYMTYSGENTFGLH

SEQ ID NO: 80737 - protein, 65 aa, Setaria italica
  Transcript Sequence Number=SeqID_14763
  Gene Ontology: Mol. function=protein binding
  Homolog annotation: Hit_ID=B9RYR3; Match level="QueryCoverage=86%, HitCoverage=12%, E-value=5e-18, Identity=75%"; Hit description =Protein binding protein, putative
ESAIVSMVLALPSDDQADILSEWMKKAEQFRYPDLTEAFEVWCYRSKTAKRRLVDNGASNPTVSL

SEQ ID NO: 80738 - protein, 205 aa, Setaria italica
  Transcript Sequence Number=SeqID_14764
  Gene Ontology: Mol. function=protein binding
  Homolog annotation: Hit_ID=B9RYR3; Match level="QueryCoverage=95%, HitCoverage=47%, E-value=7e-53, Identity=49%"; Hit description =Protein binding protein, putative
TTLRTGLDLLCTEFDQSPDQAEQRILCSLADIDWIANLLAKIEMMHDFVSGWSEISDHVLSVVQDKKYSSDLWAVKSKLIEVTGKALDAVGYGSVVLPSSFRVHFLKTWLPYIQMTKHLLDENSKDETSLQMDSDSCQNIESAIVSMVLALPSDDQADILSEWMKKAEQFRYPDLTEAFEVWCYRSKTAKRRLVDNGASNPTVSL

SEQ ID NO: 80739 - protein, 299 aa, Setaria italica
  Transcript Sequence Number=SeqID_14765
  Gene Ontology: Mol. function=protein binding
  Homolog annotation: Hit_ID=B9RYR3; Match level="QueryCoverage=100%, HitCoverage=68%, E-value=2e-59, Identity=41%"; Hit description =Protein binding protein, putative
  Pfam annotation: Domain name=BTB; Domain location=12-126; Score=4.0; E_value=0.0066; Accession=PF00651.23; Description=BTBPOZ domain
MEPVKLVEGYKFDDHTTSDVRVCFKLIDEQPEWFSCHSSVLSQNSKYFADWFGQNDIRSNNCIEIECPRVEYDHYVKMLKSMYLPRESVIDSFDSVKSAVGVLRASNSLGCELVAKSCIEYIEAASWDEKEEEEILEVARTLGSKAVSLLARLQAPSADAVKNVFISAIRFATCMETPFPPFLDDLKTSAQEQIDFMIHEDDDTALVTMDEDVKSVVQEGLRKLLSTLRTGLDLLCTEFDQSPDQAEQRILCSLADIDWIANLLAKIEMMHDFVSGWSEISDHVLSVVQDKKYSSDLWA

SEQ ID NO: 80740 - protein, 101 aa, Setaria italica
  Transcript Sequence Number=SeqID_14766
LTGREGDGALAGPWARVLRANGAPAAQASHQDRRIWPEAKDAGPPGAGRAQRGLGDRAPPRPLIIYLYIYRREFAGSKERSPFYKWRAAMIIHGCLSGALR

SEQ ID NO: 80741 - protein, 129 aa, Setaria italica
  Transcript Sequence Number=SeqID_14767
  Gene Ontology: Cellular component=vacuole
  Homolog annotation: Hit_ID=B6TJ89; Match level="QueryCoverage=100%, HitCoverage=75%, E-value=5e-66, Identity=95%"; Hit description=Cp protein
  Pfam annotation: Domain name=DUF538; Domain location=12-120; Score =173.4; E_value=6.7e-49; Accession=PF04398.4; Description=Protein of unknown function, DUF538
LVNKLKGKMQKPLSDLLKEHGLPVGLFPREATNYEFEPETRRLTVHIPSPCEVGYRDGSELRFDATVTGTLGDGRLTEVEGIKTKVLVWARVTAVKADAAKVHFTAGIKRSRSRDAYEVVRGGITVDEF

SEQ ID NO: 80742 - protein, 237 aa, Setaria italica
  Transcript Sequence Number=SeqID_14768
  Gene Ontology: Mol. function=catalytic activity; Cellular component =ribonucleoprotein complex; Biological process=metabolic process
  Homolog annotation: Hit_ID=B6U1W0; Match level="QueryCoverage=80%, HitCoverage=64%, E-value=6e-83, Identity=60%"; Hit description=CBS domain containing protein
  Pfam annotation: Domain name=CBS; Domain location=84-202; Score=92.2; E_value=1.9e-24; Accession=PF00571.20; Description=CBS domain
  Subcellular localization annotation: CTP_CleavageSite=59; ConfidenceScore=5.27e-01
RFNGVFKGLKFNFRFNGYGYVTGVRYRAGHGRRSVSSSSASRRRLPPAENGHGHDGAAAASRRSSASISRGNSTSLTGERTVKRLRLSKALTIPDHTTVHEACRRMASRRVDAVLLTDSNALLCGILTDKDITTRVIARELKMEETPVSKVMTRNPVFVLADTLAVEALQKMVQGKFRHLPVVENGEVIALLDIAKCLYDAIARMERAAEKGRAIAAAVEGVEKHWGTAASGPNNLL

SEQ ID NO: 80743 - protein, 144 aa, Setaria italica
  misc_feature (23)..(23): Xaa can be any naturally occurring amino acid
  Transcript Sequence Number=SeqID_14769
  Homolog annotation: Hit_ID=B6U1W0; Match level="QueryCoverage=87%, HitCoverage=22%, E-value=1e-56, Identity=84%"; Hit description=CBS domain containing protein
  Pfam annotation: Domain name=PB1; Domain location=45-130; Score=60.5; E_value=6.4e-15; Accession=PF00564.16; Description=PB1 domain
FQQLSIGPLDDDDDSRSEGSTKXVASEATDIARSAFYPASGLSNMFGFKIQDKQGRMHRFNCDTSSLTDLITSILQRLGDDIDRKNLPQILYEDEDHDKVILSSDSDLIAAVDHARQIGWKSLRLHLDYVGVGRRKRGRSVSLL

SEQ ID NO: 80744 - protein, 254 aa, Setaria italica
  Transcript Sequence Number=SeqID_14770
  Gene Ontology: Mol. function=ubiquitin-protein ligase activity; Cellular component=ubiquitin ligase complex; Biological process =ubiquitin-dependent protein catabolic process
  Homolog annotation: Hit_ID=Q84VE7; Match level="QueryCoverage=100%, HitCoverage=37%, E-value=9e-82, Identity=63%"; Hit description=Arm repeat protein
  Pfam annotation: Domain name=U-box; Domain location=146-218; Score =91.3; E_value=3.4e-24; Accession=PF04564.7; Description=U-box domain
HQELATLLDLLPVAELGLAEDVVDLLALASRQCRRFAPAAGAEQALKARVLSVIQEVEREIVPERERLEEILDEVGINDAATCSDEIESLEREIGDRASERWADAMIALVGLLRYAKCVLFSATPRPSDSKPDPEVDEEGEPPAPPPDFRCPITLDIMREPVVVASGQTYDRESIARWFDSGKSTCPKTGQVLTVLELVPNKALKNLIAKWCRENGVAMESSQASKSEPAQAVSANKAALEAARMTASFLVKKL

SEQ ID NO: 80745 - protein, 70 aa, Setaria italica
  misc_feature (1)..(14): Xaa can be any naturally occurring amino acid
  Transcript Sequence Number=SeqID_14771
XXXXXXXXXXXXXXQVAAASFRCSHLKVHETLHSLHVPIQIEPSTCYYHEPSDSNNKAILELRKVPLVTK

SEQ ID NO: 80746 - protein, 71 aa, Setaria italica
  Transcript Sequence Number=SeqID_14772
  Subcellular localization annotation: CTP_CleavageSite=59; ConfidenceScore=5.33e-01
MVFMAAVENDHHRGVKFAPPPSNSLAHAARPPPQPSSSRTRLHDFSFPTVSWGTHRLLRCSKNGPGSSPPP

SEQ ID NO: 80747 - protein, 203 aa, Setaria italica
  Transcript Sequence Number=SeqID_14773
SSSRPHGAGCGDDLTMATRRWWRRRDGGDDEAEDLVPMDTQEQEELVRLLEQKQAQQSRRWRRVFAGFVLAYAAFLVYSSFHHAWSPWELRYHAYFMEDLPAPMVIIADWISALACLFAVKGLLQNSGPSKKWMWYSCYIGILVAIFWTYYILRLPRIRWDVAWLPLGPLIAGALSLYVDHVLLESMQDISTLRSYMYNFKAL

SEQ ID NO: 80748 - protein, 149 aa, Setaria italica
  misc_feature (135)..(135): Xaa can be any naturally occurring amino acid
  misc_feature (145)..(145): Xaa can be any naturally occurring amino acid
  Transcript Sequence Number=SeqID_14774
  Gene Ontology: Mol. function=binding
  Homolog annotation: Hit_ID=UPI0001A7B028; Match level="QueryCoverage =96%, HitCoverage=8%, E-value=9e-57, Identity=70%"; Hit description =binding
REFLRKIAKIATAEIVSSKEFNVDWQRAAANLLVAIGSHDPDLMMEEIFLHFSGPTSALPAMLQILAHFASAEALQFTPRLKDVLLRVLPILGNVRDGQRPVFANAFKCWCQAAWQYLGDAPSERPFDTDVMSFXNSVFELLIKXWMGS

SEQ ID NO: 80749 - protein, 135 aa, Setaria italica
  Transcript Sequence Number=SeqID_14775
  Gene Ontology: Mol. function=zinc ion binding; Cellular component =nucleus
  Homolog annotation: Hit_ID=Q94IQ6; Match level="QueryCoverage=78%, HitCoverage=33%, E-value=9e-19, Identity=44%"; Hit description =Methyl-binding domain protein MBD111
  Pfam annotation: Domain name=zf-CW; Domain location=84-135; Score =51.0; E_value=4.7e-12; Accession=PF07496.7; Description=CW-type Zinc Finger
MESNLENSMIGSTVNSVSLPSGKRQKTLSDTDGDQYDGASQQVVIYGNDKSVMGQDEQSESHFALEPSKPSKTPKRASGKKIGAFAVQCAKCQKWRLVSTKEKYEEIRERIREDPFVCEKAHEWKPDVTCNDPSD

SEQ ID NO: 80750 - protein, 95 aa, Setaria italica
  Transcript Sequence Number=SeqID_14776
  Gene Ontology: Mol. function=hydrolase activity; Biological process =metabolic process
  Homolog annotation: Hit_ID=B9RTY7; Match level="QueryCoverage=95%, HitCoverage=27%, E-value=1e-12, Identity=46%"; Hit description =Catalytic, putative
MASRDAAADEVAVELLPFIRLYKSGRIERLIVDDTVPASLHDATTGVASKDVTIDPANNVSVRLYLPPAAAGAGGKLPVVVYFHGGGFMVESAAS

SEQ ID NO: 80751 - protein, 423 aa, Setaria italica
  Transcript Sequence Number=SeqID_14777
  Gene Ontology: Mol. function=oxidoreductase activity, acting on the CH-OH group of donors, NAD or NADP as acceptor; Cellular component =cytoplasm; Biological process=metabolic process
  Homolog annotation: Hit_ID=B6T6I3; Match level="QueryCoverage=86%, HitCoverage=91%, E-value=0.0, Identity=84%"; Hit description =Ubiquitin-activating enzyme E1 domain-containing protein 1
  Pfam annotation: Domain name=MoeZ_MoeB; Domain location=232-322; Score=-12.3; E_value=0.017; Accession=PF05237.5; Description =MoeZMoeB domain
  Pfam annotation: Domain name=ThiF; Domain location=81-226; Score =142.7; E_value=1.1e-39; Accession=PF00899.13; Description=ThiF family
  Pfam annotation: Domain name=ketoacyl-synt; Domain location=83-282; Score=-101.5; E_value=0.085; Accession=PF00109.18; Description=Beta -ketoacyl synthase, N-terminal domain
  Pfam module annotation: Pfam domain module=MoeZ_MoeB::ThiF::ketoacyl -synt; Domain location=232-322::81-226::83-282
MEEEQLRALLHDLDALKQRPDDPASIDRMRERVVAMLSPASGAASRSKIKDMSAEVVDSNPYSRLMALQRMGVVENYERIRDYSVAIVGIGGVGSVAAEMLTRCGIGRLLLYDYDTVELANMNRLFFRPEQVGMTKTDAAVQTLSGINPDVVLESYSLNITTVKGFETFLESLKARSSHGRSTGVDLVLSCVDNYEARMVVNQACNELGQTWMESGVSEDAVSGHIQLLVPGETACFACAPPLVVASGVDERTLKREGVCAASLPTTMGVVAGLLVQNALKYLLNFGQVSPYLGYNSLKDYFPTMEMRPNPQCSNPACVQRQKEYMDSKPARDAAAKAKMEAEASAANECPVHLDNEWNISVVDDEDTATSSIRSTADVLPEGLVRELPAADLYPEPPAAASSSAIDDDLEELQRQLDALNSS

SEQ ID NO: 80752 - protein, 200 aa, Setaria italica
  Transcript Sequence Number=SeqID_14778
  Homolog annotation: Hit_ID=Q6MWD5; Match level="QueryCoverage=84%, HitCoverage=61%, E-value=9e-52, Identity=61%"; Hit description =B1358B12.10 protein
MRSCTYILALINAVPSPHQMAEGLFNFVIAWTLMFAPLLFTDSRRDRYQGSLDVLWGFQMFLTNTFLIPYMAIRLNAPDTDQSPSPRSQLGSVMVKGAQVVGTVGGAVCILSIVWALFGRADAGFGDFVERWQYAQSYVVSERLAYAFLWDILLYSIFQPWLIGDNIQNVKADATEFVNVVRFIPVVGLVAYLLCLEKED

SEQ ID NO: 80753 - protein, 279 aa, Setaria italica
  Transcript Sequence Number=SeqID_14779
YSGRVPGKPALFPPRAVSEDRADATPQWQLDFLGARSGALDPPEEEDDDDELLPAEANDWCVRARRSALRSIEARGLAPSLQRMVSTPKKKKKKTAKKKDLKKAAAELKRRKKQLDAAREDEDEDEDEEEEDDDVVDDLRDMDDLELRVAQFADGMFDEKRQRNREAFVQTLSRFSAAPSNKSREVSLNRSIVQAQTADEVLSLAAEVIADVAKGLSPSPLTPLNIATALHRIAKNMEAVSMMQTHRLAFARQRDMSMLVGMAMVALPECSPQGISNIA

SEQ ID NO: 80754 - protein, 81 aa, Setaria italica
  Transcript Sequence Number=SeqID_14780
  Homolog annotation: Hit_ID=B6SH81; Match level="QueryCoverage=100%, HitCoverage=14%, E-value=4e-23, Identity=71%"; Hit description =Retinoblastoma-binding protein-like
MAVDNSTAEDPAEGPNSKRKRRLSVKGLELQQTEKVKKPATKNKSNGKSAKSSAKQMESTNGNSSAVDDEATEDDEINIDS

SEQ ID NO: 80755 - protein, 562 aa, Setaria italica
  Transcript Sequence Number=SeqID_14781
  Gene Ontology: Mol. function=protein binding; Cellular component =histone methyltransferase complex; Biological process=embryonic development ending in birth or egg hatching
  Homolog annotation: Hit_ID=B6SH81; Match level="QueryCoverage=98%, HitCoverage=98%, E-value=0.0, Identity=80%"; Hit description =Retinoblastoma-binding protein-like
  Pfam annotation: Domain name=WD40; Domain location=18-55; Score=22.6; E_value=0.0016; Accession=PF00400.24; Description=WD domain, G-beta repeat
  Pfam annotation: Domain name=WD40; Domain location=212-248; Score =10.0; E_value=2.6; Accession=PF00400.24; Description=WD domain, G -beta repeat
  Pfam annotation: Domain name=WD40; Domain location=331-369; Score =19.5; E_value=0.014; Accession=PF00400.24; Description=WD domain, G -beta repeat
  Pfam annotation: Domain name=WD40; Domain location=61-99; Score=16.6; E_value=0.1; Accession=PF00400.24; Description=WD domain, G-beta repeat
  Pfam module annotation: Pfam domain module=WD40::WD40::WD40::WD40; Domain location=18-55::212-248::331-369::61-99
MPESPPSDSKDPYQGEFPEIIEEYLQHGTMKCIAFNRTGTLLAAGCSKGSCVIWDFETKGLAREFHDKDYSASITSVSWSKYGHRLLASATDKSLTLWDVLSGEKISRITLEKTPLHASLQPSCPTPSICLACPLSSAPLLVDLDTGSTRVLPVSVSENSNPPAPNPRNKFADGTPPFTPTAAIFDKHGDLIYVGNSKGEILIVDSKSIQVHAVIPTPGGTVVKDIVLSRDGQYLLTNSNDRVIRVYKNMMPVKGSGEEIRNISNNNNDYQSHYDKLKANGASCLILSCELSDAITKIQWKTPCFSGNGEWIVGASANKGEHRLQIWDQTGRLVKILDGPKEALIDLAWHPVEPTIATVSVTGFVYIWAKEHVENWSAFAPDFVELEENEEYVEREDEFDLNPREEEAEEVVIDENAEIDIETYEKNAVFSDVEDSVDEIVFLPAIPSPDAPDEQPEKCLGSSSKLEDSNHSGSPSSMDAVQNGQAIPQASSPMEVDNSTAEDPAEGPNSKRKRRLSVKGLELQQTEKVKKPATKSKSNGKPAKSSAMDDEATEDEEVNIET

SEQ ID NO: 80756 - protein, 99 aa, Setaria italica
  Transcript Sequence Number=SeqID_14782
AHTHGRPPLLVLGTAEIRGRLQLHQAFRSRQGFRPGEAKETSACDLDRSEAVKLQLQFYEELVAEGPTPAHLGVRGCCRNDGRDASSGSPSFSAAHQAS

SEQ ID NO: 80757 - protein, 78 aa, Setaria italica
  Transcript Sequence Number=SeqID_14783
  Gene Ontology: Mol. function=NAD(P)H dehydrogenase (quinone) activity; Cellular component=plasma membrane; Biological process =oxidation reduction
  Homolog annotation: Hit_ID=B6TL26; Match level="QueryCoverage=100%, HitCoverage=37%, E-value=7e-26, Identity=80%"; Hit description=NADPH quinone oxidoreductase 2
MEASTAEAAPAKTVLRVAAISGSLRRASANTGLIRAAAEICKESIPGMQVDHVDISELPLLNTDLEVDGGFPPAVEAF

SEQ ID NO: 80758 - protein, 184 aa, Setaria italica
  Transcript Sequence Number=SeqID_14784
  Gene Ontology: Mol. function=NAD(P)H dehydrogenase (quinone) activity; Cellular component=plasma membrane; Biological process =oxidation reduction
  Homolog annotation: Hit_ID=Q941Y8; Match level="QueryCoverage=92%, HitCoverage=84%, E-value=2e-63, Identity=69%"; Hit description =Probable NADPH:quinone oxidoreductase 2
  Pfam annotation: Domain name=FMN_red; Domain location=3-148; Score =102.9; E_value=1.1e-27; Accession=PF03358.7; Description=NADPH -dependent FMN reductase
MCEAAEICKESIPGMQVDHVDISELPLLNTDLEVDGGFPPAVEAFRANIRAADCFLFASPEYNYSISGPLKNALDWGSRPPNCWRDRAAAILSASGGSGGSRSQYHIRQVGVFLDIHFINKPEIFTRAHMPPKKFDDDGNLIDPETKEHLRKMLLSLQALALRLQGKPASSEQGNGESMLPFMS

SEQ ID NO: 80759 - protein, 181 aa, Setaria italica
  misc_feature (74)..(74): Xaa can be any naturally occurring amino acid
  Transcript Sequence Number=SeqID_14785
  Gene Ontology: Mol. function=metal ion binding; Cellular component =integral to membrane
  Homolog annotation: Hit_ID=Q653B5; Match level="QueryCoverage=98%, HitCoverage=27%, E-value=9e-65, Identity=69%"; Hit description=DHHC -type zinc finger domain-containing protein-like
RIIQDRLGNGFPRPAFATIVIIFTLLSLVACVPLGELFFFHMILIRKGITTYEYVVAMRAMSEEPQEEEDQEGXNIVYSPTNSATTGFSGATSLSLHYKGSWCTPPRIFVDQDEVIPHLEPGMVPSTVDPDAAGHTERAIKTKKQVKISAWKLAKLDSNEAMRAAAKARASSSVLRPLDAR

SEQ ID NO: 80760 - protein, 65 aa, Setaria italica
  Transcript Sequence Number=SeqID_14786
GLHVGCTSPLISQLWVSSSHILSHLLLHISISFCVFPLVTPILSIFTHITSPIWFSPYSFSSSYT

SEQ ID NO: 80761 - protein, 172 aa, Setaria italica
  Transcript Sequence Number=SeqID_14787
  Gene Ontology: Cellular component=intracellular
  Homolog annotation: Hit_ID=Q53NJ1; Match level="QueryCoverage=79%, HitCoverage=15%, E-value=1e-40, Identity=66%"; Hit description=BRCA1 C Terminus (BRCT) domain, putative
ELLRLLMMIRSGGGSRHILLNEKLTHIILGAPSEDEKKEVRCLASWGVINVVKVTWLEDCNRAKKEVKVSPTHVATELLLKEFSQVTMEKSSDTRETKVAKSSCGIFHVPTVNDSHDKQLEKDMSSERKPARGKHENSLNLQTWLLTGFHAVNSSQHNGVVNISKYHPKSKG

SEQ ID NO: 80762 - protein, 84 aa, Setaria italica
  Transcript Sequence Number=SeqID_14788
MAAATATAGDRRRRSRAPGGGAAAAAGNDDGEEQHVNPFLDVAPSASSRVQFRNVASRARWVEEAGAAEVVESKGKLWLTTGVT

SEQ ID NO: 80763 - protein, 96 aa, Setaria italica
  Transcript Sequence Number=SeqID_14789
  Gene Ontology: Mol. function=actin binding; Cellular component =cytoskeleton
  Homolog annotation: Hit_ID=B9T216; Match level="QueryCoverage=100%, HitCoverage=14%, E-value=1e-27, Identity=61%"; Hit description =Fimbrin, putative
  Subcellular localization annotation: CTP_CleavageSite=61; ConfidenceScore=5.13e-01
MSAGFVGVVVSDPSLQGQFTQVELRSLKAKFVSLKRDSGHVTTKNLPGLMKKLRGLNEVVSEEEIAAFLSESYPDSDQEIEFESFLREYLNLQARV

SEQ ID NO: 80764 - protein, 128 aa, Setaria italica
  Transcript Sequence Number=SeqID_14790
MPRPGCTMPPSPPAQDSEGSSDTQSADGRGGSPLHGEKPRQAAGASVKRDVAASKSRLLAFRSFSRDKKAGKPGGVADDTASPEGRKAGEEGAAEHKEKGGGRGRGGAQGAWSSKWWCASFCRARLAG

SEQ ID NO: 80765 - protein, 87 aa, Setaria italica
  Transcript Sequence Number=SeqID_14791
  Gene Ontology: Mol. function=RNA binding; Cellular component=U2 -dependent spliceosome; Biological process=protein modification process
  Homolog annotation: Hit_ID=Q8RXF1; Match level="QueryCoverage=96%, HitCoverage=10%, E-value=8e-25, Identity=69%"; Hit description =Probable splicing factor 3 subunit 1
  Pfam annotation: Domain name=Surp; Domain location=3-42; Score=35.6; E_value=2e-07; Accession=PF01805.12; Description=Surp module
  Subcellular localization annotation: CTP_CleavageSite=51; ConfidenceScore=5.08e-01
VRQFVARNGKNFLTSLAQRESTNMQFHFIRPTHSMFPFFTALTDAYSRVLRPEEGVPGLLKELREGSKDLTTVLERCLNRLEWDRSQ

SEQ ID NO: 80766 - protein, 27 aa, Setaria italica
  Transcript Sequence Number=SeqID_14792
NLTLAYYNVGPGVVINLTLRERGGRKK

SEQ ID NO: 80767 - protein, 49 aa, Setaria italica
  Transcript Sequence Number=SeqID_14793
GSVVGERNESFRPQCSGRLMLTTILQQLSWKAFVLDLDVLCFVLVCFIS

SEQ ID NO: 80768 - protein, 104 aa, Setaria italica
  Transcript Sequence Number=SeqID_14794
  Gene Ontology: Mol. function=RNA binding; Cellular component=U2 -dependent spliceosome; Biological process=protein modification process
  Homolog annotation: Hit_ID=Q8RXF1; Match level="QueryCoverage=41%, HitCoverage=5%, E-value=5e-13, Identity=83%"; Hit description =Probable splicing factor 3 subunit 1
PPGADASAGTEPDADPADAPAAAPVDGAAAPADGASADAKADHSAPFRVAPPPKVLVPPKAELYTVRLPEGITGEELDIIKLTAQFVARNGKNFLTSLAQREST

SEQ ID NO: 80769 - protein, 587 aa, Setaria italica
  misc_feature (41)..(41): Xaa can be any naturally occurring amino acid
  Transcript Sequence Number=SeqID_14795
  Gene Ontology: Mol. function=RNA binding; Cellular component=U2 -dependent spliceosome; Biological process=protein modification process
  Homolog annotation: Hit_ID=B9SR88; Match level="QueryCoverage=99%, HitCoverage=72%, E-value=1e-124, Identity=70%"; Hit description =Spliceosome associated protein, putative
  Pfam annotation: Domain name=ubiquitin; Domain location=513-582; Score=42.6; E_value=1.6e-09; Accession=PF00240.15; Description =Ubiquitin family
NRSNEGNFMQFHFIRPTHSMFPFFTALTDAYSRVLRPEEGXPGLLKELREGSKDLTTVLERCLNRLEWDRSQEQAKQQAEDEIEQERMQMSMIDWHDFVVVETIEFADDEYEGLPVPPTLEELKRRKRMQNLGEEEAMELAEPAKEVEMDMDEEEMQLVEEGMRAARLEENDGGAQVKVAGDDEAPMRIVKNYKRPEERIPAERDPTKFVVSPITGELIPISEMEEHMRISLIDPKYKEQKERMLAKIKETTLAPDDEISRNIVGLARTRPDIFGTTEEEVSNAVKAEIEKKKDEQPKQVIWDGHSGSIGRTATHALSQPQGGEEQFDASNVDGRPVPGPAPLVRPGMPLPRPPQPLPLANVPRFIAPPAPYPPPPGSHIPGVPQMMPHMHPPPQQIPGQPPMMRMPGQMVHMPTSIPPPPGQVQFMPGPPRSFPMHPPPHMPPMVNPIGVPQPPAPPLPPQPPAEEQPPPPDEPEPKRQRTDDASLIPAEQFLAQHPGPASISVSVPNLDEGNLRGQVLQIPVQSLSDTVGSLKEQIAGELQLPANKQKLSVRTSFLKDNLTLAYYNVGPGVVINLTLRERGGRKK

SEQ ID NO: 80770 - protein, 282 aa, Setaria italica
  misc_feature (227)..(227): Xaa can be any naturally occurring amino acid
  Transcript Sequence Number=SeqID_14796
  Homolog annotation: Hit_ID=B6TAT2; Match level="QueryCoverage=100%, HitCoverage=81%, E-value=5e-58, Identity=47%"; Hit description=Plant IF-like protein
KVAELKATDLEDEVNKMQKCLEDKEEQLRASLSINEQCRRKLVDLRSQLLITQTTAESTAASANSGLLHCSSLLEKLNDNENSLSEATYPVGNVAEQLNHFHEYLKSRDPSRGHIKDYYLTTESDIMNAFAKAGVDNVNELMKIMSDVSPKNSENINEDLIFEDDDNANLREGIRVLSAHWENKIKELESQLDKHVGIVQELKRWILKLEFSLQEPRSRLQKLQRVXRKRSKALTLKELRNQAAMEQPSGGGSGDKQNLGKSSGFKLIASMSMLVLFILAKR

SEQ ID NO: 80771 - protein, 76 aa, Setaria italica
  Transcript Sequence Number=SeqID_14797
MGLARRHLHHATVGALLAAALLLSTAVPGAMAQEEIEGEHEFSYDPHAENGPDGWGEIKPEWATCSDGRWQSPSTS

SEQ ID NO: 80772 - protein, 202 aa, Setaria italica
  Transcript Sequence Number=SeqID_14798
  Gene Ontology: Mol. function=hydrolase activity, acting on glycosyl bonds; Cellular component=vacuole; Biological process=cell wall organization and biogenesis
  Homolog annotation: Hit_ID=B2WS78; Match level="QueryCoverage=100%, HitCoverage=45%, E-value=3e-78, Identity=68%"; Hit description =Glycoside hydrolase family 28 protein
  Pfam annotation: Domain name=Glyco_hydro_28; Domain location=2-202; Score=-110.6; E_value=0.0014; Accession=PF00295.9; Description =Glycosyl hydrolases family 28
VEPLPSYGRGRELPGPRYASFITGDGLRDVVITGDKGVIDGQGEVWWNMWRRRTLQHTRPNLVEFMHSTGIHISNIVLKNSPFWNIHPVYCENVVVTNMMILAPHDSPNTDGVDPDSSSNVCIEDSYISTGDDLVAIKSGWDEYGIAYGRPSSGITIRRVRGSSPFSGIAIGSEASGGVRDVLVEDCSIFDSGYGIHIKTSV

SEQ ID NO: 80773 - protein, 45 aa, Setaria italica
  Transcript Sequence Number=SeqID_14799
FFFFLIPSQNQGFFFFAFYNLHQEGTSVAKRNTIIPETTSRHCKL

SEQ ID NO: 80774 - protein, 50 aa, Setaria italica
  Transcript Sequence Number=SeqID_14800
QYCNKICSIFNWHNFLNKCRSLSFTPCPPLPLQHHRQSETLRLDHSCLCL

SEQ ID NO: 80775 - protein, 358 aa, Setaria italica
  Transcript Sequence Number=SeqID_14801
  Gene Ontology: Cellular component=plasma membrane
  Homolog annotation: Hit_ID=Q9SY82; Match level="QueryCoverage=81%, HitCoverage=34%, E-value=1e-47, Identity=37%"; Hit description =F14N23.28
VHFGGAILNKYVQLFDRYVQTLIKVLPGPSEDNLLNLRSKEPVEFKAETDAQQLTLIGAAYTIADELLPAAVSKFFDMQTEKKGTVGSSESLGSGSIYSIEYKEWKRHLQHSLDKLRDHFCRQYVLSFIYLEGKSRLDARMYMERKTDDLLFDADPLPSLPFQALFGRLQQLASVAGDVLLGKDKIQKVLLSRLTETVVMWLSNEQEFWDVFEDRSVQLQPSGLQQLILDMHFIVEIAVCGRFPHRPVQQLVSTIITRAIAAFSARNVDPQSALPEDEWFLETAKAAIHKLMLGTSGSESEPEAEQEPEPEEHVALHDEMSDSDESIATPSTSGSDDSFASANNDDLESPVYFTDPEA

SEQ ID NO: 80776 - protein, 240 aa, Setaria italica
  Transcript Sequence Number=SeqID_14802
  Gene Ontology: Cellular component=plasma membrane
  Homolog annotation: Hit_ID=Q9SY82; Match level="QueryCoverage=95%, HitCoverage=27%, E-value=2e-21, Identity=33%"; Hit description =F14N23.28
MNMNRIIQWAEYEIETFARLVKENSPLPESVSALRAACICIQTSLSHCSFLESYGLKFSKLLMVLLHPYIEEVLELNFRRVRRKIVDAARNDDILLLTPQEGSPLSGAVAPNIMLTSSGKKFMSIVNDILDQVTPMTIVHFGGAILNKYVQLFDRYVQTLIKVLPGPSEDDTLLESKEPVEFKAETDAQQLTLIGAAYTIADELLPAAVSKFFDMQTEKKGTVGSSESLGSGSIYYYFLN

SEQ ID NO: 80777 - protein, 91 aa, Setaria italica
  Transcript Sequence Number=SeqID_14803
LLRRRLRRRRPRHLRPEPEHPALSRNAQPLLTGAPVAAVVARGIGGEGRAARGGGTGAPGDIARREVCDASASPPRAAWLGRAARAWVPWG

SEQ ID NO: 80778 - protein, 90 aa, Setaria italica
  Transcript Sequence Number=SeqID_14804
  Gene Ontology: Mol. function=sequence-specific DNA binding; Cellular component=intracellular
MKKREKPTPTKRKRGDDEPPKELRSPKRASGDGDVPASTPVKKRKDQKAAAAGMGSCSFPMARVRQLMRAEDATIRAANEAVFLINKASE

SEQ ID NO: 80779 - protein, 252 aa, Setaria italica
  misc_feature (226)..(226): Xaa can be any naturally occurring amino acid
  Transcript Sequence Number=SeqID_14805
  Gene Ontology: Mol. function=protein binding; Cellular component =nucleus
  Homolog annotation: Hit_ID=O81652; Match level="QueryCoverage=99%, HitCoverage=98%, E-value=7e-80, Identity=60%"; Hit description=Phyb1
  Pfam annotation: Domain name=Fra10Ac1; Domain location=58-175; Score =275.1; E_value=1.6e-79; Accession=PF09725.1; Description=Folate -sensitive fragile site protein
MASLGRLKSAIFGREERKMQYQSHIRGLNAYDRHKKFMKDYVQFYGHEKNVDNSLPIKTDKDTLREGYRFILSEEDDMDSTWEKRLVKRYYDKLFKEYCIADMTQYKKGKIGLRWRTEKEVISGKGQFICGNRHCDEKHGLGSYEVNFSYVEAGEQKQALVKLVACKRCAEKLAYKRLKEKDKEKEEEPYGEKEIELKDRDKRKREHEENDDTSEDEAKKDRRKKXDRKGASSRSSGNNDEGFEEFLEGMFP

SEQ ID NO: 80780 - protein, 67 aa, Setaria italica
  misc_feature (41)..(41): Xaa can be any naturally occurring amino acid
  Transcript Sequence Number=SeqID_14806
SLTVVKGKFVDWKDRDKRKREHEENDDTSEDEAKKDRRKKXDRKGASSRSSGNNDEGFEEFLEGMFP

SEQ ID NO: 80781 - protein, 93 aa, Setaria italica
  Transcript Sequence Number=SeqID_14807
MEAGLRLRALGHRYYSCGGFKRGGLAAARGERRRRVGTASCSPAFCSLAASGNGNGAAVGPVGSGAEVACARRMLHVVLVSPLIPGNTGSIAR

SEQ ID NO: 80782 - protein, 357 aa, Setaria italica
  Transcript Sequence Number=SeqID_14808
  Homolog annotation: Hit_ID=B6TU06; Match level="QueryCoverage=100%, HitCoverage=100%, E-value=1e-171, Identity=82%"; Hit description =Tubby protein
  Pfam annotation: Domain name=Tub; Domain location=100-351; Score =361.8; E_value=1.2e-105; Accession=PF01167.10; Description=Tub family
MPRQASTLPAPPPERGEMAEVVEADPDAEDQEERWARLLPELLSDVVRRVETSGAERWPARKDVVSCACVCRRWREAAVAVVRPPAESGKITFPSSLKQPGPRELPMQCFIKRNKRNSTFLLYLGYANSPMDKGKFLMAARRFRRGPHTEYIISLDAEDLSQGSNAYMGKLRSDFWGTNFKVYDSKPPYDGAKASSSRSSRRFGSRRISPQVSAGNYEVGQVSYKYNLLKSRGPRRMYCALECPSAQETWENSLKTKFRKPMGPTALRNKAPRWHEHLQCWCLNFHGRVTVASVKNFQLVAAANPSDPAGTVDEETVLLQFGKVDDDMFTMDYRQPLSAFQAFAISLSSFGTKLACE

SEQ ID NO: 80783 - protein, 186 aa, Setaria italica
  misc_feature (179)..(179): Xaa can be any naturally occurring amino acid
  Transcript Sequence Number=SeqID_14809
QLARWFRRKDDEPTAGGEEFCWFRPVSPDEDRALGAALPGSTYRVFRDRMDTVASRMENVAKNAIKVLSDNVKNPKDSAMSREAPSILRLTLHNSCKSKTSWDEFGSTDPPNSHALNIHLSERDRQICLRNQGGSTIFTSPAGSMLVTIGKQVQEWSNGQFRTAVGEVLYEMTDEPGPXISLELVY

SEQ ID NO: 80784 - protein, 73 aa, Setaria italica
  Transcript Sequence Number=SeqID_14810
  Gene Ontology: Mol. function=hydrolase activity, hydrolyzing O -glycosyl compounds; Cellular component=plasma membrane; Biological process=peptidyl-lysine modification to hypusine
  Homolog annotation: Hit_ID=B9SJ62; Match level="QueryCoverage=91%, HitCoverage=18%, E-value=1e-28, Identity=77%"; Hit description =Phytanoyl-CoA dioxygenase domain containing, putative
SLGYKRPAIVQSRYIFKQPGFGAEAIPHQDNTYLHTEPPSCTGLWLALEDATINNGCLWAIPGSHKSISFVSI

SEQ ID NO: 80785 - protein, 45 aa, Setaria italica
  Transcript Sequence Number=SeqID_14811
LVLVLFSCSFENLSPASRHALVLHVIETKGCEWSNGNWLVHDGIF

SEQ ID NO: 80786 - protein, 39 aa, Setaria italica
  Transcript Sequence Number=SeqID_14812
LKVVLFLLQRMAMDDYYFKSGDNISFFYEDKAFGDDGCL

SEQ ID NO: 80787 - protein, 78 aa, Setaria italica
  Transcript Sequence Number=SeqID_14813
TAEQLGLFDANGYLVLEPFSSEEDVRALRDPMAELVAGIGGSNNSTGSCEHHVSDHLEPCLTLALFHLPIPNSGVLGA

SEQ ID NO: 80788 - protein, 274 aa, Setaria italica
  Transcript Sequence Number=SeqID_14814
  Gene Ontology: Mol. function=oxidoreductase activity; Cellular component=plasma membrane; Biological process=oxidation reduction
  Homolog annotation: Hit_ID=B9SJ62; Match level="QueryCoverage=93%, HitCoverage=71%, E-value=7e-86, Identity=57%"; Hit description =Phytanoyl-CoA dioxygenase domain containing, putative
  Pfam annotation: Domain name=PhyH; Domain location=13-251; Score =254.0; E_value=3.7e-73; Accession=PF05721.5; Description=Phytanoyl -CoA dioxygenase (PhyH)
MPPVGSLTAEQLGLFDANGYLVLEPFSSEEDVRALRDRMAELVAGIGGSNNSTGSCEHHRMAMDDYYFKSGDNISFFYEDKAFGDDGCLKQSKELSIRFVGHALHEHDPVFKKFSLSESVSSIFSSLGYKRPAIVQSRYIFKQPGFGAEAIPHQDNTYLHTEPPSCTGLWLALEDATINNGCLWAIPGSHKNGLKIRMIKDENGTYFDRPIPSYDHKEFVPLEVKSGSLVIIHGDLVHKSFENLSPASRHALVLHVIETKGCEWSNGNWLQRKS

SEQ ID NO: 80789 - protein, 271 aa, Setaria italica
  Transcript Sequence Number=SeqID_14815
  Gene Ontology: Mol. function=phosphogluconate dehydrogenase (decarboxylating) activity; Biological process=pentose-phosphate shunt
  Homolog annotation: Hit_ID=Q9LM23; Match level="QueryCoverage=97%, HitCoverage=35%, E-value=2e-55, Identity=36%"; Hit description =T10O22.24
WCGAVVLIRSTLLPSQLEKLDQKLADEKKDVLLLDGYIFSGLSDELKQHIVVVASGRQDVAERARQFFNGLDKTIYFAEGEFCTSSKIRLVNDLLESIHFIASVEAMYLGVRAGIHPSIIYDIISNAAGSSRIFVELVPKLLTEDPLLIDFLNSSKKSASYVMDMAKAVTFPLPLLGVAYQQLIHGSSAVIGDGSASPLKVWEASFGVNIVDAASQQIYDASKLADQLVMESKAAKRIGFIGLGAMGFGMASHLLKSGFHVVAYDVFKPGH

SEQ ID NO: 80790 - protein, 125 aa, Setaria italica
  Transcript Sequence Number=SeqID_14816
  Gene Ontology: Mol. function=peptidyl-prolyl cis-trans isomerase activity; Biological process=protein folding
  Homolog annotation: Hit_ID=B9RE54; Match level="QueryCoverage=96%, HitCoverage=36%, E-value=2e-40, Identity=70%"; Hit description =Peptidyl-prolyl cis-trans isomerase B, ppib, putative
AGAVSIVVRDPSLPPPKPKLVAKGGKLEVEEEQVGVAPNGTEFVITTAAAPELDASAVLVGRVLDGMDVVAKIAAVPTVRDNAGSPYFRVAKLIGDKRAVVAERGFNRPYTKVVITNCGMLSKTE

SEQ ID NO: 80791 - protein, 207 aa, Setaria italica
  Transcript Sequence Number=SeqID_14817
  Gene Ontology: Mol. function=phosphoinositide phospholipase C activity; Cellular component=membrane; Biological process =intracellular signaling cascade
  Homolog annotation: Hit_ID=Q01LX1; Match level="QueryCoverage=90%, HitCoverage=12%, E-value=2e-39, Identity=47%"; Hit description =OSIGBa0145C02.9 protein
  Pfam annotation: Domain name=PMD; Domain location=26-207; Score=91.4; E_value=3.1e-24; Accession=PF10536.1; Description=Plant mobile domain
VEQLICAITSPLKFHERYRPYLRDAGLLGLSQICQKMPQLDKALITALVERWRPETHSFHLASGEITITLQDVAMLFALPIDGRPVCSTTDHDYGQVVLDCFGLDARGPAMPGKSFLHYKWLKKNFYELPDEADDMTVERHVRAYILSLLCGVLFPDGTGRMSLIYLPLIADLSRVSTYSWGSAVLAFLYRSLCSVASSHNIKNSGG

SEQ ID NO: 80792 - protein, 120 aa, Setaria italica
  Transcript Sequence Number=SeqID_14818
  Gene Ontology: Mol. function=catalytic activity; Biological process =cellular metabolic process
MSWWWTGAIGAVKKRQDEQAAAAEPTYQSVALVVGSTGIVGTSLLDILPLADTPGGPWKVYALSRRPLPPWSPPPSPAVTHLHLDLADAAAVADALKPLTDITHVFYVAWTARPTEAENR

SEQ ID NO: 80793 - protein, 48 aa, Setaria italica
  Transcript Sequence Number=SeqID_14819
PSVFNANKDSVHVIIVVEMFIWSRTSLLVLCSWLSILFYRLFIQQTQC

SEQ ID NO: 80794 - protein, 386 aa, Setaria italica
  Transcript Sequence Number=SeqID_14820
  Gene Ontology: Mol. function=oligopeptide transporter activity; Cellular component=integral to membrane; Biological process =oligopeptide transport
  Homolog annotation: Hit_ID=Q6YUP9; Match level="QueryCoverage=100%, HitCoverage=51%, E-value=0.0, Identity=80%"; Hit description =Putative sexual differentiation process protein isp4
  Pfam annotation: Domain name=OPT; Domain location=1-365; Score=158.1; E_value=2.6e-44; Accession=PF03169.7; Description=OPT oligopeptide transporter protein
DIPSIVNNQFELDKDAYNQRGRVNLSIFFALSYGFSFATIAATITHVGLFYGKEIYRRFKASQKEKPDIHTKLMEKYDDIPAWWFYSLMALSVAVSLLLCTVLKREVQLPWWGLIFACGMAFIFTLPISIITATTNQTPGLNVITEYAMGLIMPGYPIANVCFKVYGYMSMSQAVAFLSDFKLGHYMKIPPKSMFLVQFIGTIVAGTVNLGTAWWLLGSIKDICSDSLPPESPWTCPSDRVFFDASVIWGLVGPRRIFGSAGNYGALNWFFLIGAAGPVIVYALHRMYPNQRWIPLINLPVLLGATASMPPATAVNYNSWLLIGTIFNFFVFRYQKKWWTRYNYILSAALDAGVAFMGVVLYFSLTMENKTIDWWGTAGEHCPLPS

SEQ ID NO: 80795 - protein, 551 aa, Setaria italica
  Transcript Sequence Number=SeqID_14821
  Gene Ontology: Mol. function=DNA binding; Cellular component=nucleus; Biological process=regulation of transcription
  Homolog annotation: Hit_ID=Q0JIC2; Match level="QueryCoverage=100%, HitCoverage=100%, E-value=0.0, Identity=81%"; Hit description =Transcription factor GAMYB
  Pfam annotation: Domain name=Myb_DNA-bind_2; Domain location=45-98; Score=-5.7; E_value=0.024; Accession=PF08914.3; Description=Rap1 Myb domain
  Pfam annotation: Domain name=Myb_DNA-binding; Domain location=43-90; Score=42.7; E_value=1.4e-09; Accession=PF00249.23; Description=Myb -like DNA-binding domain
  Pfam annotation: Domain name=Myb_DNA-binding; Domain location=96-141; Score=43.2; E_value=1.1e-09; Accession=PF00249.23; Description=Myb -like DNA-binding domain
  Pfam module annotation: Pfam domain module=Myb_DNA-bind_2::Myb_DNA -binding::Myb_DNA-binding; Domain location=45-98::43-90::96-141
MYRVKSESDCDMMLQDQMDSPVADDVSSGEGSPHRGSGPPLKKGPWTSAEDAILVDYVKKHGEGNWNAVQKNTGLFRCGKSCRLRWANHLRPNLKKGAFTPEEERLIIQLHAKMGNKWARMAANLPGRTDNEIKNYWNTRIKRCQRAGLPIYPASVCNQSSSEDQQVSGDFNCSENISNDLLSGNGLYLPDFTSDNFIANPDALSYAPHLSAVSIGNLLGQSFASKNCSFMDQVDHSGMLKQSGCVLPALSDTIDGVLSSVDQFSNGSEKLKQALGFDYLNEANASSKTIAPFGVALSGSHAFLNGNFSASRPINGPLKRELPSLQDTESDPNSWHNYTLAPAMQPTELVDPYLHSPIATPSVKSECASPRNSGLLEELLHEAQGRSGKNRQPSVRSSSSSANTPCETTTVVSPEFDLCPEYWDDHHSSFINECAPFSGYSFTESTPVSAASPDIFQLSKISPAQSPSMGSGEQAVEPRHESAGSPHPENLRPDALFSGNSADPSTFNNAIAILLGNDMNAECKPVLGGGITFGSSSWSNMPNACEISEFK

SEQ ID NO: 80796 - protein, 231 aa, Setaria italica
  Transcript Sequence Number=SeqID_14822
  Gene Ontology: Mol. function=dolichyl pyrophosphate Glc1Man9GlcNAc2 alpha-1,3-glucosyltransferase activity; Cellular component =endoplasmic reticulum membrane; Biological process=protein amino acid glycosylation
  Homolog annotation: Hit_ID=Q9FF17; Match level="QueryCoverage=98%, HitCoverage=44%, E-value=5e-61, Identity=51%"; Hit description =Probable dolichyl pyrophosphate Man9GlcNAc2 alpha-1,3-glucosyltransfe rase
  Pfam annotation: Domain name=Alg6_Alg8; Domain location=1-213; Score=- 205.3; E_value=3.3e-06; Accession=PF03155.7; Description=ALG6, ALG8 glycosyltransferase family
QVISRLAPFERGIYEDYVANFWCSTSVIIKWKILFAIKPLKLMSLSATVLAFLPSFVQQVKSPSNLGFLYSLMNSSFSFYLFSYQVHEKSILLPLLPASLLALKEPQMFGWFVYFALFSMYPLICRDQLLLQYIAVLGLFFLIYYSPGGSHGKRFKISCGAKVVLSLPFLCSLLLHITYLQIEPPKRYPFLFDALIVFVSFSQFVILTLYTNYKQWMLDTHSRSVGVKKDL

SEQ ID NO: 80797 - protein, 167 aa, Setaria italica
  Transcript Sequence Number=SeqID_14823
QREEKKKTPINIVKKVEEEIEVPKSATSASGGIKQKEEVPEPETSGHDPSISHASPPEKEDEEAKPPTIADRFLVFLSEFQVGGSAPLYEGVVAGMKSINLFMLHVPFSFIQQYDGELAIEIQDGYPSMKNELRQSVISYLVNHGFDKKDATVHAQLEIIALPEPKS

SEQ ID NO: 80798 - protein, 228 aa, Setaria italica
  Transcript Sequence Number=SeqID_14824
  Pfam annotation: Domain name=DUF544; Domain location=73-158; Score= -12.1; E_value=0.00065; Accession=PF04424.5; Description=Protein of unknown function (DUF544)
KSRYQLARAQFNGVNKFIACQLSTESSPLIALSNYFNLTVGPECKDFPPFAEESMLSKPIMTALEYTVSHYAKHNISVPGFLNKERLLQIVPSLAKGLHLIPGCRRCQDFIACDELYLFYVLNIKVIHGWVCDPNDKEFFSVLGNCSRSTLLKSISRPGGLAKLVEGTSNPSSLSKKIQKFAESGLTKYGYAFLIHRTIVFLLTIMHEVNIQFLYCSNNLGCASYTKK

SEQ ID NO: 80799 - protein, 237 aa, Setaria italica
  Transcript Sequence Number=SeqID_14825
  Pfam annotation: Domain name=DUF544; Domain location=1-78; Score= -30.3; E_value=0.032; Accession=PF04424.5; Description=Protein of unknown function (DUF544)
PLNKERLLQIVPSLAKGLHLIPGCRRCQDFISCDELYLFYVLNIKVIHGWVCDPNDKEFFSVLGNCSRSTLLKSISRPGGLAKLVEGTSNPSSLSKKIQKFAESGLTKYGLRILHEEIGERQLAIICINDQFDVIYKCSGDLFVLETDGHVLTKFGEALWKRLTLTEEESFYVTMHFDPVKGQKNIHKATEWLERKLSDVDDCGDKGKEQASKKGRDRSSQVSNVGIWGDKAKGRGS

SEQ ID NO: 80800 - protein, 145 aa, Setaria italica
  Transcript Sequence Number=SeqID_14826
  Gene Ontology: Mol. function=peptide-methionine-(S)-S-oxide reductase activity
  Homolog annotation: Hit_ID=B9RX37; Match level="QueryCoverage=88%, HitCoverage=60%, E-value=2e-62, Identity=84%"; Hit description =Methionine sulfoxide reductase, putative
  Pfam annotation: Domain name=SelR; Domain location=20-141; Score =280.8; E_value=3.1e-81; Accession=PF01641.10; Description=SelR domain
PGVAAMSSSTPPPAPVQKSEEEWQAILTPEQFNILRRKGTEYPGTGEYDKFFDEGIYECAGCGTPLYKSSTKFNSGCGWPAFYEGLPGAIRQTPDPDGRRTEITCAACGGHLGHIFKGEGFKTPTNERHCVNSISLKFIPASEEA

SEQ ID NO: 80801 - protein, 109 aa, Setaria italica
  Transcript Sequence Number=SeqID_14827
  Subcellular localization annotation: CTP_CleavageSite=23; ConfidenceScore=5.53e-01
DFLNYSYNKLKSIFYSQMNCSRSGSASWGGRGQWIRSSRACFWISTLPFFPSRGFPRLVGRLAGFFTSFLFAGLTAWTPIFLVDHPDSRFFTSGSSVSTVFLRIFIAMD

SEQ ID NO: 80802 - protein, 50 aa, Setaria italica
  Transcript Sequence Number=SeqID_14828
TRPCYPSLRSAIVASWPQEDAGKTIWIQQDNARTHVPDMNVLDLDFFASL

SEQ ID NO: 80803 - protein, 118 aa, Setaria italica
  Transcript Sequence Number=SeqID_14829
  Homolog annotation: Hit_ID=Q7XVN4; Match level="QueryCoverage=56%, HitCoverage=13%, E-value=4e-25, Identity=76%"; Hit description =OSJNBa0055C08.7 protein
TRPCYPSLRSAIVASWPQEDAGKTIWIQQDNARTHVPADDEAFLNVVAKTGLDIRIMHQPPNSPDMNVLDLDFFASLAKFIVSTCILSLQIRVLHVCFFFRWLRVAGNVMPCNSFQTI

SEQ ID NO: 80804 - protein, 251 aa, Setaria italica
  misc_feature (14)..(14): Xaa can be any naturally occurring amino acid
  Transcript Sequence Number=SeqID_14830
  Gene Ontology: Mol. function=transporter activity; Cellular component= integral to membrane; Biological process=transport
  Homolog annotation: Hit_ID=A7J2I5; Match level="QueryCoverage=100%, HitCoverage=99%, E-value=1e-113, Identity=86%"; Hit description =Tonoplast intrinsic protein
  Pfam annotation: Domain name=MIP; Domain location=12-233; Score =388.5; E_value=1.2e-113; Accession=PF00230.12; Description=Major intrinsic protein
PVSRISVGAPGELXHPDTAKAAVAEFISMLIFVFAGSGSGMAFSKLTAGGATTPSGLIAAALAHALALFVAVAVGANISGGHVNPAVTFGAFVGGNITLLKAVVYWVAQLLGSVVACLLLKIATGGEAVGAFSLSAGVGAWNAVVFEIVMTFGLVYTVYATAVDPKKGDLGVIAPIAIGFIVGANILAGGAFDGASMNPAVSFGPAVVSGVWENHWVYWLGPFVGAAIAALVYDIIFIGQRPHDHLPTTDY

SEQ ID NO: 80805 - protein, 73 aa, Setaria italica
  Transcript Sequence Number=SeqID_14831
ALKSKQLHTQLLGQDHRTREFNSHPWIRQHSTEIFGFRQTTNTVLHQVAESAEPLASSLLFLNSFQASMAFLV

SEQ ID NO: 80806 - protein, 206 aa, Setaria italica
  Transcript Sequence Number=SeqID_14832
  Gene Ontology: Mol. function=transferase activity, transferring glycosyl groups; Cellular component=plastid outer membrane; Biological process=biosynthetic process
  Homolog annotation: Hit_ID=Q10NI4; Match level="QueryCoverage=99%, HitCoverage=68%, E-value=1e-108, Identity=88%"; Hit description =Digalactosyldiacylglycerol synthase 2, putative, expressed
MAGKQQRVAIFTTASLPWMTGTAVNPLFRAAYLAKAGDWEVTLVVPWLSKGDQILVYPNKMKFSSPAEQEVYVRRWLEERIGVLPRFDIKFYPGKFSTEKRSILPVGDISQTISDDKADIAVLEEPEHLTWYHHGRRWKTKFQKVIGVVHTNYLEYVKREKNGYISAFILKHINSWVTDIYCHKVIRLSAATQDVPRSVICNVHGV

SEQ ID NO: 80807 - protein, 392 aa, Setaria italica
  Transcript Sequence Number=SeqID_14833
  Gene Ontology: Mol. function=transferase activity, transferring glycosyl groups; Cellular component=plastid outer membrane; Biological process=biosynthetic process
  Homolog annotation: Hit_ID=B9RDM5; Match level="QueryCoverage=95%, HitCoverage=79%, E-value=1e-148, Identity=66%"; Hit description=UDP -galactose:MGDG galactosyltransferase, putative
  Pfam annotation: Domain name=Glycos_transf_1; Domain location=151 -312; Score=-8.1; E_value=0.0024; Accession=PF00534.12; Description =Glycosyl transferases group 1
SIGYLFYWYGIGPRFDIKFYPGKFSTEKRSILPVGDISQTISDDKADIAVLEEPEHLTWYHHGRRWKTKFQKVIGVVHTNYLEYVKREKNGYISAFILKHINSWVTDIYCHKVIRLSAATQDVPRSVICNVHGVNPKFIEIGKLKHQQVCQREQAFFKGAYYIGKMVWSKGYTELLQLLRKHQIELSGLKMELYGSGEDSDEVKATAGRLSLDVRVYPGRDHGDSIFHDYKVFINPSTTDVVCTTTAEALAMGKIVICANHPSNEFFKRFPNCHMYNTEKEFVRLTMKALAEEPIPLSDDLRHELSWEAATERFVRVADIAPSMSVKQQNPTSQHFMRISPEELQKNMEEASAFFHNTISGIETARCVFGAIPNTLQPDEQQCKELGWNLQG

SEQ ID NO: 80808 - protein, 63 aa, Setaria italica
  Transcript Sequence Number=SeqID_14834
  Subcellular localization annotation: CTP_CleavageSite=55; ConfidenceScore=5.43e-01
SAFHPYSKKKQNGDYFTVVILPSRDGPRSERSLPCDSSSTLRVTRTALPSFYRPRPSAPSSTT

SEQ ID NO: 80809 - protein, 145 aa, Setaria italica
  Transcript Sequence Number=SeqID_14835
  Gene Ontology: Cellular component=plasma membrane
  Homolog annotation: Hit_ID=B6SP51; Match level="QueryCoverage=99%, HitCoverage=56%, E-value=3e-64, Identity=86%"; Hit description =Harpin-induced protein
  Pfam annotation: Domain name=Hin1; Domain location=1-126; Score=47.6; E_value=4.8e-11; Accession=PF07320.5; Description=Harpin-induced protein 1 (Hin1)
RVTLEGVDGDLGTERHPVSVNATLSADISIKNPNVASFRFARSETDFYYAGETVGVAYAPDGEVGADRTVRMNVTLDVLADRISPNVNATDLIFGQDYNLTSYTEITGRVNVLGIYKRDLDIKMNCSITLGGWGAFTTVQSKSTN

SEQ ID NO: 80810 - protein, 105 aa, Setaria italica
  Transcript Sequence Number=SeqID_14836
IRWWYQSFCSLILSQVSVPHTNFKQCRNRDFGGVADLWLLLVDGACVEPLTRHPCSPTTNRGGDWSLDKCRIQHVLDATLHGWEHLCLSVRDERLFSHGVQPLPV

SEQ ID NO: 80811 - protein, 103 aa, Setaria italica
  Transcript Sequence Number=SeqID_14837
VVWFLNLRDSGGIVMHSKIRWWYQSFCSLILSQVSVPHTNFKQCRNRIWGVADLWLLLVDGACVEPLTRHPCSPTTNRGGDWSLDKCRIQHVLDATLHGWEHP

SEQ ID NO: 80812 - protein, 253 aa, Setaria italica
  Transcript Sequence Number=SeqID_14838
  Gene Ontology: Mol. function=nucleic acid binding
  Homolog annotation: Hit_ID=Q2QUR7; Match level="QueryCoverage=54%, HitCoverage=8%, E-value=5e-15, Identity=32%"; Hit description =Retrotransposon protein, putative, LINE subclass
MEPYHGDHRAQPNLAVCAITATVTIKCKREAIISKTMVRWLNGNNHDSGTYHVTNVLEEQLHIDCREIKVRWSSTSPSSTSSSSPTAAPTNVSCITTECGAMAGCSTSSSGRGAVESKLEYRVRLYIEGVPVHAWSEEVAAKVIGPTCTIKYVKGYSRHQDCMRTYNLWGYHKRVLLTIADPNREHINDDTTTQYHNPPCGCKGTFDYKLHVHLDVVKDLSFHDGRGVGDGLPNRKPRREFLWNYGALDSLGK

SEQ ID NO: 80813 - protein, 102 aa, Setaria italica
  Transcript Sequence Number=SeqID_14839
  Subcellular localization annotation: CTP_CleavageSite=68; ConfidenceScore=5.77e-01
KPQVSNPGTNLNINQSSSTDTPPCTNPVVSTCGSPPFPNCKRIPLINPTTTDSRLQPTAAGAASNGARAASPVALPSTAAPKRLAGRRRRRTRLRWPCWRAT

SEQ ID NO: 80814 - protein, 302 aa, Setaria italica
  misc_feature (26)..(26): Xaa can be any naturally occurring amino acid
  misc_feature (267)..(267): Xaa can be any naturally occurring amino acid
  misc_feature (286)..(286): Xaa can be any naturally occurring amino acid
  Transcript Sequence Number=SeqID_14840
  Gene Ontology: Mol. function=nucleotide binding; Cellular component =nucleus; Biological process=defense response
  Homolog annotation: Hit_ID=Q6F2H5; Match level="QueryCoverage=99%, HitCoverage=28%, E-value=1e-112, Identity=65%"; Hit description =Putative NBS-LRR type disease resistance protein
  Pfam annotation: Domain name=LRR_1; Domain location=101-122; Score =9.8; E_value=4.1; Accession=PF00560.25; Description=Leucine Rich Repeat
  Pfam annotation: Domain name=LRR_1; Domain location=55-76; Score =13.2; E_value=0.89; Accession=PF00560.25; Description=Leucine Rich Repeat
  Pfam annotation: Domain name=LRR_1; Domain location=78-99; Score=1.5; E_value=1.6e+02; Accession=PF00560.25; Description=Leucine Rich Repeat
  Pfam module annotation: Pfam domain module=LRR_1::LRR_1::LRR_1; Domain location=101-122::55-76::78-99
LPITRGLRILQVINALDDNKRYYSSXFQNNRRCFSKLFSHHINVMLPEDLRGLRHLRALDLSRSALTSLPESIGELKLLRYLCIFQTRIAKLPESICSLHYLKVLDARTNTLGELPQDIQKLVSLQHLLLDFWSPLCMPSGIGKLRRLKTLTRYSVGTGNWHCNIAELHHLVNIHGELCITGLGRVTSIDDAQTANLISKKHLQILRLDWSAGFYATECEHIVNQNNATSTPELDEGVFESLKPQRNLEELEVINYSGYKYPSWLGXPAFSRLAKVTLWKQKCQFXPALGQLPQLHELVIIH

SEQ ID NO: 80815 - protein, 80 aa, Setaria italica
  Transcript Sequence Number=SeqID_14841
  Gene Ontology: Mol. function=protein serine/threonine kinase activity; Biological process=protein amino acid phosphorylation
  Homolog annotation: Hit_ID=Q25AB6; Match level="QueryCoverage=77%, HitCoverage=77%, E-value=6e-16, Identity=61%"; Hit description =B0808H03.2 protein
  Pfam annotation: Domain name=PAN_2; Domain location=3-39; Score=20.6; E_value=1.1e-05; Accession=PF08276.3; Description=PAN-like domain
SECTRNCSCVAYAYANLSNAGTTGDTSRCLVWTGDLIDMEKASFAENLYIRLGESPDQKKSNLLKILLPVIACLLLLVRL

SEQ ID NO: 80816 - protein, 166 aa, Setaria italica
  Transcript Sequence Number=SeqID_14842
GSLLQLLCSLLEQSYLEGTDGQDMYVKLVDIVPKIAASLQEQHDGSKSLYQYLKHKILMVMMRLKPYMQQDCSRIVCYLKLLRQYFHDLLHEPISQHIAKLDNCLEGSPFLLNMVDLVESQDKSTRHLQRQAIYLFLSFSICLSYNRNDGTLQCSCKRDDCLLGQQ

SEQ ID NO: 80817 - protein, 44 aa, Setaria italica
  Transcript Sequence Number=SeqID_14843
  Gene Ontology: Mol. function=protein serine/threonine kinase activity; Biological process=protein amino acid phosphorylation
  Homolog annotation: Hit_ID=Q0E6U4; Match level="QueryCoverage=75%, HitCoverage=8%, E-value=7e-11, Identity=90%"; Hit description =Mitogen-activated protein kinase homolog 1
NIKSSQPLSNDHCQYFLFQLLRGMKYLHSAGILQNHISSDHSLH

SEQ ID NO: 80818 - protein, 390 aa, Setaria italica
  Transcript Sequence Number=SeqID_14844
  Gene Ontology: Mol. function=protein serine/threonine kinase activity; Biological process=protein amino acid phosphorylation
  Homolog annotation: Hit_ID=Q6Z437; Match level="QueryCoverage=94%, HitCoverage=99%, E-value=0.0, Identity=89%"; Hit description=Mitogen- activated protein kinase 3
  Pfam annotation: Domain name=Kdo; Domain location=49-214; Score= -84.9; E_value=0.069; Accession=PF06293.6; Description=Lipopolysacchar ide kinase (Kdo)
  Pfam annotation: Domain name=Pkinase; Domain location=53-340; Score =340.5; E_value=3.3e-99; Accession=PF00069.17; Description=Protein kinase domain
  Pfam annotation: Domain name=Pkinase_Tyr; Domain location=53-335; Score=-9.7; E_value=4.4e-13; Accession=PF07714.9; Description =Protein tyrosine kinase
  Pfam module annotation: Pfam domain module=Kdo::Pkinase::Pkinase_Tyr; Domain location=49-214::53-340::53-335
ELRRPAHHRTGAPPVASESEKMAMMVDPPNGMGNQGKHYYTMWQTLFEIDTKYVPIKPIGRGAYGIVCSSINRETNEKVAIKKINNVFDNRVDALRTLRELKLLRHLRHENVIALKDIMMPVHRRSFKDVYLVYELMDTDLHQIIKSSQPLSNDHCQYFLFQLLRGMKYLHSAGILHRDLKPGNLLVNANCDLKICDFGLARTNNTKGQFMTEYVVTRWYRAPELLLCCDNYGTSIDVWSVGCIFAELLGRKPIFPGTECLNQLKLIVNVLGTMSEADLEFIDNPKARKYIKSLPYTPGIPLTSMYPQAHPLAIDLLQKMLVFDPSKRISVTEALEHPYMSPLYDPSANPPAQVPIDLDIDENLGVDMIREMMWQEMIHYHPEVVTGMSM

SEQ ID NO: 80819 - protein, 236 aa, Setaria italica
  misc_feature (180)..(180): Xaa can be any naturally occurring amino acid
  Transcript Sequence Number=SeqID_14845
  Gene Ontology: Mol. function=actin binding; Cellular component =cytoskeleton; Biological process=actin filament bundle formation
  Homolog annotation: Hit_ID=O24399; Match level="QueryCoverage=90%, HitCoverage=47%, E-value=1e-114, Identity=94%"; Hit description =Fimbrin/plastin-like (Fragment)
  Pfam annotation: Domain name=CH; Domain location=41-146; Score=112.1; E_value=1.9e-30; Accession=PF00307.23; Description=Calponin homology (CH) domain
SANLNLAFVAQIFQHRNGLTSDTKQVTLTQTATRDDVLLSREERAFRMWINSLGVESYVNNVFEDVRNGWVLLEVLDKVSPGSVNWKLASKPPIKLPFRKLENCNQVVKIGKELKFSLVNLAGNDIVQGNKKLIVALLWQLMRFNILQLLNKLRFHSQGSQGKEITDADILNWANSKVKXSGRTSRMESFKDKSLSNGLFFLELLSAVQPRVVNLINCHKSATISFLFSLNNIIPS

SEQ ID NO: 80820 - protein, 246 aa, Setaria italica
  misc_feature (9)..(9): Xaa can be any naturally occurring amino acid
  Transcript Sequence Number=SeqID_14846
  Gene Ontology: Mol. function=actin binding; Cellular component =cytoskeleton
  Homolog annotation: Hit_ID=O24399; Match level="QueryCoverage=68%, HitCoverage=37%, E-value=5e-89, Identity=95%"; Hit description =Fimbrin/plastin-like (Fragment)
  Pfam annotation: Domain name=CH; Domain location=64-171; Score=91.7; E_value=2.6e-24; Accession=PF00307.23; Description=Calponin homology (CH) domain
NCNQVVKIXGKELKFSLVNLAGNDIVQGNKKLIVALLWQLMRFNILQLLNKLRFHSQGSQGKEITDADILNWANSKVKASGRTSRMESFKDKSLSNGLFFLELLSAVQPRVVNWKVVTKGEADEDKKLNATYIISVARKLGCSVFLLPEDIIEVNQKMILTLTASIMYWSLQKQPQSQSEMPEQSEPSSMTSDAASDIASEDGASTTAPSESEEVNSLSDSMSNLTTDDATSNAPSTENGNGVAGS

SEQ ID NO: 80821 - protein, 91 aa, Setaria italica
  Transcript Sequence Number=SeqID_14847
LPLPPSLLARSCAGGSDPYASVVPAEYAAAAMDTHPSDRAGRLRGWRVRRGRRQSPRLGDALAEWLSMLSLYRSCKRAAACFAAKAKSPAA

SEQ ID NO: 80822 - protein, 198 aa, Setaria italica
  Transcript Sequence Number=SeqID_14848
  Homolog annotation: Hit_ID=Q9SAG6; Match level="QueryCoverage=33%, HitCoverage=33%, E-value=1e-25, Identity=83%"; Hit description =F23A5.30 protein
MNELPSNHVLEVMCSLDINWESALTIDLTNNMYVPANGRSLQQEPDKDATEEVNEQAQEESMKIDDATDTTATAEDVQPDPKANLSEKRKALFEPLEPINGKRSAEMLLPPPDFEPTSYPKGWLVGKKRKLVNVDVVESMRRIAVQEMNRKVYNLSSGLTVHTSMISRRIQMLFFLANTSISMIRLKNPETLKICFCL

SEQ ID NO: 80823 - protein, 207 aa, Setaria italica
  Transcript Sequence Number=SeqID_14849
  Homolog annotation: Hit_ID=Q9SAG6; Match level="QueryCoverage=95%, HitCoverage=89%, E-value=1e-47, Identity=58%"; Hit description =F23A5.30 protein
MEDPTPADPPRIFWKSRRSANGRSLQQEPDKDATEEVNEQAQEESMKIDDATDTTATAEDVQPDPKANLSEKRKALFEPLEPINGKRSAEMLLPPPDFEPTSYPKGWLVGKKRKLVNVDVVESMRRIAVQEMNRKDREINGLNEQLEEDSRVLELLQKQLADERKKRAEIEKENSMLHEQVSMLMNMLDENEGFDEEGEAPPPDSFD

SEQ ID NO: 80824 - protein, 238 aa, Setaria italica
  Transcript Sequence Number=SeqID_14850
  Gene Ontology: Mol. function=protein binding; Cellular component =membrane coat; Biological process=intracellular protein transport
  Homolog annotation: Hit_ID=Q5QMU1; Match level="QueryCoverage=98%, HitCoverage=33%, E-value=5e-69, Identity=58%"; Hit description=AP-3 complex delta subunit-like protein
ALLGNHFLCPVLSAAAWISGEYAELTKDPVELVEALLQPRTSLLPMSVRAVYVHAVFKVLTFCLSVYVEKLGDSNKEVDVVFDGLAIDQTASGESKVTLGSAEEQDIRASAVRKDPFSHESMLYMINLIETTVGPLVECNEVEVQERAHNLIGFVHLVRDIQELNQKKVADDDKQSRVKELVKTMRTVFCQELGPVSVTAQMKVASPDGLDLNENLVELADVVSEDDTTPSTSIFSIL

SEQ ID NO: 80825 - protein, 70 aa, Setaria italica
  Transcript Sequence Number=SeqID_14851
  Subcellular localization annotation: CTP_CleavageSite=57; ConfidenceScore=5.03e-01
CATHLLSSHVRALASSLWFNLLMEPPYSSRYQLHGSASPMTWRLCLFLLLVLQSCCRSALSASPYLVGMG

SEQ ID NO: 80826 - protein, 69 aa, Setaria italica
  Transcript Sequence Number=SeqID_14852
  Subcellular localization annotation: CTP_CleavageSite=20; ConfidenceScore=5.03e-01
LVYPMHVSRNPSNSVVYCCMHEHLSSSTVIQTMLQLSRSNIRTTVSFPETSWPDSILLYIGMHNNLLSV

SEQ ID NO: 80827 - protein, 153 aa, Setaria italica
  misc_feature (34)..(34): Xaa can be any naturally occurring amino acid
  Transcript Sequence Number=SeqID_14853
SSGPSFSLPQIVDASTQSDAAAATLGYSFSAFGXKVIIPEYTPGWVYFCLLMAAGFGLLISEEALNVWAGISLSRTLSLDGTWQSLVNSFSANAPYIVSTVLWIYWGVCLSDMIPFFLGKLFRQTKASEGISSKIGIGKDKALSISRAVQKYG

SEQ ID NO: 80828 - protein, 248 aa, Setaria italica
  Transcript Sequence Number=SeqID_14854
  Gene Ontology: Mol. function=transferase activity, transferring glycosyl groups; Biological process=metabolic process
  Homolog annotation: Hit_ID=B6TBS7; Match level="QueryCoverage=100%, HitCoverage=54%, E-value=1e-130, Identity=89%"; Hit description =Cytokinin-O-glucosyltransferase 2
ELEGEAVAAMESLGLARKVYTLGPLPLLAREDPPTPRSSISLSLWKEQEECLRWLDGRDPGAVVYVNFGSITVMTNEQLVEFAWGLANSGRQFLWIIRRDLVKGDSAVLPPEFLAATADRGLMASWCPQQEVLNHPAVGAFLTHSGWNSTLETICGGVPVISWPFFADQQTNCRYQCSEWGVGMEIDSNVRRDAVASLITELMEGEQGKEMRRKAREWRDKAIEAAKPGGASQRNFDDLVRDVLLPKN

SEQ ID NO: 80829 - protein, 231 aa, Setaria italica
  misc_feature (185)..(185): Xaa can be any naturally occurring amino acid
  Transcript Sequence Number=SeqID_14855
  Gene Ontology: Mol. function=ubiquitin-protein ligase activity; Cellular component=ubiquitin ligase complex; Biological process =ubiquitin-dependent protein catabolic process
  Homolog annotation: Hit_ID=O22193; Match level="QueryCoverage=83%, HitCoverage=24%, E-value=1e-14, Identity=30%"; Hit description=U-box domain-containing protein 4
  Subcellular localization annotation: CTP_CleavageSite=51; ConfidenceScore=5.69e-01
SAPPPPPSASRAAWSSRVTAATAIVPRTGQWGRSVPMSIINSISNFRALFSSNAVETELVKRYGRKIDEILDLLKMVIDGVLTQVTPDDKLLDVLEELDVTINEALKLVGSWDWMMSKIYFATQVESLITKMQKYVLEVCQALNSLMLPSETNCISVYLEKAKQFHCDKMTAVVGEASRDLVGKXMPKSEQLTNIQVSLSLSTNQELLMEAVALSKIRMRVSADDSAELDG

SEQ ID NO: 80830 - protein, 152 aa, Setaria italica
  misc_feature (22)..(22): Xaa can be any naturally occurring amino acid
  Transcript Sequence Number=SeqID_14856
  Gene Ontology: Mol. function=DNA binding
  Pfam annotation: Domain name=zf-C2HC_plant; Domain location=30-82; Score=16.3; E_value=0.00054; Accession=PF07567.4; Description =Protein of unknown function, DUF1544
NNKNKILDKNTDNSQKSKILKXHAGKVHFNTRKHIIIVDEVARHWRCRYCGMDGYGKKFQLHYHLAGAFRHPKCPNVPREVFAKARHHVPTKRRLKTNKAEQQIPSRPHILGQFGEERQNNGASCGNQSELSIKMNLVRYTITQSGFRVVHG

SEQ ID NO: 80831 - protein, 305 aa, Setaria italica
  Transcript Sequence Number=SeqID_14857
  Gene Ontology: Mol. function=hydrolase activity; Cellular component =chloroplast envelope
  Homolog annotation: Hit_ID=B6SU76; Match level="QueryCoverage=95%, HitCoverage=75%, E-value=1e-150, Identity=89%"; Hit description =Alpha/beta hydrolase fold
  Pfam annotation: Domain name=Abhydrolase_1; Domain location=49-287; Score=62.9; E_value=1.2e-15; Accession=PF00561.12; Description =alphabeta hydrolase fold
RRGCTTWTWRGMRVNYLARGQGPPILLVHGFGASVAHWRRNIGVLSESYTVYAIDLLGFGASDKPPGFSYTMETWAELILDFLEEVVKRPTVLVGNSVGSLACVIAAAESNRDVVRGLVLLNCAGGMNNKAIVDDWRIKLLLPLLWLIDFLLKQRPIASALFERVKGRDNLKDILLSVYGNKDAVDDELVEIIRGPADTEGALDAFVSTVTGPPGPSPIALMPRLADVPVLVLWGDRDPFTPIDGPVGKFFSKLPSELPNVTLHMLEGVGHCPHDDRPDLVHNRLLPWLDGLPPPAAEAAGAAAV

SEQ ID NO: 80832 - protein, 122 aa, Setaria italica
  Transcript Sequence Number=SeqID_14858
  Pfam annotation: Domain name=DUF1649; Domain location=1-90; Score= -36.7; E_value=0.0031; Accession=PF07855.4; Description=Protein of unknown function (DUF1649)
VQCGLPELEKEVDEKIDLFTAWVEKHPNRKSQVCLSFFDEKHKHPGNVLEETSSRRAALVSLLNEVLFQIINFANEKKDHIPAIPDRIFNHEIMIPSSSDSVFGWNTDAFRRVLNSGHPYSL

SEQ ID NO: 80833 - protein, 48 aa, Setaria italica
  Transcript Sequence Number=SeqID_14859
VQCGLPELEKEVDEKIDLFTAWVEKHPNRKSQVCLSFFDEKHKHPGWF

SEQ ID NO: 80834 - protein, 67 aa, Setaria italica
  Transcript Sequence Number=SeqID_14860
  Gene Ontology: Mol. function=hydrolase activity, hydrolyzing O -glycosyl compounds
  Pfam annotation: Domain name=DUF1649; Domain location=9-67; Score= -22.7; E_value=0.00027; Accession=PF07855.4; Description=Protein of unknown function (DUF1649)
MNCETCQLKELELEQTEIRDVLRCILHTIFFHRTLSLVRPKDVDCKNLEITYVCLSFFDEKHKHPGW

SEQ ID NO: 80835 - protein, 162 aa, Setaria italica
  Transcript Sequence Number=SeqID_14861
  Pfam annotation: Domain name=DUF1649; Domain location=1-130; Score =11.4; E_value=7.1e-07; Accession=PF07855.4; Description=Protein of unknown function (DUF1649)
VQCGLPELEKEVDEKIDLFTAWVEKHPNRKSQVCLSFFDEKHKHPGWFVNKTERIYWEQWFINLHVMSSKRYSKSNSSKRLTNIGGNDLEETSSRRAALESSLNEVLFQIINFANEKKDHIPAIPDRIFNHEIMIPSSSDSVFGWNTDVIRRVLNSGHPCSL

SEQ ID NO: 80836 - protein, 78 aa, Setaria italica
  Transcript Sequence Number=SeqID_14862
LNIITSIRIYQCFRLSKSPRCTFTTTYFRIYECKPFFPLRVNSIYILQRHNYSEGLIVFLLKQRSDDSGLKLVSYKIM

SEQ ID NO: 80837 - protein, 214 aa, Setaria italica
  Transcript Sequence Number=SeqID_14863
  Gene Ontology: Mol. function=hydrolase activity, hydrolyzing O -glycosyl compounds
  Pfam annotation: Domain name=DUF1649; Domain location=9-182; Score =190.9; E_value=3.6e-54; Accession=PF07855.4; Description=Protein of unknown function (DUF1649)
MNCETCQLKELELEPTEIRDVLRCILHTIFFHRTLSLVRPKDVDCDFLEITYVQCGLPELEKEVDEKIDQFTAWVEKHPNRRSQVCLSFFDEKSKNPGWFVNKTERIYWEQWFINLHVMSSKRYSKSNSSKRLTNIGGNDLEETSSRRAALESSLNEVLFQIINFANEKKDHIPAIPDRIFNHEIMIPSSSDSVFGWNTDVIRRVLNSGHPCSL

SEQ ID NO: 80838 - protein, 207 aa, Setaria italica
  Transcript Sequence Number=SeqID_14864
  Gene Ontology: Mol. function=peptidyl-prolyl cis-trans isomerase activity; Cellular component=ubiquitin ligase complex; Biological process=protein ubiquitination
  Homolog annotation: Hit_ID=Q10QD1; Match level="QueryCoverage=99%, HitCoverage=35%, E-value=1e-112, Identity=92%"; Hit description =Peptidylprolyl isomerase, putative, expressed
  Pfam annotation: Domain name=U-box; Domain location=20-79; Score= -10.6; E_value=0.008; Accession=PF04564.7; Description=U-box domain
RTEWGGAKQKEVAAPFKRLPFYCCALTFLPFEDPVCTVDGSVFDLMSIIPYLKKFGKHPVTGAPLKQEDLIPLTFHKNSDGEFQCPVLNKVFTEFTHIVAVKTTGNVFCYEAIQELNIKPKNWKELLTDDPFTRNDLITIQNPNVLDSKVLGEFDHVKKGLKLEDEELQRMKDDPTYNINISGDLKQMIKELGTEKGKEAFLQGGGG

SEQ ID NO: 80839 - protein, 119 aa, Setaria italica
  Transcript Sequence Number=SeqID_14865
  Homolog annotation: Hit_ID=Q9SQR0; Match level="QueryCoverage=90%, HitCoverage=44%, E-value=8e-19, Identity=50%"; Hit description =T11I18.13 protein
AAIIICSLDSFEPPKPDMLMPFSAKLIDGINRSDSRRRALILFCFEYFNVWARKAVMLSIDHHGFDVLAKVPERITLANVSQQYHWKEFRFTFKEPAKDAEGFCRTLVELEDEVLQSVK

SEQ ID NO: 80840 - protein, 178 aa, Setaria italica
  Transcript Sequence Number=SeqID_14866
MAAAKIKSTTLSITHKCRNILAAGWEAHLNTIKADAKGSKEEIYTSRVHYMIQKGTPYLIVPENDMHNINIVIDERGSLAVCSPIRGRVVSLLKSLQKMPPRVAMTGDVLRLKDSKVPIIADSLKKAIMKEHEASSAASHGVSAILSSAGATCRSRSEGLLSLLNEESSYSIFKFDIG

SEQ ID NO: 80841 - protein, 318 aa, Setaria italica
  misc_feature (76)..(76): Xaa can be any naturally occurring amino acid
  Transcript Sequence Number=SeqID_14867
  Homolog annotation: Hit_ID=Q9SQR0; Match level="QueryCoverage=75%, HitCoverage=100%, E-value=1e-36, Identity=38%"; Hit description =T11I18.13 protein
MAAAKIKSTTLSITHKCRNILAAGWEAHLNTIKADAKGSKGEIYTSRVHYMIQKGTPYLIVPENDMHYIVESCAGXNIVIDERGSLAVCSPIRGRVVSLLKSLQKMPPRVAMTGDVLRLKDSKVPIIADSLKKAIMKEHEASSAASHGVSAILSSAGATCRSRSEGLLSLLNEESSYSIFKFDIGSCVYIDSSGSSHNIELDSFEPPKPDMLMPFSAKLIDGINRSDSRRRALILFCFEYFNVWARKAVMLSIDHHGFDVLAKVPERITLANVSQQYHWKEFRFTFKEPAKDAEGFCRTLVELEDEVLQSVKTYSGLG

SEQ ID NO: 80842 - protein, 229 aa, Setaria italica
  misc_feature (16)..(16): Xaa can be any naturally occurring amino acid
  misc_feature (106)..(106): Xaa can be any naturally occurring amino acid
  misc_feature (195)..(195): Xaa can be any naturally occurring amino acid
  misc_feature (202)..(202): Xaa can be any naturally occurring amino acid
  misc_feature (212)..(212): Xaa can be any naturally occurring amino acid
  Transcript Sequence Number=SeqID_14868
  Gene Ontology: Mol. function=nucleotide binding; Biological process =defense response
  Homolog annotation: Hit_ID=Q9XEQ9; Match level="QueryCoverage=95%, HitCoverage=16%, E-value=4e-41, Identity=47%"; Hit description =Disease resistance protein RPM1 homolog
KLPLLQPKLTALMGEXEYKAQKGLFRDIAFLRDELSSMNVLLEKLAGVETLDPQVREWRNQVREMAYDIEDYIDSHMFQLHCELGKPSGAKEFFRRRVRKVDFGAXREIAGQIQEIKARIIVASQRHDRYKVDEVAVGSGSANVVSIDPRLPALYVEAANLVGIDGPREDLIKLVTDEELSVRVVSIVGFGGSGXTVANQVXKNGGQFKCQXFVSVSLNPDIRKILWYS

SEQ ID NO: 80843 - protein, 151 aa, Setaria italica
  misc_feature (128)..(128): Xaa can be any naturally occurring amino acid
  Transcript Sequence Number=SeqID_14869
  Gene Ontology: Mol. function=ATP-dependent helicase activity; Cellular component=intracellular; Biological process=RNA processing
  Homolog annotation: Hit_ID=Q01HF5; Match level="QueryCoverage=99%, HitCoverage=9%, E-value=2e-63, Identity=76%"; Hit description =OSIGBa0157K09-H0214G12.2 protein
  Pfam annotation: Domain name=Ribonuclease_3; Domain location=1-130; Score=85.9; E_value=1.4e-22; Accession=PF00636.18; Description =RNase3 domain
RFEVLGDAFLKYVGTPINFISYEGLDEDQLTRRRSDIVNNSNLYELSIRRNLQVYIRDQQFEPTQFYALGRPCKVVCNPETEASLHPKNIDPDKRDNCNLRCTKSHHWLHRKTIADVVESLLGAFYVXESGFKAAFAFLNWMGINVDFKDD

SEQ ID NO: 80844 - protein, 117 aa, Setaria italica
  Transcript Sequence Number=SeqID_14870
  Homolog annotation: Hit_ID=O23345; Match level="QueryCoverage=72%, HitCoverage=17%, E-value=3e-18, Identity=49%"; Hit description =Hydroxyproline-rich glycoprotein homolog
  Pfam annotation: Domain name=Frigida; Domain location=10-116; Score= -124.9; E_value=0.064; Accession=PF07899.3; Description=Frigida-like protein
SADKGAAPAAAAAGADADGLAEGLRTLCARMDSAAFLGFVVARRKEADALRAEMPPALKLCVDPAKFVMDAVAGVFPVDRREVRSPADLAWACVLILEAAVPALADPGPEIGAARPL

SEQ ID NO: 80845 - protein, 138 aa, Setaria italica
  Transcript Sequence Number=SeqID_14871
PIYMHCPHCKMSERKEHQDVKFAGAVSQLQRIFIVTPDFPVLLASCPLVQFEGSCLPSNVSDHEREGLFSIGCRVILPPESFLTMRLPFVYSVETKEGSTFPLKHFEQQPELTAWLVGGTALQIVSIGNATEKETIMK

SEQ ID NO: 80846 - protein, 55 aa, Setaria italica
  Transcript Sequence Number=SeqID_14872
AVDSSSDAGSRSWRLPNEHQHYQEQSSPAPHDSQRAQETARSPWGQDRHNLSHRY

SEQ ID NO: 80847 - protein, 355 aa, Setaria italica
  Transcript Sequence Number=SeqID_14873
TRFRATSSIPTQGFFCSLYQAHISYLIGKNHFVEAQAVFDGKVKPLLDQEKDDMYKPFDLEARVQMLRNCVYNCLPLAAAADEDMNVVLADYLMLYFPTSLQNEAKRTNSISDFLVTFNDKKGKRHRCLACQWVMSASARSIEYHIKHSKQINCCRRVTKWMLEYLADVMNEKEISIQDMTAASSGIQLRKRKAPFSPRSTVLDLDQQFPIPGKHAFEIWKDLNASNMLALYALMKGKSKSTAAAKAKEILFCQEKLINELKRLFLSPTDKHVPLGSLAFMKIKALLNLSDDLLPLLKNLPDASELLLDQDKKVTELRRCFMVAAAERLPPTTPVDVTSPSTDSSESVSSKLCLL

SEQ ID NO: 80848 - protein, 187 aa, Setaria italica
  misc_feature (100)..(100): Xaa can be any naturally occurring amino acid
  misc_feature (107)..(107): Xaa can be any naturally occurring amino acid
  Transcript Sequence Number=SeqID_14874
  Gene Ontology: Mol. function=metal ion binding; Cellular component =integral to membrane; Biological process=ubiquitin-dependent protein catabolic process
  Homolog annotation: Hit_ID=B6T0C5; Match level="QueryCoverage=85%, HitCoverage=67%, E-value=3e-56, Identity=68%"; Hit description=RING finger protein 5
  Pfam annotation: Domain name=zf-C3HC4; Domain location=49-89; Score =31.8; E_value=2.7e-06; Accession=PF00097.17; Description=Zinc finger, C3HC4 type (RING finger)
  Subcellular localization annotation: CTP_CleavageSite=26; ConfidenceScore=5.04e-01
DRIRFSSPPDSISPRRANIIPRTPNMAANVGESTSGSSSGADAGGSFECNICFELPQEPIVTLCGHLFCWPCLYKWLRIHSHSPECPVCKAVVEEDKLVXPLYGRGXKDRVDPRSKNVPGADIPNRPAGQRPATAPQADPNNHFPNANPNPWFMGGGIPLANARWGNYTFSAAFGGLFPLLSFQGRQ

SEQ ID NO: 80849 - protein, 255 aa, Setaria italica
  Transcript Sequence Number=SeqID_14875
  Gene Ontology: Mol. function=metal ion binding
  Homolog annotation: Hit_ID=B6T0C5; Match level="QueryCoverage=90%, HitCoverage=100%, E-value=2e-68, Identity=58%"; Hit description=RING finger protein 5
  Pfam annotation: Domain name=zf-C3HC4; Domain location=48-88; Score =31.8; E_value=2.7e-06; Accession=PF00097.17; Description=Zinc finger, C3HC4 type (RING finger)
MPIFIVVNQRWQLLVANIIPRTPNMAANVGESTSGSSSGADAGGSFECNICFELPQEPIVTLCGHLFCWPCLYKWLRIHSHSPECPVCKAVVEEDKLVPLYGRGKDRVDPRSKNVPGADIPNRPAGQRPATAPQADPNNHFPNANPNPWFMGGGIPLANARWGNYTFSAAFGGLFPLLSFQVHGFPDATAYGQPAGFPYGYGHGHGHAFHGGHAGHAHAAAPRHGPHGQQQQADVYLKALLILVGFLVIASLITF

SEQ ID NO: 80850 - protein, 110 aa, Setaria italica
  Transcript Sequence Number=SeqID_14876
FKKIKLVWLFYSWHGLFCWIILQSCHCSMVQKFALLIRRTLRATRAMSSGRDECIKIMPPPAEFDWASRCNHLFQCFTTFPIELIHHAIGTVGQFIIICTFLKFIQVRFA

SEQ ID NO: 80851 - protein, 430 aa, Setaria italica
  Transcript Sequence Number=SeqID_14877
  Gene Ontology: Mol. function=catalytic activity; Cellular component =plasma membrane
  Homolog annotation: Hit_ID=B6TFE7; Match level="QueryCoverage=96%, HitCoverage=96%, E-value=0.0, Identity=86%"; Hit description=Protein phosphatase 2C-like
  Pfam annotation: Domain name=PP2C; Domain location=39-291; Score =108.9; E_value=1.7e-29; Accession=PF00481.13; Description=Protein phosphatase 2C
MATAARETRLLPPPLPLATLIGRELRAAGSERPTLRYGHAGFAKRGEDYFLVKPDCLRVPGDPSSAFSVFAVFDGHNGVSAAVYSKEHLLEHVISALPPDIGRDDWLQALPRALVAGFVKADIDFQRKGEVSGTTATLVVIDGFTVTVASVGDSRCILDTQGGELQLLTVDHRLEENAEERERVTASGGEVGRLNLFGGQEVGPLRCWPGGLCLSRSIGDTDVGEFIVPIPHVKQVKLSNAGGRLIIASDGIWDALSNEAAAKACRGLPAELAAKLVVKQALKTSGLKDDTTCVVVDIIPSDHLTSPQLSPKKNQNKLKSLFRRRSHSSVGKLGGKSASIGSVEELFEEGSAMLEERLGRNLSLKAASPPFRCAICQVDQEPFEGLMTDNGDGYCSSPYAPWGGPHLCLDCRKKKDAMEGKRSSRSTACR

SEQ ID NO: 80852 - protein, 375 aa, Setaria italica
  Transcript Sequence Number=SeqID_14878
  Gene Ontology: Mol. function=metal ion binding; Cellular component =nucleus
  Homolog annotation: Hit_ID=Q10J83; Match level="QueryCoverage=75%, HitCoverage=31%, E-value=2e-96, Identity=58%"; Hit description=JmjC domain containing protein, expressed
  Pfam annotation: Domain name=JmjC; Domain location=117-228; Score =39.3; E_value=1.6e-08; Accession=PF02373.14; Description=JmjC domain
YIAYGFNQELGRGDSVTKLHCDMSDAVNILTHTAEVPDETYPPKKIEKIRKKMKEQDLQELYGGLESSTEHNLPPTSTDSQNITVDETTKTSCHDGLDTNALPPIDTEGDVEDKPPSHESKESGKHERTGGALWDIFRREDSDKLQGYLKKHASEFRHIHCNPVKQVIHPIHDQTFYLTEEHKRKLKEEYGVEPWTFEQKLGEAVFIPAGCAHQVRNLKSCIKVAMDFVSPENVDECIKLTEEFRRLPSGHRAKEDKLEIKKIALHALNQVVNFLDVSSDGLKSGAGQPKNKDEAGAEAEAEDEKKPKRRGGHQRRKVKSEGRSHDKAVDKKPKGQGGRRRGELKSKDVKANGNAAVEKPPKRRSGHLKGSGDSR

SEQ ID NO: 80853 - protein, 156 aa, Setaria italica
  misc_feature (67)..(67): Xaa can be any naturally occurring amino acid
  Transcript Sequence Number=SeqID_14879
  Gene Ontology: Mol. function=metal ion binding; Cellular component =nucleus
  Homolog annotation: Hit_ID=Q10J83; Match level="QueryCoverage=94%, HitCoverage=10%, E-value=5e-32, Identity=52%"; Hit description=JmjC domain containing protein, expressed
KLEQCPDRSNEVNTSHKTHNGCHFSSDDIGMGQHGKRFRGGTLNEVGTESQEEKPEKVDCNGTDKKXISKGIQEKAVVGEGSEQQNTGGALWDIFRREDSEKLQDYLRKHSSEFRHIHCNPVKQVIHPIHDQTFYLTAEHKRKLKEEYAGTLTNAS

SEQ ID NO: 80854 - protein, 167 aa, Setaria italica
  misc_feature (14)..(14): Xaa can be any naturally occurring amino acid
  misc_feature (111)..(111): Xaa can be any naturally occurring amino acid
  Transcript Sequence Number=SeqID_14880
  Gene Ontology: Mol. function=metal ion binding; Cellular component =nucleus
  Homolog annotation: Hit_ID=Q10J83; Match level="QueryCoverage=92%, HitCoverage=14%, E-value=5e-76, Identity=83%"; Hit description=JmjC domain containing protein, expressed
WETIKLMWRALREXKTNGNIEDENFAVRAIDCLDWNEVEINIHMFFVGYTRGRTHPTTHWPEMLKLKDWPPSSSFDQRLPRHGAEFISALPFPEYTDPRYGPLNLAVKLPXGALKPDLGPKTYIAYGFNQELGRGDSLTKLHCDMSDAVNILIHRKVPDDLVLSFSF

SEQ ID NO: 80855 - protein, 318 aa, Setaria italica
  Transcript Sequence Number=SeqID_14881
  Gene Ontology: Mol. function=carbohydrate binding; Biological process= carbohydrate metabolic process
  Homolog annotation: Hit_ID=B9RE17; Match level="QueryCoverage=97%, HitCoverage=98%, E-value=1e-142, Identity=76%"; Hit description =Aldose 1-epimerase, putative
  Pfam annotation: Domain name=Aldose_epim; Domain location=26-301; Score=267.6; E_value=3e-77; Accession=PF01263.12; Description=Aldose 1-epimerase
MSMGRFANSTDPRSGLEVVRDWNGVAQVVLRSPKGASARVSLHGGQVVSWRNDHGEELLFTSSKAIFKPPNAMRGGIQMCFPQFGYSGTLERHGFARNRIWALDDEHPPINHNDNASKVSVDLILKPSEDDLKCWPHCFEFRLRVSLSKVGDLSLISRIRNVNGKPFSFSFAYHTYLSVSDISEVRIEGLETLDYLDNLSHKERFTEQGDAITFESEVDRVYVSSPNVVAVLDHEKKQSFVIKKEGLPDVVVWNPWEKKSKTMVDFGDEEYKQMLCVDAAAVERAITLKPGEEWTGKLELSAVSSTNCSDHLDHPVSI

SEQ ID NO: 80856 - protein, 346 aa, Setaria italica
  misc_feature (340)..(340): Xaa can be any naturally occurring amino acid
  Transcript Sequence Number=SeqID_14882
  Homolog annotation: Hit_ID=Q9CAC4; Match level="QueryCoverage=32%, HitCoverage=15%, E-value=1e-18, Identity=48%"; Hit description=IFA -binding protein
  Pfam annotation: Domain name=DUF593; Domain location=163-256; Score =186.1; E_value=9.9e-53; Accession=PF04576.7; Description=Protein of unknown function, DUF593
AVEVGDSTAEEDHIFVPHVSETVSEDDRTAEVDTNCEVSIGSDICEREQDDHVVPFQDLATHEEQVAPLAGADDQPSPLEILASTEQEAGEAEQEEMTTNTGSDYQPNEQNEVEEDKAPETPTNGVAAQLSDRMFLLERKRSLSLSLDGSVASEMEGGEPSTVDQLKSALQAERKALGALYAELEEERSAAAIAASQTMAMINRLQEEKAAMQMEALQYQRMMEEQSEYDQEALQLLNELVTKREREKQELERELELFRQKVQRYEDKERRRMASFKANGGSPSGSGSGTSVSSSGEDSDGHSDDYCELGESPDGGNIQMSSSDAALSSMRDPDSTKHLXVALDDS

SEQ ID NO: 80857 - protein, 89 aa, Setaria italica
  Transcript Sequence Number=SeqID_14883
  Gene Ontology: Cellular component=plasma membrane
QLEHELVGRIQLYINYTTAADENNMKYGSVAETVAYDIVLEVAMKAQHIQQRNLVVQGSWKWLLTEFALYYGVSDAYTKLRYLSYIMDV

SEQ ID NO: 80858 - protein, 404 aa, Setaria italica
  Transcript Sequence Number=SeqID_14884
  Gene Ontology: Cellular component=plasma membrane
  Subcellular localization annotation: CTP_CleavageSite=50; ConfidenceScore=5.55e-01
LVSEGAASKPKKTIGKMKVQVRKVRMSVDMPSGCNFSSLPVVKLDSVRYRLSNVQSTLSSGWESVRRVRVLPQLPANSSFSKHSLAYMQASAQYIKQVSGLLKVGVTTLRSNSSYEAPQETYSCQLRLKSLPEDDVVPMQPGSGETHVFFPDSLGDDLIIDVADSKGKPCGRVVAQVATMAEDPTDKLRWWSIFREPEHELVGRIQLYINYTTAADENNMKYGSVAETVAYDIVLEVAMKAQHIQQRNLVVQGSWKWLLTEFALYYGVSDAYTKLRYLSYIMDVATPTADWLNLVHELLLPILMKNHGTAALSHQENRILGEVEEQIEQTLAMVFENYKSLDESIPSGLAEEFRPPTGLAATALEPAIKLYSLLHDVLSPEAQLRLCGYFQAAARKRSRRHMLE

SEQ ID NO: 80859 - protein, 282 aa, Setaria italica
  Transcript Sequence Number=SeqID_14885
  Gene Ontology: Mol. function=hydrolase activity
  Homolog annotation: Hit_ID=B4FNJ4; Match level="QueryCoverage=100%, HitCoverage=78%, E-value=1e-138, Identity=89%"; Hit description =Catalytic/ hydrolase
  Pfam annotation: Domain name=Abhydrolase_1; Domain location=24-243; Score=64.6; E_value=3.6e-16; Accession=PF00561.12; Description =alphabeta hydrolase fold
  Pfam annotation: Domain name=Abhydrolase_3; Domain location=31-231; Score=-88.3; E_value=0.066; Accession=PF07859.5; Description =alphabeta hydrolase fold
  Pfam module annotation: Pfam domain module=Abhydrolase_1::Abhydrolase_ 3; Domain location=24-243::31-231
LHGFGATATWQWAPFLRPLLAAGLAPYVPNLIFFGASASPAADRSPAYQAACIAAAMTALPSAPQRYAVVGVSYGGFVAYHLAHAFPEAVERLVLIAAGVCLEEADLAAGLFAVEDIAEAASLLLPQRPEDLRRLVGLTFCRPPRFMPSCFIRDYIRVMCTENVKEKTELLYVLINGRKLSDLPKISQQTLIIWGEQDRVFPLELGLRLKRHLGDTSELIVVKDAGHAINREKPAELCRLIKNYIVDPSVKYRDDRKGSWKNAIKRFVGSSLRKVDSSRPLL

SEQ ID NO: 80860 - protein, 97 aa, Setaria italica
  Transcript Sequence Number=SeqID_14886
  Gene Ontology: Mol. function=protein kinase activity; Biological process=protein amino acid phosphorylation
  Homolog annotation: Hit_ID=Q7F0A0; Match level="QueryCoverage=97%, HitCoverage=19%, E-value=9e-20, Identity=59%"; Hit description =Serine/threonine protein-like protein
  Subcellular localization annotation: CTP_CleavageSite=85; ConfidenceScore=5.20e-01
SNCKSNTGIVANSDAKCMDVKPISGSVKSNYAIKATVKSNTGIVANSDAKNTDVQTNTGSVVSEDNSVDTKPNIGRVAASIQRLESSMSKVQIGRYR

SEQ ID NO: 80861 - protein, 393 aa, Setaria italica
  misc_feature (169)..(169): Xaa can be any naturally occurring amino acid
  misc_feature (341)..(341): Xaa can be any naturally occurring amino acid
  Transcript Sequence Number=SeqID_14887
  Gene Ontology: Mol. function=protein kinase activity; Cellular component=cytoplasm; Biological process=protein amino acid phosphorylation
  Homolog annotation: Hit_ID=Q7F0A0; Match level="QueryCoverage=78%, HitCoverage=83%, E-value=1e-117, Identity=58%"; Hit description =Serine/threonine protein-like protein
  Pfam annotation: Domain name=Pkinase; Domain location=33-243; Score= -36.9; E_value=2.7e-06; Accession=PF00069.17; Description=Protein kinase domain
DLKLENVLLVSTIDPSKDPIRSGLKPNLEKPEGNPNGEVGLNPIEKKLKMRARRVLAKLAEKRKSVVESSRSERSLDGIDLTCKIVDFGNACWADKQFTDFIQTRQYRAPEIILGAGYSFSVDMWSFACIAFELATGEMLFTPKEGHGYSEDEDHLALMMELLGKMPKXIATMGTRSKEYFDRHGDLKRIRRLKLSSVERILVDKYKISESDAREFANFLCPLLDFAPEKRPTAAECLKHPWLQYDEDKTCEPHNNNDAQSTGNTTSGACTNIDVTDKKGSLTGSCNKTADAKHNNSNITNNASMSTDVQPNIGSIANRLAKNADVNLNIGSITNRDAENXIKPHIGSIANSDAKSSSLKLDTGNTTNKKSKTIDTKPNTGSISSRDEKSSNV

SEQ ID NO: 80862 - protein, 267 aa, Setaria italica
  Transcript Sequence Number=SeqID_14888
  Gene Ontology: Mol. function=aspartic-type endopeptidase activity; Cellular component=cell wall; Biological process=xylan catabolic process
  Homolog annotation: Hit_ID=Q5TMB2; Match level="QueryCoverage=96%, HitCoverage=63%, E-value=1e-53, Identity=47%"; Hit description =Xylanase inhibitor TAXI-IV
RPGHGGVAPKKLLARLPRDASGVAGLAASGLALPAQRVAGKFTLCLPRQGEGVAIFGGGPLFLLPESAAGDLTTTLAFTPLRSRRDNPSYYLPVKAIAVDKAPVQLPKDALATGGVVLGTTAPYTALRPDVYRQFVDAFDKALTRQWNTTKKVPAVAPFEFCYDSKTLPGPTRIGWLVPDIDLVLEGGKTNWTFGGLSSMVDVNDFTAACLGFVEMKKGGYGGAPAVVIGGFQMENHVLQFDLEKRRLGFARVPIFTSCSNFNFTRN

SEQ ID NO: 80863 - protein, 98 aa, Setaria italica
  Transcript Sequence Number=SeqID_14889
  Homolog annotation: Hit_ID=B9RNU1; Match level="QueryCoverage=77%, HitCoverage=15%, E-value=6e-15, Identity=53%"; Hit description =Transporter, putative
DVIPVAGYRRRPYFVLAGVVGVSSMLMLSMHRGLGIMSALLALTAQSAGAAIADVTVDAVVAQNSITHEALASDMQSLCGFSSSLGALLGFSISGLLV

SEQ ID NO: 80864 - protein, 390 aa, Setaria italica
  misc_feature (19)..(19): Xaa can be any naturally occurring amino acid
  misc_feature (146)..(146): Xaa can be any naturally occurring amino acid
  Transcript Sequence Number=SeqID_14890
  Homolog annotation: Hit_ID=B6U0H9; Match level="QueryCoverage=98%, HitCoverage=74%, E-value=1e-162, Identity=80%"; Hit description =Biopterin transport-related protein BT1
  Pfam annotation: Domain name=BT1; Domain location=3-388; Score=492.0; E_value=8.1e-145; Accession=PF03092.8; Description=BT1 family
TIKLYSGFSSLPWLIKPLXYGFISDSIPLFGYRRRSYLFLSGLLGALSWSLMATVVSSKYSAASSILLGSLSVAFSDVVVDSMVVERARGESQSTSGSLQSLCWGSSAFGGIVSAYFSVHLWILTEFVFGVTAFLPLMTSAVAVLXNEHRMPFGERTILLSGSGFVESSKQHVRQLWTSVKQPSIFLPTLFIFLWQATPQSDSAMFFFITNKLGFTPEFLGRVKLVTSIASLLGVGIYNYFLKEIPLRKIFLVTTIIGSALGMTQVLLVTGLNRQFGISDEWFSIGDSLIITVLSQASFMPVLVLAAKLCPPGMEATLFATLMSISNAGSVTGGLVGAGLTKVFGVTRDTFGNLPLLIVVCNLSSLLPLPLLGLLPEESGDTNNGETKHN

SEQ ID NO: 80865 - protein, 105 aa, Setaria italica
  Transcript Sequence Number=SeqID_14891
RALVVGRALGPSGLVAGNDRRRRCMNAKALRGVARRGPHGDRAPASMCAAVACKGRVFEPSLRKILKSNLKFFKYKTCSNFRLQTLQKLQVQNLARFGDKHVQTL

SEQ ID NO: 80866 - protein, 146 aa, Setaria italica
  Transcript Sequence Number=SeqID_14892
  Gene Ontology: Mol. function=sugar binding; Biological process =protein amino acid phosphorylation
  Homolog annotation: Hit_ID=Q7XQT3; Match level="QueryCoverage=95%, HitCoverage=17%, E-value=4e-33, Identity=55%"; Hit description =OSJNBa0043L09.14 protein
  Pfam annotation: Domain name=S_locus_glycop; Domain location=1-127; Score=99.2; E_value=1.4e-26; Accession=PF00954.12; Description=S -locus glycoprotein family
LDGNATIYRCGPWNGRSFSGVTEALGNTYTDLLTLGVTISPGEISYSYTSKPGAALTRLVVTDDGKVNRVVWDTSSRGWTHQPIFQGPRDPCDDYGKCGSFGLCDVSSVLSFCGCLRGFSPASPSAWSRDTSGCRRNVKLQCSSNG

SEQ ID NO: 80867 - protein, 117 aa, Setaria italica
  Transcript Sequence Number=SeqID_14893
  Gene Ontology: Mol. function=protein serine/threonine kinase activity; Biological process=protein amino acid phosphorylation
  Homolog annotation: Hit_ID=Q53P17; Match level="QueryCoverage=92%, HitCoverage=36%, E-value=1e-14, Identity=38%"; Hit description =Protein kinase domain
ATENFSDGKKIGSGVFCAVYKGVLQDGKVVAIKKLDNSVVIDDNNRLYDEINVFVDLKHKNITRPLGYCHEVIMVLTSLDAKYVRAEHREFCFVEEYMENGSMDKIMNGSRFVVGPA

SEQ ID NO: 80868 - protein, 100 aa, Setaria italica
  misc_feature (12)..(12): Xaa can be any naturally occurring amino acid
  Transcript Sequence Number=SeqID_14894
  Gene Ontology: Mol. function=4-coumarate-CoA ligase activity; Biological process=phenylpropanoid metabolic process
  Homolog annotation: Hit_ID=B3TNC2; Match level="QueryCoverage=100%, HitCoverage=18%, E-value=6e-35, Identity=74%"; Hit description=4 -coumarate:CoA ligase
HEIHRQAAAAGXRVIVTEACAVEKVRAFAAERGVPVVAVDGEFEGCLRLRDLMDAAEPLAADEEVEPDDVVALPYSSGTTGMPKGVMLTLVTRLRCVRQQ

SEQ ID NO: 80869 - protein, 152 aa, Setaria italica
  misc_feature (97)..(97): Xaa can be any naturally occurring amino acid
  Transcript Sequence Number=SeqID_14895
  Gene Ontology: Mol. function=4-coumarate-CoA ligase activity; Biological process=phenylpropanoid metabolic process
  Homolog annotation: Hit_ID=Q6ETN3; Match level="QueryCoverage=76%, HitCoverage=20%, E-value=3e-57, Identity=94%"; Hit description =Probable 4-coumarate--CoA ligase 3
RYWYWSCLLLGCIIWFIVCIDNDEIFIVDRLKEIIKYKGFQVPPAELEALLITHPEIKDAAVVSMKDELAGEVPVAFIIRTEDSEISEDEIKQFVAXKEVVFYKRINKVFFTDSIPKNPSGKILRKDLRARLAAGIPGGDSRQQYQKAKARY

SEQ ID NO: 80870 - protein, 194 aa, Setaria italica
  misc_feature (100)..(100): Xaa can be any naturally occurring amino acid
  misc_feature (107)..(107): Xaa can be any naturally occurring amino acid
  Transcript Sequence Number=SeqID_14896
  Gene Ontology: Mol. function=4-coumarate-CoA ligase activity; Biological process=phenylpropanoid metabolic process
  Homolog annotation: Hit_ID=B3TNC2; Match level="QueryCoverage=94%, HitCoverage=33%, E-value=1e-45, Identity=55%"; Hit description=4 -coumarate:CoA ligase
MGSVPEDSAAAPTAVFRSKLPDIEIPGHLSLQAYCFERLPEVSSRPCLIDGQTGAVHTYADVELLSRRAAAALRGLGGGEGRRGDEPPPQLPPVRLLVPXARRGWAXATTTANPFYTPHEIHRQAEAAGARLIVTEACAVEKVRGFAAERGIPVVTVDGKFEGCVEFDEVIGAEELEADADVQPRTNVRTTTRP

SEQ ID NO: 80871 - protein, 451 aa, Setaria italica
  misc_feature (257)..(257): Xaa can be any naturally occurring amino acid
  Transcript Sequence Number=SeqID_14897
  Gene Ontology: Mol. function=4-coumarate-CoA ligase activity; Biological process=phenylpropanoid metabolic process
  Homolog annotation: Hit_ID=Q6ETN3; Match level="QueryCoverage=94%, HitCoverage=95%, E-value=1e-123, Identity=82%"; Hit description =Probable 4-coumarate--CoA ligase 3
  Pfam annotation: Domain name=AMP-binding; Domain location=65-377; Score=174.8; E_value=2.5e-49; Accession=PF00501.20; Description=AMP -binding enzyme
MGSMDESAAAVSVPVSEEKPVVFRSKLPDIEINNSQSLQAYCFGKMGEVAARPCLIDGQTGESYTYAEVESLTRRAASGLRRMGVGKGDVVMNLLRNCPQFAFSFLGAARLGAATTTANPFYTPHEIHRQAEAAGARLIVTEACAVEKVRGFAAERGIPVVTVDGKFEGCVEFDEVIGAEELEADADVHPDDVVALPYSSGTTGLPKGVMLTHRSLITSVAQQVDGENPNLYFSKDDVLLCLLPLFHIYSLNSVLLXGLRAGSAIVIMRKFDLGALVDLVRRHRITIAALGRNQPGEILIRGVQIMKGYLNDPESTKNTIDKDGWLHTGDIGYVDDDDEIFIVDRLKEIIKYKGFQVKEHLRRTLLITHPEIKDAAVVSMKDDLAGEIPVAFIVRTEGSELTEDEIKQFVAKEVVFYKKIHKVFFTDSIPKNPSGKILRKDLRARLAAGVH

SEQ ID NO: 80872 - protein, 139 aa, Setaria italica
  Transcript Sequence Number=SeqID_14898
  Gene Ontology: Mol. function=4-coumarate-CoA ligase activity; Biological process=phenylpropanoid metabolic process
  Homolog annotation: Hit_ID=B3TNC2; Match level="QueryCoverage=100%, HitCoverage=24%, E-value=4e-69, Identity=92%"; Hit description=4 -coumarate:CoA ligase
KDGWLHTGDIGYVDDNDEIFIVDRLKEIIKYKGFQVPPAELEALLITHPEIKDAAVVSMKDELAGEVPVAFIIRTEDSEISEDEIKQFVAKEVVFYKRINKVFFTDSIPKNPSGKILRKDLRARLAAGIPGGDSAQSKS

SEQ ID NO: 80873 - protein, 262 aa, Setaria italica
  Transcript Sequence Number=SeqID_14899
  Gene Ontology: Mol. function=double-stranded RNA binding; Cellular component=intracellular
  Homolog annotation: Hit_ID=Q5N889; Match level="QueryCoverage=100%, HitCoverage=50%, E-value=1e-138, Identity=89%"; Hit description=C -terminal domain phosphatase-like protein
PPNPSLHRLYLTCFSEYKSAVVVVGDEELHLVAMPTKLDKGPCFWCCSARSGLYASSVGMLNLRCLAIVFDLDETLIVANTMKSFEDRIEMLSRRMDVEDDPVRIAGMSAEIKRYIEDKELLKEFIDTDTVTDNGKIVGTRKEEVQPVSGGQERVFRPVIRLPDRNAILTRINPEIRDTSVFVKLRPAWEDLRSYLTAKGRKRFEVYVCTMAERDYALEMWRLLDPEGNLISPQQLSERVNCVKSGSKKSLQNVFRDRGCHP

SEQ ID NO: 80874 - protein, 81 aa, Setaria italica
  Transcript Sequence Number=SeqID_14900
  Homolog annotation: Hit_ID=B6SZY5; Match level="QueryCoverage=61%, HitCoverage=36%, E-value=5e-15, Identity=72%"; Hit description =Senescence-associated protein DIN1
IFRMREDFDKGHAPGSRNVPYYLSVTPQGKEKNPQFEEEVASLFGKDDVFIVVGYYLHQSYILILVISITQVWFGQLRLVI

SEQ ID NO: 80875 - protein, 131 aa, Setaria italica
  Transcript Sequence Number=SeqID_14901
  Gene Ontology: Mol. function=thiosulfate sulfurtransferase activity; Cellular component=chloroplast
  Homolog annotation: Hit_ID=B6U6J1; Match level="QueryCoverage=81%, HitCoverage=93%, E-value=4e-38, Identity=67%"; Hit description =Senescence-associated protein DIN1
  Pfam annotation: Domain name=Rhodanese; Domain location=19-122; Score= 51.8; E_value=2.7e-12; Accession=PF00581.12; Description=Rhodanese -like domain
MASADTSSSDKEQVIPAIDADQAHALLSSGHGYIDVRMREDFDKGHAPGSRNVPYYLSVTPQGKEKNPQFEEEVASLFGKDDVFIVGCNTGNRSRFATADLLNAGFKNARNLQGGYRSFLQSANQQPAQQQ

SEQ ID NO: 80876 - protein, 120 aa, Setaria italica
  Transcript Sequence Number=SeqID_14902
WKGKRATRSLRWWMQGRKGGGEIGREGKGADTGRGILGSSCLFLDARRGGGDDGDDESTTRRPLRVLDGSGRLRASGVTAEPVRDPTRRPATHRPPLGWLAATPFLSFPPAEIASFSLLF

SEQ ID NO: 80877 - protein, 188 aa, Setaria italica
  misc_feature (148)..(148): Xaa can be any naturally occurring amino acid
  misc_feature (177)..(177): Xaa can be any naturally occurring amino acid
  Transcript Sequence Number=SeqID_14903
  Gene Ontology: Mol. function=protein tyrosine kinase activity; Biological process=protein amino acid phosphorylation
  Homolog annotation: Hit_ID=A5JS87; Match level="QueryCoverage=100%, HitCoverage=22%, E-value=4e-57, Identity=59%"; Hit description =Stress-induced receptor-like kinase 1
  Pfam annotation: Domain name=S_locus_glycop; Domain location=32-157; Score=20.6; E_value=1.3e-06; Accession=PF00954.12; Description=S -locus glycoprotein family
VSKKSLIDPGFGSYSIELSIDGALRLASRSSPSVVYWSWTSGGLAQLVKALDGLMDSDPRTKGLLKPTYQDNDEEVYFSYTITNESASVFVPIDISGQLKLNVWSQAKETWETVYAQPSDFCIAPAVCGPFAVCNSNSRPLFCDCMEXYSQKSPLDWELGDRRGGCARNTPLHCITXQQSQTSSTDVF

SEQ ID NO: 80878 - protein, 89 aa, Setaria italica
  Transcript Sequence Number=SeqID_14904
  Gene Ontology: Mol. function=protein binding
  Homolog annotation: Hit_ID=B6T176; Match level="QueryCoverage=100%, HitCoverage=33%, E-value=1e-39, Identity=86%"; Hit description=LAP4 protein
MSSSICNLVCLKSLSLNGNKIRQLPENILKDCTALQNLSLHDNPIMRDQFQQMEGFNEFEARRRKKFDKQIDSRVMLGSTALDEGVDFH

SEQ ID NO: 80879 - protein, 191 aa, Setaria italica
  Transcript Sequence Number=SeqID_14905
  Gene Ontology: Mol. function=protein binding; Cellular component =cytoplasm
  Homolog annotation: Hit_ID=B6T176; Match level="QueryCoverage=100%, HitCoverage=72%, E-value=2e-91, Identity=89%"; Hit description=LAP4 protein
  Pfam annotation: Domain name=LRR_1; Domain location=112-133; Score =9.4; E_value=4.7; Accession=PF00560.25; Description=Leucine Rich Repeat
  Pfam annotation: Domain name=LRR_1; Domain location=135-156; Score =14.0; E_value=0.63; Accession=PF00560.25; Description=Leucine Rich Repeat
  Pfam annotation: Domain name=LRR_1; Domain location=158-180; Score =13.2; E_value=0.91; Accession=PF00560.25; Description=Leucine Rich Repeat
  Pfam annotation: Domain name=LRR_1; Domain location=20-41; Score =15.5; E_value=0.22; Accession=PF00560.25; Description=Leucine Rich Repeat
  Pfam annotation: Domain name=LRR_1; Domain location=43-64; Score=9.8; E_value=4; Accession=PF00560.25; Description=Leucine Rich Repeat
  Pfam annotation: Domain name=LRR_1; Domain location=66-87; Score =14.2; E_value=0.53; Accession=PF00560.25; Description=Leucine Rich Repeat
  Pfam annotation: Domain name=LRR_1; Domain location=89-110; Score =12.5; E_value=1.2; Accession=PF00560.25; Description=Leucine Rich Repeat
  Pfam module annotation: Pfam domain module=LRR_1::LRR_1::LRR_1::LRR _1::LRR_1::LRR_1::LRR_1; Domain location=112-133::135-156::158 -180::20-41::43-64::66-87::89-110
ALRDARLKELPNEVLQVGNSLRTLDLTNNKLVEIPQEVGGLVNMQRLVLAGNLIENIPANIGYLRNLKILTLDRNRISILPEELGSLSNLQQLSISHNSLMCLPKSVGDLRNMLILNVSDNKLKELPESIGGCNSLEELQANGNSIEDVPSSICNLVCLKSLSLNGNKIRQLPENILKDCTALQNLSLHDN

SEQ ID NO: 80880 - protein, 78 aa, Setaria italica
  Transcript Sequence Number=SeqID_14906
  Gene Ontology: Mol. function=protein binding
  Homolog annotation: Hit_ID=B6T176; Match level="QueryCoverage=67%, HitCoverage=22%, E-value=5e-13, Identity=67%"; Hit description=LAP4 protein
DRNRISILPEELGSLSNLQQLSISHNSLMCLPKSVGDLRNVSFLFCSKMPKSFSSFWKCLSTIVKSGHSKNINGYSAY

SEQ ID NO: 80881 - protein, 212 aa, Setaria italica
  misc_feature (168)..(168): Xaa can be any naturally occurring amino acid
  Transcript Sequence Number=SeqID_14907
  Gene Ontology: Mol. function=nucleotide binding; Biological process =defense response
  Homolog annotation: Hit_ID=Q53ML2; Match level="QueryCoverage=97%, HitCoverage=21%, E-value=6e-52, Identity=50%"; Hit description=NB -ARC domain containing protein
  Pfam annotation: Domain name=NB-ARC; Domain location=1-210; Score= -20.1; E_value=4.8e-08; Accession=PF00931.14; Description=NB-ARC domain
KNLDMKKILRSILCQHSCREFGSSEAWDEQQLINTIRQFLKDKRYFIVINDIWSTSAWRTIRCAFPENNCSSRILTTTRIIAVAKYCCSPHHGHVYELKRLGATHSKSLSLKEFLDLKICPLHLKEVSSARSPSTSCLPLAIITIASLLATKARTKEEWEKIWKSIGXVLEKDTDMEDMKKILSLSYNDRPYHLKTCLLYLSVFPEDYEIKR

SEQ ID NO: 80882 - protein, 49 aa, Setaria italica
  Transcript Sequence Number=SeqID_14908
  Homolog annotation: Hit_ID=B4FX20; Match level="QueryCoverage=97%, HitCoverage=10%, E-value=2e-18, Identity=91%"; Hit description=AKIN gamma
DDDLEVVGVVTLRDVISCFIHEPPGYCDSYLASAMENLEGKGAGSVEKS

SEQ ID NO: 80883 - protein, 269 aa, Setaria italica
  Transcript Sequence Number=SeqID_14909
  Gene Ontology: Mol. function=nucleotide binding; Biological process =fatty acid biosynthetic process
  Homolog annotation: Hit_ID=B4FX20; Match level="QueryCoverage=99%, HitCoverage=59%, E-value=1e-127, Identity=83%"; Hit description=AKIN gamma
  Pfam annotation: Domain name=CBS; Domain location=103-240; Score =90.5; E_value=5.8e-24; Accession=PF00571.20; Description=CBS domain
LGEDFYKVLLEQEPFKSTTVQSIVESYHWSPFIPITLDSSMLTVLLLLSKYRLRNVPVIEPDKPVIRNFITQTGVVKGLQECKGRDWFDYISALPLSDLGLPFMSIDEVITVKSDDLILEAFKCMKDNKIGGVPVVEGPKRKLVGSVSIRDIRFLLLRPDLFSNFRQLTIIEFMKTLGSTLPNSGNNCLVKPPPTCAPDTSLGSVIDSIASRITHRIYVVDDDLEVVGVVTLRDVISCFIHEPPGYCDSYLASAMENLEGKGAGSVEKS

SEQ ID NO: 80884 - protein, 250 aa, Setaria italica
  Transcript Sequence Number=SeqID_14910
  Gene Ontology: Mol. function=nucleotide binding; Biological process =fatty acid biosynthetic process
  Homolog annotation: Hit_ID=B4FX20; Match level="QueryCoverage=85%, HitCoverage=47%, E-value=2e-69, Identity=65%"; Hit description=AKIN gamma
  Pfam annotation: Domain name=CBS; Domain location=54-250; Score=10.4; E_value=0.011; Accession=PF00571.20; Description=CBS domain
LHPGPRHGSIQENAEFPSCDAYFEAIQSKKKLPLSLQESLTAAFAQIPVSSFPEVPAGRVIEIHGDTSVLEALRILSENNIRAAPVLNPEPVAPADWQGRYLGVIDYSAIIRWVLENAELASVALSAGSATAAGVGMGAVGAMGVAALGATGPAAVAGLTAAAVGAAVAGGLTAEKGVAKDGLAAADHLGEDFYKVLLEQEPFKSTTVQSIVESYHWSPFIPITLDSSMLTVLLLLFKYGEMPVSLISDW

SEQ ID NO: 80885 - protein, 225 aa, Setaria italica
  Transcript Sequence Number=SeqID_14911
  Gene Ontology: Mol. function=transcription factor activity; Cellular component=nucleus; Biological process=regulation of transcription, DNA-dependent
  Homolog annotation: Hit_ID=O65008; Match level="QueryCoverage=99%, HitCoverage=51%, E-value=1e-106, Identity=84%"; Hit description =Indeterminate spikelet 1 (Fragment)
  Pfam annotation: Domain name=AP2; Domain location=2-52; Score=62.5; E_ value=1.6e-15; Accession=PF00847.12; Description=AP2 domain
  Pfam annotation: Domain name=AP2; Domain location=94-145; Score=55.9; E_value=1.5e-13; Accession=PF00847.12; Description=AP2 domain
  Pfam module annotation: Pfam domain module=AP2::AP2; Domain location =2-52::94-145
SSQYRGVTFYRRTGRWESHIWDCGKQVYLGGFDTAHAAARAYDRAAIKFRGLEADINFSLGDYEDDLKQMRNWTKEEFVHILRRQSTGFARGSSKYRGVTLHKCGRWEARMGQLLGKKYIYLGLFDSEVEAARAYDRAALRFNGREAVTNFEPSSYNAGDSLPDTESEAIVDADAVDLDLRISQPNVQDTKRDNIIVGLQPTYDSPESSNTMTSQPMSSSSLWPM

SEQ ID NO: 80886 - protein, 183 aa, Setaria italica
  misc_feature (12)..(12): Xaa can be any naturally occurring amino acid
  Transcript Sequence Number=SeqID_14912
  Gene Ontology: Mol. function=lipid binding; Cellular component=plasma membrane
  Homolog annotation: Hit_ID=B6TNT1; Match level="QueryCoverage=100%, HitCoverage=37%, E-value=4e-95, Identity=90%"; Hit description=Lipid binding protein
LVISLDGGASWXYQGFINAFEDHIKAAVEKAIPENIVEGAGKLDSFLQGLPRTVSLDDVAALNMTFINDPHYGNSSIEFDINGLITSAVAKTTNLQKHPHLSLSCGVASKMLLLSLDEDVFNSALEVYFKADSMHWVVDKVPDQSLLNTASWKFIIPRLYWNYPNDDMRLNISMTSSPVIRIT

SEQ ID NO: 80887 - protein, 318 aa, Setaria italica
  misc_feature (13)..(13): Xaa can be any naturally occurring amino acid
  Transcript Sequence Number=SeqID_14913
  Gene Ontology: Mol. function=lipid binding; Cellular component=plasma membrane; Biological process=positive regulation of respiratory burst during acute inflammatory response
  Homolog annotation: Hit_ID=B6TNT1; Match level="QueryCoverage=90%, HitCoverage=59%, E-value=1e-143, Identity=85%"; Hit description =Lipid binding protein
  Pfam annotation: Domain name=LBP_BPI_CETP_C; Domain location=54-287; Score=47.6; E_value=4.8e-11; Accession=PF02886.9; Description=LBP BPI  CETP family, C-terminal domain
DHIKAAVEKAIPXNIVEGAGKLDSFLQGLPRTVSLDDVAALNMTFINDPHYGNSSIEFDINGLITSAVAKTTNLHKHPFVGCLSIPAYCLLVLSLDEDVFNSALEVYFKADSMHWVVDKVPDQSLLNTASWKFIIPRLYWNYPNDDMRLNISMTSSPVIRITSEKVGATINADMIIDVVDDKETVPVACISVVVSASGVVETSGNKVYGRVDLDDFSLALKWSKIGNFHMSLIQGVIRVFLNTVCMPYLNSRLGNGFILPVVHGFTLQDVYVLTSAKQLTLCSDVTFTNTSSLASLALLRYREARVPSVLAAKQALAF

SEQ ID NO: 80888 - protein, 174 aa, Setaria italica
  Transcript Sequence Number=SeqID_14914
  Gene Ontology: Mol. function=nucleoside-triphosphatase activity
  Homolog annotation: Hit_ID=B6THD1; Match level="QueryCoverage=85%, HitCoverage=29%, E-value=1e-67, Identity=84%"; Hit description=Cell Division Protein AAA ATPase family
GRRRVQPYGVFGRGGHGVGGGGDHRTLELQFPRQHRDLIHDHYIPHLIAEAARMRLKSRERRLYTNRATGPGDDHHRLWTSHAFSHPSNFDTLAVDPALREEIRADLLRFAARRDHYARVGRAWKRGYLLHGPPGTGKTSLVAAIANLLEFDVYDLELTTVPTNSHLRRLLVST

SEQ ID NO: 80889 - protein, 103 aa, Setaria italica
  Transcript Sequence Number=SeqID_14915
  Gene Ontology: Mol. function=nucleotide binding; Biological process =defense response
  Homolog annotation: Hit_ID=Q8LKP5; Match level="QueryCoverage=96%, HitCoverage=11%, E-value=2e-11, Identity=45%"; Hit description =Putative NBS-LRR resistance protein
KNRDKRLVISGCCPFQLTTRFRIGRGAMEVEFAPGAMLKLKTLRLDFHVRNTMDQSGDFDFHLENLSSLEHVIVHMNCYYAGLREVEDAAASIRKALDLNSQQ

SEQ ID NO: 80890 - protein, 114 aa, Setaria italica
  Transcript Sequence Number=SeqID_14916
  Homolog annotation: Hit_ID=Q00SR9; Match level="QueryCoverage=71%, HitCoverage=26%, E-value=3e-10, Identity=45%"; Hit description =Aminoacylase ACY1 and related metalloexopeptidases (ISS)
LRVVSPETSNAVATDSSVVHRAAGLADNSKWAEFAARVSGEWDGFGAEFTAAGDPVELPENVVPEAYREWGVQVFDWQTQCPTLADPAAPCALHYRLVRLLPTVGCEADAATVH

SEQ ID NO: 80891 - protein, 146 aa, Setaria italica
  Transcript Sequence Number=SeqID_14917
  Gene Ontology: Mol. function=DNA binding; Cellular component=nucleus
MGRGRGRGRKQLSNGRNHEDKGSSGEEVVVPARKRRGRPQKRVAAEKIIEAEVKKLEADDGDEDYVVGAGDGAKLKGSRTEHASAGVGSNKRNRVPKEEEDGSNLDMEENSSSTRSSNDESTRSNGFRQSGSRRKSTPRRAAEAGL

SEQ ID NO: 80892 - protein, 224 aa, Setaria italica
  misc_feature (95)..(95): Xaa can be any naturally occurring amino acid
  Transcript Sequence Number=SeqID_14918
  Gene Ontology: Mol. function=transporter activity; Cellular component= integral to membrane; Biological process=transmembrane transport
  Homolog annotation: Hit_ID=B6U6U2; Match level="QueryCoverage=100%, HitCoverage=35%, E-value=1e-105, Identity=76%"; Hit description =Hexose transporter
SKGRMVEAKRVLQRLRGREDVSGEMAILVEGLGVGKDTRVEEYIIGPDEGLAPHPEKIKLYGPEEGQTWVARPVSGQSALGSAYGLLSQHGSMAXSSMFSVMEQQQAKADWDAESQREGDEYASDHGGDDIEDNLQSPLISRQATSVEGKEIAAPHGSIMGAVGRSSGLMQGGEAVSSMGIGGGWQLAWKWTEREGADGQMEGGFQRIYLHEEGVQGNRGSILS

SEQ ID NO: 80893 - protein, 80 aa, Setaria italica
  misc_feature (35)..(35): Xaa can be any naturally occurring amino acid
  misc_feature (43)..(43): Xaa can be any naturally occurring amino acid
  Transcript Sequence Number=SeqID_14919
  Gene Ontology: Mol. function=substrate-specific transmembrane transporter activity; Cellular component=integral to membrane; Biological process=transmembrane transport
  Homolog annotation: Hit_ID=B9S3N8; Match level="QueryCoverage=96%, HitCoverage=10%, E-value=1e-29, Identity=85%"; Hit description=Sugar transporter, putative
GLCIAICALTFWIGDIIVTYTLPVMLNAIGLAGVXFGIYAVVXCILALVFVYMNVPETKGMPLEVITEFFSVGAKQAKED

SEQ ID NO: 80894 - protein, 719 aa, Setaria italica
  Transcript Sequence Number=SeqID_14920
  Gene Ontology: Mol. function=substrate-specific transmembrane transporter activity; Cellular component=integral to membrane; Biological process=transmembrane transport
  Homolog annotation: Hit_ID=B6U6U2; Match level="QueryCoverage=99%, HitCoverage=98%, E-value=0.0, Identity=83%"; Hit description=Hexose transporter
  Pfam annotation: Domain name=MFS_1; Domain location=11-660; Score =96.9; E_value=7.1e-26; Accession=PF07690.8; Description=Major Facilitator Superfamily
  Pfam annotation: Domain name=Sugar_tr; Domain location=6-709; Score =230.5; E_value=4.3e-66; Accession=PF00083.16; Description=Sugar (and other) transporter
  Pfam module annotation: Pfam domain module=MFS_1::Sugar_tr; Domain location=11-660::6-709
MGGAVLVAIAASIGNLLQGWDNATIAGAVLYIKKEFNLQSEPLIEGLIVAMSLFGATVVTTFSGALADSIGRRPMLIASAVLYFVSGLFMLWAPSVYVLLLARLIDGLGIGLAVTLVPLYISETAPTDIRGLLNTLPQFSGSGGMFLSYCMVFGMSLLPKPDWRIMLGVLSIPSLIYFALTVFYLPESPRWLVSKGRMAEAKRVLQRLRGREDVSGEMALLVEGLGVGKDTRIEEYIIGPDDELADEGLAPDPEKIKLYGPEEGLSWVARPVRGQSALGSAYGLISQHGSMVSQGKPLVDPVVTLFGSVHEKMPEIMGSMRSTLFPNFGSMFSVMEQQQRAKADSDAESQMEGDEYASDHGGDDIEDNLQSPLISRQATSVEGKEIAAPHGSIIGGGWQLAWKWTEREGADGQMEGGFQRIYLHEEGVQGNRGSILSLPGGDVPPGGEFVQAAALVSQPALYSKELLEQRAAGPAMVHPSEAVSKGPKWADLFEPGVKHALFVGIGIQILQQFAGINGVLYYTPQILEQAGVSVLLSNIGLSSSSASILISALTTLLMLPSIGIAMRLMDMSGRRFLLLATIPILIVALLVLVVVNIVDVGTMVHAALSTISVIVYFCFFVMGFGPVPNILCAEIFPTTVRGLCIAICALTFWIGDIIVTYTLPVMLNAIGLAGVFGIYAVVCILALVFVYMKVPETKGMPLEVITEFFSVGAKQAKED

SEQ ID NO: 80895 - protein, 112 aa, Setaria italica
  Transcript Sequence Number=SeqID_14921
KRGHAEIARTNQRNGNTECHPRTLATDHKNSNQSLCYCCTLHAHGTTQLIIKETGLIELRGHEPVAAAVTGRGGSAAPCSASSGRARTTRAADGTARSSRRRRGRRRRCCCC

SEQ ID NO: 80896 - protein, 206 aa, Setaria italica
  misc_feature (84)..(84): Xaa can be any naturally occurring amino acid
  misc_feature (180)..(180): Xaa can be any naturally occurring amino acid
  Transcript Sequence Number=SeqID_14922
  Gene Ontology: Mol. function=receptor activity; Cellular component =nucleus; Biological process=proteolysis
  Homolog annotation: Hit_ID=B8K1X3; Match level="QueryCoverage=95%, HitCoverage=53%, E-value=1e-66, Identity=59%"; Hit description =Putative receptor kinase
LEEDQYGYITGLDIYSSETGAWSHKENGWGDEVVPVESGGVFMNGMLHLLSHESTILAVDTEGKTWSIIPLLESMGFEKFCHGXSLLGQSQGRLCYMNTRKHITNKISVWILEDYSAGQWIFKYNISTSQLFGEVDLMMERDYSLITIHPEANVVFFVSNSEDLLMSYDMDRGKVRVICXLTEPIYNTFLPYLPYVPFFHGLADQD

SEQ ID NO: 80897 - protein, 192 aa, Setaria italica
  misc_feature (188)..(188): Xaa can be any naturally occurring amino acid
  Transcript Sequence Number=SeqID_14923
  Gene Ontology: Mol. function=heat shock protein binding; Biological process=response to stress
  Homolog annotation: Hit_ID=Q1EPG9; Match level="QueryCoverage=100%, HitCoverage=19%, E-value=6e-40, Identity=45%"; Hit description=Heat shock protein DnaJ N-terminal domain-containing protein
  Pfam annotation: Domain name=DnaJ; Domain location=68-129; Score =102.4; E_value=1.6e-27; Accession=PF00226.23; Description=DnaJ domain
MECNKDEAARAKALAERKMLEKDFVAAKRFISKAQKLCKEVDDIDISKMLSVCDVHCAAAAKVNAEIDWYGILQVPVDADDALIKKQYRKLALLLHPDKNKFGGAEAAFKLVGEANITLTDKSKRMVYDMKRSTFRGGPARPPHIRTAAARPSSTPVNLYNMHQQQQQQASNPAGTQTTFWTLCPSCXMRYQ

SEQ ID NO: 80898 - protein, 336 aa, Setaria italica
  Transcript Sequence Number=SeqID_14924
ANFVFGGGGAGAPELRRTFSSGSGEASLTELRSAVDKLVLDGGSGRRSDVDAPGGDDPVPVMNASDPSGIHGSNSSLHEGLFPDSLHDQTEKLDEGRGAPSQSIQCENAETRSLASQTSTNHNAPMELARSGDGLPIRNSVDEGSLPKDGSNISAHGGNVQQNVFVFGGHAGYRDFTANATQTSISKEDSSDKDGAIYNSEQLNASVAKDRTCTKFILQDAKDAFGSTNKNPLHSEPCEISPTVKFGSSFGSEDGSAKVSFVKVPYDIKAVEASELTECRPFDEKSFTVQDHNVASRNKGVKGMITNRRTVMPKKFSSAHQVSSLRNTSNTKKENR

SEQ ID NO: 80899 - protein, 225 aa, Setaria italica
  misc_feature (45)..(45): Xaa can be any naturally occurring amino acid
  misc_feature (121)..(121): Xaa can be any naturally occurring amino acid
  misc_feature (134)..(134): Xaa can be any naturally occurring amino acid
  Transcript Sequence Number=SeqID_14925
  Gene Ontology: Mol. function=ARF GTPase activator activity; Cellular component=plasma membrane; Biological process=regulation of ARF GTPase activity
  Homolog annotation: Hit_ID=Q8L7A4; Match level="QueryCoverage=100%, HitCoverage=59%, E-value=9e-61, Identity=54%"; Hit description =Probable ADP-ribosylation factor GTPase-activating protein AGD11
  Pfam annotation: Domain name=C2; Domain location=115-196; Score=92.0; E_value=2.1e-24; Accession=PF00168.22; Description=C2 domain
EEVNCLAESGGNSVVNARYEAFLPENKKIKQECSTEERNDFIRKXYQFQQFVCDPQFSCPLPLHKKNVPDKNQQHNSNRHGFGHAFRNSWRKKDSDNKGLKKMSDVGMIEFVGLVKVNIVXKGTDLAVRDVMSXSDPYVMIILGHQSMKTKVIKNTLNPIWNERLMLSIPDPIPPLKLQVFDKDTFSSDDRMGEAEVDIRPLIAATKEHENSTITELTELYRWSA

SEQ ID NO: 80900 - protein, 96 aa, Setaria italica
  Transcript Sequence Number=SeqID_14926
  Homolog annotation: Hit_ID=B4FL66; Match level="QueryCoverage=81%, HitCoverage=36%, E-value=9e-39, Identity=94%"; Hit description =Coiled-coil domain-containing protein 25
  Pfam annotation: Domain name=DUF814; Domain location=1-68; Score =42.5; E_value=1.6e-09; Accession=PF05670.5; Description=Domain of unknown function (DUF814)
CRVASCRFHVDKVSSAHVYLRLKKGETIDTISEGLLEDCAQLVKAHSIQGNKMNNVEVVYTPWSNLKKSPSMDVGQVGFHNPRMVITQYCSHHFCA

SEQ ID NO: 80901 - protein, 209 aa, Setaria italica
  Transcript Sequence Number=SeqID_14927
  Homolog annotation: Hit_ID=B4FL66; Match level="QueryCoverage=100%, HitCoverage=97%, E-value=1e-91, Identity=79%"; Hit description =Coiled-coil domain-containing protein 25
  Pfam annotation: Domain name=DUF814; Domain location=7-99; Score =132.0; E_value=1.9e-36; Accession=PF05670.5; Description=Domain of unknown function (DUF814)
MVLYFKARPDAGDYTIYMGADKNENEELIKYGLPEDVWFHVDKVSSAHVYLRLKKGETIDTISEGLLEDCAQLVKAHSIQGNKMNNVEVVYTPWSNLKKSPSMDVGQVGFHNPRMVRVLTVEKRVNEIINRLNKTRVERRPDLKAEKEASNAAEKAERKMQLKEKKRKEELERLEKEKWAEIRSYKGLMVAEKMTSNRQIASAGRSMQE

SEQ ID NO: 80902 - protein, 205 aa, Setaria italica
  misc_feature (15)..(15): Xaa can be any naturally occurring amino acid
  misc_feature (59)..(59): Xaa can be any naturally occurring amino acid
  Transcript Sequence Number=SeqID_14928
  Gene Ontology: Mol. function=serine-type endopeptidase inhibitor activity; Cellular component=extracellular region; Biological process=defense response
  Homolog annotation: Hit_ID=Q94DW6; Match level="QueryCoverage=99%, HitCoverage=52%, E-value=1e-37, Identity=49%"; Hit description =Serpin-Z1
  Pfam annotation: Domain name=Serpin; Domain location=1-205; Score= -153.7; E_value=0.00022; Accession=PF00079.12; Description=Serpin (serine protease inhibitor)
GGTPAVLANALYFKXLERKFDASLTLDGAFYLPTGGHVRVPFMSSTSKQHIASRPGYKXSCGLPYARGRDHRAFSMYVYLPDAHDGLPGLLQKLSSDPAASLESSASLMAEVPVRALRVPRFTVSYKTRAAAMLRDLGLALPFDPVRADFGDMVESAPEPLVVSEVYHECFVEVNEEGTEAAAATAAVVAFGCARLPLPEDFVAD

SEQ ID NO: 80903 - protein, 64 aa, Setaria italica
  Transcript Sequence Number=SeqID_14929
MAMARQPRPASASRGLLVNVAVAVVVLLGITAYVWHTLRNAAGGAGDHGHGHGHLGAGSYGDEM

SEQ ID NO: 80904 - protein, 494 aa, Setaria italica
  Transcript Sequence Number=SeqID_14930
  Gene Ontology: Mol. function=kinase activity; Cellular component =nucleus; Biological process=carbohydrate metabolic process
  Homolog annotation: Hit_ID=Q9FUY5; Match level="QueryCoverage=100%, HitCoverage=100%, E-value=0.0, Identity=86%"; Hit description =Protein kinase AKINbetagamma-1
  Pfam annotation: Domain name=CBS; Domain location=176-315; Score =13.5; E_value=0.0062; Accession=PF00571.20; Description=CBS domain
  Pfam annotation: Domain name=CBS; Domain location=355-492; Score =50.2; E_value=8.3e-12; Accession=PF00571.20; Description=CBS domain
  Pfam module annotation: Pfam domain module=CBS::CBS; Domain location =176-315::355-492
  Subcellular localization annotation: CTP_CleavageSite=65; ConfidenceScore=5.36e-01
MFSHGADSAHDAGGVGVSTAGATVPARFVWPYGGKRVFVSGSFTRWSEHLQMSPVEGCPSVFQATCSLSPGMYQYKFFVDGEWRHDERQPTVSGEYGIVNTLYLTREINQINSVLSPSTPGTRMNMDVDNETFQRTVTVSDGNNQEGPLRVSEAAIQISRCRVIEYLSLHTGYDLLPDSGKVIALDINLPVKQSFHILHEQGIPVAPLWDSFRSQFVGLLSPLDFILILKELETHGSNLTEEQLETHTISAWKEAKRQTYGRYEGRPHQPLVHATPYESLRDIALKILQNGISTVPIIYSSSSDGSFPQLLHLASLSGILKCICRYFKNSTGNLPILNQPVCTIPLGSWVPKIGDPNSRPLAMLRRTASLSSALNMLIQAGVSSIPIVDDNDSLVDTYSRSDITALAKDKVYTHVRLEEMAIQQALQLGQDANTPFGYFNGQRCQMCLRSDPLLKVMERLSNPGVRRVFIVEAGSKRVEGIISLSDIFKFLLSL

SEQ ID NO: 80905 - protein, 252 aa, Setaria italica
  Transcript Sequence Number=SeqID_14931
  Gene Ontology: Mol. function=microtubule motor activity; Cellular component=microtubule associated complex; Biological process =microtubule-based movement
  Homolog annotation: Hit_ID=Q93XG0; Match level="QueryCoverage=100%, HitCoverage=25%, E-value=1e-134, Identity=93%"; Hit description =Kinesin heavy chain (Fragment)
  Pfam annotation: Domain name=Kinesin; Domain location=1-171; Score =132.6; E_value=1.2e-36; Accession=PF00225.15; Description=Kinesin motor domain
GKGGVLVRGLEEEIVTNANEIFSLLERGSAKRRTAETLLNKQSSRSHSLFSITIHIKESTPEGEELIKCGKLNLVDLAGSENISRSGAREGRAREAGEINKSLLTLGRVITALVEHLGHVPYRDSKLTRLLRDSLGGRTKTCIIATVSPSVHCLEETLSTLDYAHRAKSIKNRPEVNQKMMKSTLIKDLYGEIDRLKAEVYAAREKVGVYIPKDRYQQEENERKAMADQIEQMNASLEANQKLISDLQQKYD

SEQ ID NO: 80906 - protein, 68 aa, Setaria italica
  Transcript Sequence Number=SeqID_14932
  Subcellular localization annotation: CTP_CleavageSite=34; ConfidenceScore=5.70e-01
SPPWSIAAPPPSSIAAPPSSSVAIASKVRSFSSVAFKKKNARLLACDGRKIHSAYQQGSPILRCPRLR

SEQ ID NO: 80907 - protein, 64 aa, Setaria italica
  Transcript Sequence Number=SeqID_14933
VRWATRAQSRPKEGGCGTVPRLWNRKSLEIGLLVSQFIRMIWEPSKVVPINMREDLTVWNQVMN

SEQ ID NO: 80908 - protein, 114 aa, Setaria italica
  Transcript Sequence Number=SeqID_14934
  Gene Ontology: Mol. function=aminoacyl-tRNA ligase activity; Cellular component=cytoplasm; Biological process=tRNA aminoacylation for protein translation
  Homolog annotation: Hit_ID=B9RG03; Match level="QueryCoverage=100%, HitCoverage=16%, E-value=2e-53, Identity=85%"; Hit description =Glycyl-tRNA synthetase, putative
KASGHVEKFTDLMVKDEKTGTCYRADHLLKDFCKEKLEKDLALPQEKADEFKRILAILDDLSAEELGAKIKEYGIVAPDTKNPLSDPYPFNLMFQTSIGPTGLSVGYMRPETAQ

SEQ ID NO: 80909 - protein, 67 aa, Setaria italica
  Transcript Sequence Number=SeqID_14935
IKLPLSFLKIIIFVSLVQSSNILVLFHYPDIMRIIGSIVLFLTKGSTRSVIQIVKKQLTCRKPIYRS

SEQ ID NO: 80910 - protein, 78 aa, Setaria italica
  Transcript Sequence Number=SeqID_14936
SCLCGKSRKILGSDWNEIEQEFEEILLTGLGSWLFLWLDSKLYQLVCFGFEVFGKEGGMGTDGRIYVTGFRSWRKYSA

SEQ ID NO: 80911 - protein, 135 aa, Setaria italica
  misc_feature (124)..(124): Xaa can be any naturally occurring amino acid
  Transcript Sequence Number=SeqID_14937
PYPYPGSPCIGPLDFWSCLCGKSRKILGSDWNEIEQEFEEILLTGLGSWLFLWLDSKLFQLVCFGFEVLWKEGGVGTDGRIYVTGFRSWRKYSAWQACTKAHVLCSGRWYGIAGAPSRMTRKNXTGGSGRAPTAS

SEQ ID NO: 80912 - protein, 346 aa, Setaria italica
  misc_feature (8)..(8): Xaa can be any naturally occurring amino acid
  Transcript Sequence Number=SeqID_14938
  Gene Ontology: Mol. function=hydrolase activity, acting on glycosyl bonds; Cellular component=cell wall
  Homolog annotation: Hit_ID=B9RSW6; Match level="QueryCoverage=98%, HitCoverage=92%, E-value=1e-101, Identity=42%"; Hit description =Inosine-uridine preferring nucleoside hydrolase, putative
  Pfam annotation: Domain name=IU_nuc_hydro; Domain location=12-322; Score=-102.8; E_value=0.00061; Accession=PF01156.11; Description =Inosine-uridine preferring nucleoside hydrolase
LVSGNGWXNVASIDIIYDILHMMGRDDIPVGRGNTTALGTPSFGCDYVSIIPQGSGGLIDSDTLYGLARSLPRSPRRYTAENSVKHGAPRNTDHPELRQPLAFEVWHSIKEQLDPSEKITILTNGPLTNLANIVLSDRDASSLIEKVYVVGGHIRDENDSKGNVFTVPSNRYAEFNMFLDPLAAKTILESSLDIALIPLSSQRRAASFPSILEALMHADHTPESSFVHHLLLLLHDLQLKHRLYRHMDMFLGEVLGAVYLVEGLNIKPSLQLKPISIVTNSTASTDGQIVLDKGTAGSVEVLADFSTEQYYSRLANSLGNKEQSAVIGSFEEQIAVWSRPPQKLGT

SEQ ID NO: 80913 - protein, 83 aa, Setaria italica
  Transcript Sequence Number=SeqID_14939
SRRRQNNFTSYDSIDCFRRKLGDGDFLLLLLLGRRQNYRRITGSCRYLHARHDQIIPPVGFLSYQYLAMIRINEEKQLSKNFN

SEQ ID NO: 80914 - protein, 309 aa, Setaria italica
  Transcript Sequence Number=SeqID_14940
  Gene Ontology: Mol. function=DNA-directed DNA polymerase activity; Cellular component=apoplast; Biological process=nucleobase, nucleoside, nucleotide and nucleic acid metabolic process
  Homolog annotation: Hit_ID=B9F072; Match level="QueryCoverage=96%, HitCoverage=14%, E-value=1e-144, Identity=82%"; Hit description=DNA polymerase
FSKVKLRVYFFRDLFEWIELEPLHFWHSLLFMDQYNYGGIQAKTQNVDSSDDDNDIDIVSSWNIAEYLPKDTQDHFVLIVSEFLYIPWKFMKEQVATQATIRDDTSCTPSITVMAAENLEGQVIGHLRDKISTYFADKLLRTVSDILHHFKGKSKSESDEPASRESDPHTHKGDAALEFIKHICAVLALDQNVQHDILRMRKNLLKLVRVKEFAPEAQFQEPCASFTLPNVICSYCNDCRDLDLCRDSTLQGQEWRCAVPQCGQPYHREQMENALLQVVRQRERLYHLQDLVCLRCRQVKAAHLSEQCS

SEQ ID NO: 80915 - protein, 387 aa, Setaria italica
  Transcript Sequence Number=SeqID_14941
  Gene Ontology: Mol. function=protein serine/threonine kinase activity; Cellular component=plasma membrane; Biological process =protein amino acid phosphorylation
  Homolog annotation: Hit_ID=Q336X4; Match level="QueryCoverage=100%, HitCoverage=44%, E-value=1e-105, Identity=53%"; Hit description =Protein kinase domain containing protein, expressed
  Pfam annotation: Domain name=Pkinase; Domain location=241-387; Score=- 71.8; E_value=0.00033; Accession=PF00069.17; Description=Protein kinase domain
  Pfam annotation: Domain name=Pkinase_Tyr; Domain location=241-387; Score=-54.9; E_value=4.4e-10; Accession=PF07714.9; Description =Protein tyrosine kinase
  Pfam module annotation: Pfam domain module=Pkinase::Pkinase_Tyr; Domain location=241-387::241-387
PDIVYKSQRATNPSAGRASLQPPLFNITWTFPAEARSNYLVRLHFCDYEPLNSVVGEGIMFNVFIGPDIGTQDLMPTKTIATQANQQAFYLDYAATAPNTGNLTVSIGKSVKSSSTEGGFLNGLEIMQLRPSDNLSSSTTKRTVLIVTLSAVLGASVLACAALCLIVLLRRRRRRHVPRPAPEVEKDGSTLPWSPYTQDSSGWPVEPSSRSGGEGTTGAMQRMGTQLHIPLEELKAATDNFHERNLIGVGGFGNVYRGVLRDGTRVAVKRATRASKQGLPEFQTEIVVLSRIRHRHLVSLIGYCNEQAEMILVYEYMEQGTLRSHLYGPGSGDAPPLSWKQRLEVCIGAARGLHYLHTGYSENIIHRDVKSTNILLGDGFIAKVADF

SEQ ID NO: 80916 - protein, 278 aa, Setaria italica
  Transcript Sequence Number=SeqID_14942
  Gene Ontology: Mol. function=ATPase activity, coupled to transmembrane movement of substances; Cellular component=integral to membrane; Biological process=transport
  Homolog annotation: Hit_ID=Q5SMN1; Match level="QueryCoverage=100%, HitCoverage=20%, E-value=1e-102, Identity=68%"; Hit description =Putative multidrug resistance-associated protein 7
  Pfam annotation: Domain name=ABC_tran; Domain location=28-200; Score =114.2; E_value=4.2e-31; Accession=PF00005.19; Description=ABC transporter
  Pfam annotation: Domain name=MMR_HSR1; Domain location=29-106; Score=- 15.8; E_value=0.029; Accession=PF01926.15; Description=GTPase of unknown function
  Pfam annotation: Domain name=SMC_N; Domain location=17-203; Score= -122.5; E_value=0.014; Accession=PF02463.11; Description=RecFRecNSMC N terminal domain
  Pfam module annotation: Pfam domain module=ABC_tran::MMR_HSR1::SMC_N; Domain location=28-200::29-106::17-203
NVCCCWSSSSVADPHIILRNISLQLQKGLFIAIVGEVGSGKSSLLNSVIGETHVISGSVSSCGSIAYVPQVPWILSGSVRDNILLGKEFDPRRYEEVIQACALDVDISAMARGDMSYIGEKGTNLSGGQRARLALARALYQNSDVYLFDDILSAVDSQVASWILEKAIMGPQLMQKTRLLSTHNLQAISAADMIVVMANGLVKWFGTLESFLATPYSRISKPDSSSPTSFTVSVKDKTPMVSCELKTDVILEDDSVVAYEEQKDQVEAEARKEGMVEL

SEQ ID NO: 80917 - protein, 76 aa, Setaria italica
  Transcript Sequence Number=SeqID_14943
  Gene Ontology: Mol. function=DNA binding; Cellular component=nuclear matrix
  Homolog annotation: Hit_ID=B9SQC4; Match level="QueryCoverage=85%, HitCoverage=9%, E-value=8e-13, Identity=60%"; Hit description=ATP binding protein, putative
KGNLSWYCCYKNLESTTHELVEERKIVSTLNRELEALAKQLQVDSEARKALEADLDEATKSLDEMNNSALSLSKVT

SEQ ID NO: 80918 - protein, 371 aa, Setaria italica
  Transcript Sequence Number=SeqID_14944
  Gene Ontology: Mol. function=DNA binding; Cellular component=nuclear matrix
  Homolog annotation: Hit_ID=Q9M7J3; Match level="QueryCoverage=83%, HitCoverage=77%, E-value=2e-50, Identity=41%"; Hit description=MAR -binding protein MFP1 homolog (Fragment)
  Pfam annotation: Domain name=DUF827; Domain location=20-264; Score= -111.9; E_value=0.049; Accession=PF05701.3; Description=Plant protein of unknown function (DUF827)
  Pfam annotation: Domain name=M; Domain location=164-184; Score=7.0; E_ value=17; Accession=PF02370.8; Description=M protein repeat
  Pfam annotation: Domain name=M; Domain location=202-222; Score=8.6; E_ value=10; Accession=PF02370.8; Description=M protein repeat
  Pfam annotation: Domain name=M; Domain location=254-274; Score=2.2; E_ value=76; Accession=PF02370.8; Description=M protein repeat
  Pfam annotation: Domain name=M; Domain location=34-54; Score=2.5; E _value=69; Accession=PF02370.8; Description=M protein repeat
  Pfam annotation: Domain name=M; Domain location=9-29; Score=2.8; E _value=62; Accession=PF02370.8; Description=M protein repeat
  Pfam module annotation: Pfam domain module=DUF827::M::M::M::M::M; Domain location=20-264::164-184::202-222::254-274::34-54::9-29
PKLLSERDDQIKQLEEKLSVALTDSSKDHETILELNKELDATKVMLENELVAMETLKESIQSSEEALKDSRNEVSKLSNELEAANKLNQDLVSQISELQDEFNEMQAGMTIKLGEAESVSKALSEELASVKEMVQKGQEVLETTSNELASAVEARDNLKKELLDVYKNLESTTHELVEERKIVSTLNRELEALAKQLQVDSEARKALEADLDEATKSLDEMNNSALSLSKELESTHSRNDTLEAEKEMLSKALAEQKKITSEAQENTEDAQNLITRLQAEKDSFELRSRHLEEELALAKGEILRLRRQISPNRSQKPRTTARPRAPPEANETLKEQAVNDHNQKTSGVVAGTPQSVKRTVRGRKGGAGAST

SEQ ID NO: 80919 - protein, 437 aa, Setaria italica
  misc_feature (345)..(345): Xaa can be any naturally occurring amino acid
  Transcript Sequence Number=SeqID_14945
  Gene Ontology: Mol. function=DNA binding; Cellular component=nuclear matrix
  Homolog annotation: Hit_ID=Q9LW85; Match level="QueryCoverage=78%, HitCoverage=47%, E-value=1e-45, Identity=37%"; Hit description=MAR -binding filament-like protein 1
FPVYFGFGFPFLYFRPADAYVLARRVVLLGASAVPLLRLREAAAATATATTTETKDVSKLGDPQSEVTKGILKPDNPQLEGTQVETTTTEARQPQSSLQSVEEQPPGNPLLGFLNTVAVAASGVLGGLYGTSLQEKKALQSIISSTESKLAENEAALSLMKENYEKRLLEQQAAQKKQSLKFQEQEASLSDQLASAKKALTSLSEEFRKEKKLAEELRDEIQRLESSITQVGDDKDALETKLEEKVGDINALQEKISLLSQDIHDKEKHIRELSASLSSKEVDYQKLSAFTNQTKSSLELANSKIQQLEEELDGTKNALASKISLIDSLNAKLETLNSEKEEADXKLSELIQEYADLKAASETRASHDSKLLSERDDQIKQLEEKLSVALTDSSKDHETILELNKELDATKVMLENELVAMETLKESIQSSEESRSS

SEQ ID NO: 80920 - protein, 148 aa, Setaria italica
  Transcript Sequence Number=SeqID_14946
  Gene Ontology: Mol. function=oxidoreductase activity; Biological process=oxidation reduction
  Homolog annotation: Hit_ID=B6TQ13; Match level="QueryCoverage=95%, HitCoverage=41%, E-value=2e-54, Identity=75%"; Hit description =Flavonol synthase/flavanone 3-hydroxylase
METTAAARVQALAETGVSRLPSQYIQPPEHRPAPPSSPAPATPFVPVVDLSSPTAVDAVRAACADWGAFHVVGHGVPGKLLDAVRGAGLAFFRAPMEDKLRFACDPARGAAAEGYGSRMLANDDSVLDWRDYFDHHTLPVSRREQPRP

SEQ ID NO: 80921 - protein, 76 aa, Setaria italica
  Transcript Sequence Number=SeqID_14947
TRKTGKEKHRSGTCQRWWYEPCTSSLSIIRIYRAKFPFLSSYFRFFCHQDLPHQASVFPLQHLFQVFLLKERTQGN

SEQ ID NO: 80922 - protein, 217 aa, Setaria italica
  misc_feature (87)..(87): Xaa can be any naturally occurring amino acid
  Transcript Sequence Number=SeqID_14948
  Gene Ontology: Mol. function=polynucleotide adenylyltransferase activity; Cellular component=nucleus; Biological process=RNA 3'-end processing
  Homolog annotation: Hit_ID=B9RS15; Match level="QueryCoverage=100%, HitCoverage=28%, E-value=1e-104, Identity=81%"; Hit description =Poly(A) polymerase beta, putative
  Pfam annotation: Domain name=NTP_transf_2; Domain location=28-122; Score=35.5; E_value=2.1e-07; Accession=PF01909.15; Description =Nucleotidyltransferase domain
  Pfam annotation: Domain name=PAP_central; Domain location=1-217; Score=110.2; E_value=7.1e-30; Accession=PF04928.9; Description =Poly(A) polymerase central domain
  Pfam module annotation: Pfam domain module=NTP_transf_2::PAP_central; Domain location=28-122::1-217
KEESAKREEVLSEIGQIVKEWVKQLTSKKGYAEQLVERANAVLFTFGSYRLGVHGPGADIDTLCVGPSYVNREEDFFVTLHGILAEXEEVTELQPVPDAHVPVLKFKFRGISIDLLYASLSPSEIPADFDISQGSVLCDVDEATVRSLNGCRVADQILRLVPNAENFRTTLRCLKYWAKRRGVYSNITGFLGGVNWALLVARVCQLYPNAVPSMLVS

SEQ ID NO: 80923 - protein, 139 aa, Setaria italica
  Transcript Sequence Number=SeqID_14949
PPRPPAPRRHGRSRRGPPPPFRAPPPPQAVASAEHRLYFRGWLGAPRHWEVWVAKLRPLHAPLWRRLGIHDAVLASTYRIKPDASHVLHLASFWSPTTSTFAFPWGEATLTLHDVAVIAGLPATGSPVPAPLQPEWRPD

SEQ ID NO: 80924 - protein, 395 aa, Setaria italica
  Transcript Sequence Number=SeqID_14950
  Gene Ontology: Mol. function=binding; Cellular component =mitochondrial inner membrane; Biological process=mitochondrial transport
  Homolog annotation: Hit_ID=B2LWG5; Match level="QueryCoverage=98%, HitCoverage=95%, E-value=0.0, Identity=83%"; Hit description =Nucleotide sugar translocator BT2A
  Pfam annotation: Domain name=Mito_carr; Domain location=113-200; Score=99.7; E_value=1e-26; Accession=PF00153.19; Description =Mitochondrial carrier protein
  Pfam annotation: Domain name=Mito_carr; Domain location=207-295; Score=127.1; E_value=5.7e-35; Accession=PF00153.19; Description =Mitochondrial carrier protein
  Pfam annotation: Domain name=Mito_carr; Domain location=301-393; Score=121.1; E_value=3.7e-33; Accession=PF00153.19; Description =Mitochondrial carrier protein
  Pfam module annotation: Pfam domain module=Mito_carr::Mito_carr::Mito_ carr; Domain location=113-200::207-295::301-393
SADTKDWGCCFLALPPAAPAAAGVDGDGGFNLSWTLHQSFHPPAGLFASVGQQVGVGFPGASSTAPSPETPRDPYMKYVSPEVVETPLPGEGVGLRDKGKKKVVKLKIKVGNHHLKRLISGAIAGAVSRTAVAPLETIRTHLMVGSNGNSTTEVFQSIMKHEGWTGLFRGNFVNVIRVAPSKAIELFAFDTANKFLTPKPGEERKIPIPPSLVAGAFAGVSSTLCTYPLELIKTRLTIQRGVYDNFLDAFVKIVREEGPTELYRGLTPSLIGVVPYAATNYFAYDTLKKVYKKVFKTNEIGNVPTLLIGSAAGAISSSATFPLEVARKHMQVGAVGGRKVYKNMLHALLSILEDEGVGGLYRGLGPSCMKLVPAAGISFMCYEACKKILIEEEDE

SEQ ID NO: 80925 - protein, 49 aa, Setaria italica
  Transcript Sequence Number=SeqID_14951
SFSDQRSSVGLIRSCLQWGRIACSACYSVNCSIQSFRLTTTLLKEKESV

SEQ ID NO: 80926 - protein, 68 aa, Setaria italica
  Transcript Sequence Number=SeqID_14952
SFYIIFKRIPSFSSLRLIEFDQGTRSQHGISAPHTKIVCYMLAPFSNTNNSQTSRLNTNYRTFGNQQA

SEQ ID NO: 80927 - protein, 427 aa, Setaria italica
  Transcript Sequence Number=SeqID_14953
  Gene Ontology: Mol. function=calcium ion binding; Cellular component =plasma membrane
  Homolog annotation: Hit_ID=B9R838; Match level="QueryCoverage=98%, HitCoverage=51%, E-value=1e-171, Identity=67%"; Hit description =Tetratricopeptide repeat protein, tpr, putative
  Pfam annotation: Domain name=TPR_1; Domain location=1-30; Score=10.3; E_value=0.34; Accession=PF00515.20; Description=Tetratricopeptide repeat
  Pfam annotation: Domain name=TPR_1; Domain location=31-64; Score =29.4; E_value=1.5e-05; Accession=PF00515.20; Description =Tetratricopeptide repeat
  Pfam annotation: Domain name=TPR_1; Domain location=65-98; Score =12.1; E_value=0.21; Accession=PF00515.20; Description=Tetratricopepti de repeat
  Pfam annotation: Domain name=TPR_2; Domain location=1-30; Score=10.1; E_value=1.9; Accession=PF07719.9; Description=Tetratricopeptide repeat
  Pfam annotation: Domain name=TPR_2; Domain location=31-64; Score =26.1; E_value=0.00014; Accession=PF07719.9; Description =Tetratricopeptide repeat
  Pfam annotation: Domain name=TPR_2; Domain location=65-98; Score =17.0; E_value=0.076; Accession=PF07719.9; Description=Tetratricopepti de repeat
  Pfam annotation: Domain name=TPR_4; Domain location=31-56; Score=1.8; E_value=26; Accession=PF07721.6; Description=Tetratricopeptide repeat
  Pfam annotation: Domain name=TPR_4; Domain location=65-90; Score =15.2; E_value=0.27; Accession=PF07721.6; Description=Tetratricopeptid e repeat
  Pfam annotation: Domain name=ZZ; Domain location=351-394; Score=19.9; E_value=0.0008; Accession=PF00569.9; Description=Zinc finger, ZZ type
  Pfam module annotation: Pfam domain module=TPR_1::TPR_1::TPR_1::TPR _2::TPR_2::TPR_2::TPR_4::TPR_4::ZZ; Domain location=1-30::31-64::65 -98::1-30::31-64::65-98::31-56::65-90::351-394
CDLGSALHAVGDDDRAIQEFQKAIDLKPGHVDALYNLGGLNMDAGRFVRAAEMYTRVLSIRPNHWRAQLNKAVALLGQGESEEAKKALKEAFKMTQRVEVYDAISHLKTLQKKKPKLSKGKDDGQGEQAYVVVEASKFKRVGRKTTLRQDLANALDIRAFERMAKLGHCDVELLRKEMNETDVPVSYSGTGIPEKSIRKAALEVILRRLLSFLKPDTFQGAIKAINERILSVLDAPGSGRVDLGMFFAIIAPICSGPVERRKRVVFDALLWRPASEGSNGQIRRSDALTYIKLLRAVYIPTHGASDMLEMHGESDPTMVSYTEFLEMFNDPDWGFGILSTLVKLEESDHIRHGHHTCSICRYPIIGSRFKETKHSFSLCNRCYSEGKVPSAFKLEEYRFKEYGNESEALIDKCMCFNLHSKKLETDA

SEQ ID NO: 80928 - protein, 417 aa, Setaria italica
  misc_feature (33)..(33): Xaa can be any naturally occurring amino acid
  Transcript Sequence Number=SeqID_14954
  Pfam annotation: Domain name=Occludin_ELL; Domain location=315-412; Score=-15.8; E_value=0.011; Accession=PF07303.5; Description =Occludin homology domain
  Subcellular localization annotation: CTP_CleavageSite=49; ConfidenceScore=5.45e-01
SFILFPLVFLLFGSFGYCISSTRKRSRHGGFSXDGKMLKRSKDANVNINSMNLSKTSGGNAGPDEITTFPEPNESNGELPSSQRDNFERSPHGKKKLQRELSDLELGELRESSLDNDNGRTRKQFERNSSSKSLDGKLTDINNSYPSMNSRKVHLTGFHDKGKPSPQEYGIGGHINQEAFPRKATGYDFDDNRPQQRGNVPENQHFPRTDNSDSENISYRPGDKTSKKESRMAQGGMLEYPDMKKKTTSRLPQNGSNNAIVPRTQKSLSPSDNEERSRNNSLIESETGRKRDSSSDDDNLFFSKYDKDEPELKAPIKDFSQYKDYVQEYNEKYEAYSYLNSQIEKTKSEFLKVQEDLNVAKERDKEQYYNTVERLRDMYRESGARHKLMKKVFVLLHEELRIMKQRIRDFTEAYSNE

SEQ ID NO: 80929 - protein, 153 aa, Setaria italica
  Transcript Sequence Number=SeqID_14955
  Subcellular localization annotation: CTP_CleavageSite=50; ConfidenceScore=5.59e-01
KQLHAYPPPFTSPSTSPPAPANAAIGASTNSSAVAPGDGYQQQLTTAAPSALLGMQDHGSSGNSSYLSFQSTLGGAQLDGSDANKHPLFDHRGVSPPSPATRLQDPMDFLGLAHLHPRNGDRGDELSGLVGGCKATYSSAPPLLERNGPPSPA

SEQ ID NO: 80930 - protein, 91 aa, Setaria italica
  Transcript Sequence Number=SeqID_14956
  Gene Ontology: Mol. function=transcription initiation factor activity; Cellular component=transcription factor TFIID complex
  Homolog annotation: Hit_ID=Q10IY9; Match level="QueryCoverage=98%, HitCoverage=12%, E-value=3e-12, Identity=56%"; Hit description =Transcription initiation factor TFIID component TAF4 family protein, expressed
PDVEAFTAALNREVEASASTSSTISAPPAASSSSSQPTDHGAALLPQENKSLLNHGHGQWQDRVKNETANQESQQQEQTHLLRNDQPSRPE

SEQ ID NO: 80931 - protein, 50 aa, Setaria italica
  Transcript Sequence Number=SeqID_14957
VCACDRITIIVFYLDRCKWFELSVIITLCSINKGHLVLGHGSNLVCLQVW

SEQ ID NO: 80932 - protein, 261 aa, Setaria italica
  Transcript Sequence Number=SeqID_14958
  Gene Ontology: Mol. function=nucleic acid binding; Cellular component= cytoplasm; Biological process=intracellular signaling cascade
  Homolog annotation: Hit_ID=B4FKN3; Match level="QueryCoverage=100%, HitCoverage=100%, E-value=1e-124, Identity=86%"; Hit description=DNA- binding protein HEXBP
  Pfam annotation: Domain name=zf-CCHC; Domain location=122-139; Score =20.9; E_value=0.0002; Accession=PF00098.15; Description=Zinc knuckle
  Pfam annotation: Domain name=zf-CCHC; Domain location=141-158; Score =28.6; E_value=9.4e-06; Accession=PF00098.15; Description=Zinc knuckle
  Pfam annotation: Domain name=zf-CCHC; Domain location=160-177; Score =23.4; E_value=7.4e-05; Accession=PF00098.15; Description=Zinc knuckle
  Pfam annotation: Domain name=zf-CCHC; Domain location=211-228; Score =25.5; E_value=3.3e-05; Accession=PF00098.15; Description=Zinc knuckle
  Pfam annotation: Domain name=zf-CCHC; Domain location=232-249; Score =27.8; E_value=1.3e-05; Accession=PF00098.15; Description=Zinc knuckle
  Pfam annotation: Domain name=zf-CCHC; Domain location=39-56; Score =32.8; E_value=1.3e-06; Accession=PF00098.15; Description=Zinc knuckle
  Pfam annotation: Domain name=zf-CCHC; Domain location=58-75; Score =23.4; E_value=7.5e-05; Accession=PF00098.15; Description=Zinc knuckle
  Pfam annotation: Domain name=zf-CCHC; Domain location=77-94; Score =34.2; E_value=5.3e-07; Accession=PF00098.15; Description=Zinc knuckle
  Pfam annotation: Domain name=zf-CCHC; Domain location=96-113; Score =33.9; E_value=6.7e-07; Accession=PF00098.15; Description=Zinc knuckle
  Pfam module annotation: Pfam domain module=zf-CCHC::zf-CCHC::zf -CCHC::zf-CCHC::zf-CCHC::zf-CCHC::zf-CCHC::zf-CCHC::zf-CCHC; Domain location=122-139::141-158::160-177::211-228::232-249::39-56::58 -75::77-94::96-113
MSSRSPPLKDRRMRTERTSYRDAPYRRDSRRGSSRFHNDLCNNCKRPGHFARECPSVAVCHTCGLPGHIAAECSSKGTCWNCKEPGHMANSCPNEGICRNCGKSGHIARDCTAPPVPPGEVILCSNCYKPGHFREECTNEKACNNCRQSGHIARNCTNDPVCNLCNVAGHLARQCPKSDTLGERGGPPPFRGAGAPFRGGGAPFRGGFSDIICRACNQVGHMSRDCMAGAFMICHNCGGRGHMAYECPSVSLMDRFPPRRF

SEQ ID NO: 80933 - protein, 50 aa, Setaria italica
  misc_feature (32)..(32): Xaa can be any naturally occurring amino acid
  Transcript Sequence Number=SeqID_14959
MAASKRGCLVLLCLAVVAPLLLAGGVHGHPWXRLFPQFYDHSCPKAKEIV

SEQ ID NO: 80934 - protein, 275 aa, Setaria italica
  Transcript Sequence Number=SeqID_14960
  Pfam annotation: Domain name=DUF1997; Domain location=80-266; Score =249.0; E_value=1.2e-71; Accession=PF09366.2; Description=Protein of unknown function (DUF1997)
  Subcellular localization annotation: CTP_CleavageSite=56; ConfidenceScore=5.74e-01
MTMLHLPSCHLAAHPVYRGAGSGASTTLRSVGDQRSSSRSRKGPFQNCPSPRSFTTCALKTPSYGGRSREKINPRDLFTFSYRFNTDIPMSETQGASIDEYLQNSPRIVGAVFPDQRKRRKLNDEEWSVQLLPIQFLFLSASPVIVMRFARKSGGKEYPPNVPVHATSLLLMEVTDYKLNGLDSNAMPSHLALTVRGLMYPQREGRKSLRGHVEMTVGFNLPPVLAMVPESIIRGVGETVLRQMAEQMKQDFDTGLAADFKKYRREKLTERRTSP

SEQ ID NO: 80935 - protein, 43 aa, Setaria italica
  Transcript Sequence Number=SeqID_14961
FVFIYMGFDIAMEEHSWSHVGFIFFSIIFIVVARYCYDLPLPL

SEQ ID NO: 80936 - protein, 335 aa, Setaria italica
  Transcript Sequence Number=SeqID_14962
  Gene Ontology: Mol. function=sodium:hydrogen antiporter activity; Cellular component=integral to membrane; Biological process=sodium ion transport
  Homolog annotation: Hit_ID=B8BDY1; Match level="QueryCoverage=95%, HitCoverage=61%, E-value=1e-143, Identity=78%"; Hit description =Sodium/hydrogen exchanger
  Pfam annotation: Domain name=Na_H_Exchanger; Domain location=2-249; Score=-70.6; E_value=0.008; Accession=PF00999.13; Description =Sodiumhydrogen exchanger family
PTVSLFGKDRWQFPFTVRSHAAAGENFFMMILQFLETFVGSMSSGVGVGFISALLFKYAGLDVDNLQNLECCLFVLFPYFSYMLAEGLGLSGIVSILFTGMVMKHYTFSNLSDNSQRFVSAFFHLLSSLAETFVFIYMGFDIAMEEHSWSHVGFIFFSIIFIVVARAVNVFSCAYLVNMSRPEHRRIPLKHQKALWFSGLRGAMAFALALQSVHELPEGHGKTIFTTTTAIVVLTVLLIGGSTGTMLEALDVVGDENTSIENYEDNNGYMPPTYEEGTSSGGGLRMKLKQFHKSTTSFTALDKNYLTPFFTSQTDDDDDDFSEQPQNRRVRFYDQ

SEQ ID NO: 80937 - protein, 344 aa, Setaria italica
  Transcript Sequence Number=SeqID_14963
  Gene Ontology: Mol. function=sodium:hydrogen antiporter activity; Cellular component=integral to membrane; Biological process=sodium ion transport
  Homolog annotation: Hit_ID=Q0J2X1; Match level="QueryCoverage=89%, HitCoverage=57%, E-value=1e-141, Identity=84%"; Hit description =Sodium/hydrogen exchanger
  Pfam annotation: Domain name=Na_H_Exchanger; Domain location=43-344; Score=37.3; E_value=6.3e-08; Accession=PF00999.13; Description =Sodiumhydrogen exchanger family
MALELSLASASASPPAGWLAPPPPLAPPGKEQQVAGVGILLQISMLVLSFVLGHVLRRHRFYYLPEASASLLIGLVVGGLANISNTETNTRTWFNFHEEFFFLFLLPPIIFQSGFSLSPKPFFANFGAIVTFAILGTFIASVVTGVLVYLGGLTFLMYKLPLVECLMFGALISATDPVTVLSIFQELGSDVNLYALVFGESVLNDAMAISLYRTMSSVRSHAAAGENFFMMILQFLETFVGSMSSGVGVGFISALLFKYAGLDVDNLQNLECCLFVLFPYFSYMLAEGLGLSGIVSILFTGMVMKHYTFSNLSDNSQRFVSAFFHLLSSLAETFVFYLQQLGDF

SEQ ID NO: 80938 - protein, 138 aa, Setaria italica
  Transcript Sequence Number=SeqID_14964
  Gene Ontology: Mol. function=protein serine/threonine kinase activity; Cellular component=intracellular; Biological process =protein amino acid phosphorylation
  Homolog annotation: Hit_ID=B9RTJ2; Match level="QueryCoverage=100%, HitCoverage=11%, E-value=3e-39, Identity=63%"; Hit description=ATP binding protein, putative
  Pfam annotation: Domain name=LRR_1; Domain location=119-138; Score =11.7; E_value=1.7; Accession=PF00560.25; Description=Leucine Rich Repeat
  Pfam annotation: Domain name=LRR_1; Domain location=50-71; Score=1.4; E_value=1.6e+02; Accession=PF00560.25; Description=Leucine Rich Repeat
  Pfam annotation: Domain name=LRR_1; Domain location=73-94; Score =12.7; E_value=1.1; Accession=PF00560.25; Description=Leucine Rich Repeat
  Pfam annotation: Domain name=LRR_1; Domain location=96-117; Score =9.1; E_value=5.5; Accession=PF00560.25; Description=Leucine Rich Repeat
  Pfam module annotation: Pfam domain module=LRR_1::LRR_1::LRR_1::LRR _1; Domain location=119-138::50-71::73-94::96-117
LESLQVKVSAPRVSGAPLRRMQALKELELSMVPPRPSSCSILAEVAGLRCLTKLTICHFSIRYLPPEIGNLRKLQELDLSFNKLKNLPNCIIELSALKFLKVTNNKLVDVPSGISSLRCLESLDLSNNRLTSLGSVKL

SEQ ID NO: 80939 - protein, 161 aa, Setaria italica
  misc_feature (151)..(151): Xaa can be any naturally occurring amino acid
  Transcript Sequence Number=SeqID_14965
  Gene Ontology: Mol. function=transketolase activity; Cellular component=chloroplast; Biological process=metabolic process
  Homolog annotation: Hit_ID=Q7SIC9; Match level="QueryCoverage=72%, HitCoverage=17%, E-value=1e-66, Identity=99%"; Hit description =Transketolase, chloroplastic
  Pfam annotation: Domain name=Transketolase_N; Domain location=30-161; Score=24.5; E_value=2.5e-16; Accession=PF00456.13; Description =Transketolase, thiamine diphosphate b
APSAAASRRQRVVRAAAVEALEGKAATGELLEKSVNTIRFLAIDAVEKANSGHPGLPMGCAPMGHILYDEVMRYNPKNPYWFNRDRFVLSAGHGCMLQYALLHLAGYDSVKEEDLKQFRQWGSRTPGHPENFETPGVEVTTGPLGQGIGQXLVGLALAEKH

SEQ ID NO: 80940 - protein, 79 aa, Setaria italica
  Transcript Sequence Number=SeqID_14966
LMSTKRTTLLFLCTNAHWAAINVTSIHIINKLAASLCAFTQERSVHNCSTLQARAPIGYELASLAVLPANSLKKLQPSI

SEQ ID NO: 80941 - protein, 343 aa, Setaria italica
  Transcript Sequence Number=SeqID_14967
  Gene Ontology: Mol. function=metal ion binding; Cellular component =integral to mitochondrial outer membrane; Biological process =positive regulation of I-kappaB kinase/NF-kappaB cascade
  Homolog annotation: Hit_ID=Q8L7N4; Match level="QueryCoverage=99%, HitCoverage=100%, E-value=1e-133, Identity=67%"; Hit description =Putative RING zinc finger protein
  Pfam annotation: Domain name=zf-C3HC4; Domain location=296-330; Score= 12.9; E_value=0.0035; Accession=PF00097.17; Description=Zinc finger, C3HC4 type (RING finger)
MMIPWGGVGCCLSAAALYLLGRSSGRDAEVLRSVARAGSMKDLAAILDTASKVLPLVVAVSGRVGSDTPLICQQSGMRGVIVEETAEQHFLKHNDAGSWIQDSAVMLSVSKEVPWYLDDGTGRVYVVGARAAAGLILTVASEVFEESGRTLVRGTLDYLQGLKMLGVKRTERVLPTGTSLTVVGEAIKDDVGTIRIQRPHKGPFYVSPKSIDQLILNLGKWAKLYRLASMGFATFSVFLLAKRAIQHFLERKRRHELQKRVLNAAAQRQAREAEGGKGTSNTEPNSKKDQLVLDICVICLEQEYNAVFVPCGHMCCCMACSSHLTNCPLCRRRIDQAVRTFRH

SEQ ID NO: 80942 - protein, 77 aa, Setaria italica
  Transcript Sequence Number=SeqID_14968
EKITTQLFSDTRYRFFLFSTRVWPLGPLNLVEKDREVKEFHLFTVQYKNKLPYTPKQRVLHLQWQPPGAEASVSPHT

SEQ ID NO: 80943 - protein, 149 aa, Setaria italica
  Transcript Sequence Number=SeqID_14969
AAVPPPEWERGGGAEERGELARRLGEEARGWFLAFVERFLDADVAAAAPWDRDRAARMLPQLKRVNDWLSEIGKPAEMPPPPQHPPSDADGEAAAPAANGGVACGVPEETIERLRKKIYEYLLTNVDSAAAVLGGGEAAPAPVANGKKG

SEQ ID NO: 80944 - protein, 98 aa, Setaria italica
  misc_feature (65)..(65): Xaa can be any naturally occurring amino acid
  misc_feature (90)..(90): Xaa can be any naturally occurring amino acid
  Transcript Sequence Number=SeqID_14970
  Gene Ontology: Mol. function=histone-lysine N-methyltransferase activity; Cellular component=nucleus; Biological process=ubiquitin -dependent protein catabolic process
  Homolog annotation: Hit_ID=B4FF77; Match level="QueryCoverage=100%, HitCoverage=19%, E-value=3e-43, Identity=84%"; Hit description =Ubiquitin carboxyl-terminal hydrolase
NGCSLVDCLKYFTVVEHLDNYRCDRCWHITAAKYLSLKSEADEEKVTKLNTCVDSGTCSCRGMFXPEEIPCSSSSRATKQLIISQCPKIXCIHLLRAS

SEQ ID NO: 80945 - protein, 227 aa, Setaria italica
  Transcript Sequence Number=SeqID_14971
  Gene Ontology: Mol. function=cysteine-type peptidase activity; Cellular component=integral to membrane; Biological process =ubiquitin-dependent protein catabolic process
  Homolog annotation: Hit_ID=B4FF77; Match level="QueryCoverage=92%, HitCoverage=41%, E-value=1e-107, Identity=87%"; Hit description =Ubiquitin carboxyl-terminal hydrolase
TIFCYLHINWYYLHVADLSIVRDERIVLNPQGVMHALSFYVSHFNLTRQQDASEAFLHLLISLRDEFSHCYVPHRSSLADITLSHSKVYRQREGNEPECKRWKQNLFGPFDGTIGSILSCRNCSSVLSLDFQNFQCLPLSPVLNTDGDVTNGCSLVDCLKYFTVVEHLDNYRCDRCWHITAAKYLSLKSEADEEKVTKLNTCVDSGTCSCRGMFPPEEIPCSSSSRA

SEQ ID NO: 80946 - protein, 88 aa, Setaria italica
  Transcript Sequence Number=SeqID_14972
SMSCCFELLCPNGELVVCPWVIVCVQFVVHQNGPFGMSISCPEVGAERTLLNIVRSHVRNLHLTLLPDREELECSVPHADVPAWFVVC

SEQ ID NO: 80947 - protein, 129 aa, Setaria italica
  Transcript Sequence Number=SeqID_14973
  Gene Ontology: Mol. function=pectate lyase activity
  Homolog annotation: Hit_ID=Q84L63; Match level="QueryCoverage=63%, HitCoverage=18%, E-value=6e-34, Identity=85%"; Hit description =Pectate lyase II enzyme
  Pfam annotation: Domain name=Pec_lyase_C; Domain location=4-118; Score=-51.0; E_value=0.00017; Accession=PF00544.11; Description =Pectate lyase
KPTGNAMVRSSPSHYGWRTIADGDAVSIFGASHIWVDHCSLSNCADGLIDAIMGSTAITVSNNYFTHHNEVVRPPARSYALDFPHPARLKCVCAMSFCFLKSGGICMVGADMPRTSLFMPYKHNLAQIP

SEQ ID NO: 80948 - protein, 406 aa, Setaria italica
  Transcript Sequence Number=SeqID_14974
  Gene Ontology: Mol. function=lyase activity; Cellular component =extracellular region
  Homolog annotation: Hit_ID=B6SSS1; Match level="QueryCoverage=91%, HitCoverage=76%, E-value=0.0, Identity=87%"; Hit description=Pectate lyase 8
  Pfam annotation: Domain name=Pec_lyase_C; Domain location=138-323; Score=351.1; E_value=2e-102; Accession=PF00544.11; Description =Pectate lyase
VLLLNLVPRGDAEAGGAGPVCVVVAVEDPEAVVDDVHVSIRNSTARRNLAYLSCGTGNPIDDCWRCDQDWHKNRQRLADCGIGFGRNAIGGRDGKIYVVTDPSDDDAVNPRKGTLRYGVIQDEPLWIIFKRDMVITLKQELIMNSFKTIDGRGANVHISGGACITIQYVSNVIIHGLHIHDCKPTGNAMVRSSPSHYGWRTIADGDAVSIFGASHIWVDHCSLSNCADGLIDAIMGSTAITVSNNYFTHHNEVMLLGHSDSYVKDKAMQVTIAFNHFGEGLIQRMPRCRHGYFHVVNNDYTHWEMYAIGGSAEPTINSQGNRYLAPTNPFAKEVTKRVETAQTVWQSWNWRSEGDLLLNGAYFTPSGAGASASYSRASSLGAKSSSMVGSITSDAGALSCRKGVAC

SEQ ID NO: 80949 - protein, 189 aa, Setaria italica
  Transcript Sequence Number=SeqID_14975
  Homolog annotation: Hit_ID=Q53MB0; Match level="QueryCoverage=95%, HitCoverage=27%, E-value=2e-68, Identity=67%"; Hit description=GRAS family transcription factor containing protein, expressed
  Pfam annotation: Domain name=GRAS; Domain location=2-188; Score= -91.9; E_value=1.8e-07; Accession=PF03514.6; Description=GRAS family transcription factor
FTFSTATICNAVAGRSKLHIVEYGVQHGFQYPGLLYTLAKRKGGPPEVRVTAIAVPQPGFRPAHQIEETGHRLSNCARELGVPFKFNAILAQWETVRAKDLNIDPEEVLVVNSECFWGNLMDESVLVDSPSPRDMVLNNIREMRPNVFIHSVVNGTFGAPFFLTRFREALFFYSAQFDTIVFVLSYLFP

SEQ ID NO: 80950 - protein, 166 aa, Setaria italica
  Transcript Sequence Number=SeqID_14976
  Homolog annotation: Hit_ID=Q53MB0; Match level="QueryCoverage=100%, HitCoverage=24%, E-value=8e-73, Identity=76%"; Hit description=GRAS family transcription factor containing protein, expressed
  Pfam annotation: Domain name=GRAS; Domain location=1-158; Score= -102.0; E_value=5.8e-07; Accession=PF03514.6; Description=GRAS family transcription factor
VGTSPSPRDMVLNNIREMRPNVFIHSVVNGTFGAPFFLTRFREALFFYSAQFDMLDATIPRDNDERLLIERDVIGRSALNVIACEGADRVERPETYKQWLVRNHRAGLRQLPLDSEAAKVSRDKVKNYYHRDFLIDEDNRWLLLGWKGRVLYAMSSWTAEDNKPLF

SEQ ID NO: 80951 - protein, 51 aa, Setaria italica
  misc_feature (17)..(17): Xaa can be any naturally occurring amino acid
  misc_feature (28)..(28): Xaa can be any naturally occurring amino acid
  Transcript Sequence Number=SeqID_14977
  Homolog annotation: Hit_ID=Q688X9; Match level="QueryCoverage=100%, HitCoverage=24%, E-value=1e-10, Identity=66%"; Hit description =Protein DEHYDRATION-INDUCED 19
ISVPDDATMAKETPAQXDSSLTSEEREXERKQASVRATFVQDLLLSTLFGD

SEQ ID NO: 80952 - protein, 83 aa, Setaria italica
  Transcript Sequence Number=SeqID_14978
  Homolog annotation: Hit_ID=B4FDK3; Match level="QueryCoverage=37%, HitCoverage=12%, E-value=3e-11, Identity=96%"; Hit description=Fiber protein Fb2
  Subcellular localization annotation: CTP_CleavageSite=45; ConfidenceScore=5.21e-01
PTNLGGALPDYGDQAGVSAHLARTYGCLNSQSPNRVESTRPCTKVALSVACFPICSQRITRDMLNHITMQHGYLFKNGHRCRR

SEQ ID NO: 80953 - protein, 34 aa, Setaria italica
  Transcript Sequence Number=SeqID_14979
  Homolog annotation: Hit_ID=Q688X9; Match level="QueryCoverage=100%, HitCoverage=15%, E-value=1e-10, Identity=94%"; Hit description =Protein DEHYDRATION-INDUCED 19
SRLAAAKRFYAAQLGHSDRAGMEELDMDEEVRPE

SEQ ID NO: 80954 - protein, 66 aa, Setaria italica
  Transcript Sequence Number=SeqID_14980
  Homolog annotation: Hit_ID=B4FDK3; Match level="QueryCoverage=78%, HitCoverage=21%, E-value=4e-23, Identity=94%"; Hit description=Fiber protein Fb2
MIDLFSFSFLLSFQPCPICSQRITRDMLNHITMQHGYLFKNGHRCRRYIIPESHAISLLSRDLRGT

SEQ ID NO: 80955 - protein, 239 aa, Setaria italica
  Transcript Sequence Number=SeqID_14981
  Gene Ontology: Mol. function=transporter activity; Cellular component= integral to membrane; Biological process=response to antibiotic
  Homolog annotation: Hit_ID=B4FA49; Match level="QueryCoverage=97%, HitCoverage=46%, E-value=2e-80, Identity=64%"; Hit description =Carbohydrate transporter/ sugar porter/ transporter
PESLIAYLSDSEEFVKKYSTSNKNKGLLTNWPLMSSIFLFCITSFDDMAYSEIFSLWSESDKKYGGLSFSSEDVGNVLLVTGASILLYQTFIYPYIVKVLGLINSSRIAIILSMVLLFTYPPMANLSRPWISIVVNIASVLKSCSVATVVTCSFILQNNSVPQDQRATANGIATTLMSLFKAFAPAGAGVVFSWAQKHQHALIFPGDQMVFFLLDIVILFELIWTFKPFLDVPKQSSSS

SEQ ID NO: 80956 - protein, 137 aa, Setaria italica
  Transcript Sequence Number=SeqID_14982
  Gene Ontology: Mol. function=zinc ion binding; Cellular component =intracellular
  Homolog annotation: Hit_ID=B4FDK3; Match level="QueryCoverage=100%, HitCoverage=55%, E-value=1e-64, Identity=86%"; Hit description=Fiber protein Fb2
  Pfam annotation: Domain name=Di19; Domain location=1-134; Score= -54.9; E_value=0.00028; Accession=PF05605.4; Description=Drought induced 19 protein (Di19)
MQHGYLFKNGHRCRRYIIPESHAISLLSRDLRGTHLQALLGGGHSHRSSNTATTNISSDPLLSSFGLSFPTSDAPEPSKSTPSMPDGASVRKETPAQPWESSIDSSLTSEEREQKRKQATDRATFVQGLVLSTLFGD

SEQ ID NO: 80957 - protein, 306 aa, Setaria italica
  misc_feature (27)..(27): Xaa can be any naturally occurring amino acid
  Transcript Sequence Number=SeqID_14983
  Gene Ontology: Mol. function=transporter activity; Cellular component= integral to membrane; Biological process=response to antibiotic
  Homolog annotation: Hit_ID=B6SKE4; Match level="QueryCoverage=86%, HitCoverage=50%, E-value=5e-76, Identity=55%"; Hit description =Carbohydrate transporter/ sugar porter/ transporter
  Pfam annotation: Domain name=MFS_1; Domain location=1-298; Score=5.5; E_value=0.019; Accession=PF07690.8; Description=Major Facilitator Superfamily
EDIGFYAGFVGASYMLGRALTSIIWGXILADRIGRKPIIIITIFSILVFNTLFGLSVHYWMAIATRFLLGFLTGSVGTIRAYAVEVCRPEHHAIGLSLVNTSWAIALIIGPAIGGYLAQPTDKFPNLFSADSLFGRFPYFLPCLFISIFSFVVLISCIWLPETLHTHKLHKKEHPESLIAYLSDSEEFVKKYSTSNKNKGLLTNWPLMSSIFLFCITSFDDMAYSEIFSLWSESDKKYGGLSFSSEDVGNVLLVTGTNFRVQEMNLSTLFLFQSFMTKKRAKIGFIFMFRALAYSISLEIFFDRER

SEQ ID NO: 80958 - protein, 172 aa, Setaria italica
  misc_feature (61)..(61): Xaa can be any naturally occurring amino acid
  Transcript Sequence Number=SeqID_14984
  Gene Ontology: Mol. function=zinc ion binding; Cellular component =intracellular
  Homolog annotation: Hit_ID=B6TIV8; Match level="QueryCoverage=89%, HitCoverage=68%, E-value=1e-68, Identity=83%"; Hit description=Fiber protein Fb2
  Pfam annotation: Domain name=Di19; Domain location=5-169; Score=36.2; E_value=1.1e-10; Accession=PF05605.4; Description=Drought induced 19 protein (Di19)
SPNRVESSRSCTKVALTLACPVCSEMVTRDMVNHITMQHGYLFKNRRRLRRFIIPGSQALXLLSRDLREAHLQVLLGGGHRSSNNNNTTNISADPLLSSFGLSFPTSDAEQTSKSTISVPDDATMAKETPAQARKLSIDSSLTSEEREQKRKQASVRATFVQDLLLSTLFGD

SEQ ID NO: 80959 - protein, 161 aa, Setaria italica
  misc_feature (89)..(89): Xaa can be any naturally occurring amino acid
  Transcript Sequence Number=SeqID_14985
  Gene Ontology: Mol. function=protein binding; Cellular component =photosystem I reaction center; Biological process=photosynthesis
  Homolog annotation: Hit_ID=B6SRI3; Match level="QueryCoverage=93%, HitCoverage=66%, E-value=1e-78, Identity=96%"; Hit description =Photosystem I reaction center subunit III
  Pfam annotation: Domain name=PSI_PsaF; Domain location=1-156; Score =332.5; E_value=8.2e-97; Accession=PF02507.7; Description=Photosystem I reaction centre subunit III
MVALMARAGALSEAFAKREKNSIKKLTTSLNKYAPDSAPALAINATIEKTKRRFENYGKFGLLCGADGLPHLIVSGDQRHWGEFITPGXLLFLYIAGWIGWVGRSYLIAISGEKKPAMREIIIDVELASRLLPRGFIWPVAAYRELINGDLVVDDKDIGYY

SEQ ID NO: 80960 - protein, 80 aa, Setaria italica
  Transcript Sequence Number=SeqID_14986
  Gene Ontology: Mol. function=protein serine/threonine kinase activity; Biological process=protein amino acid phosphorylation
  Homolog annotation: Hit_ID=O80540; Match level="QueryCoverage=100%, HitCoverage=8%, E-value=1e-24, Identity=64%"; Hit description =F14J9.26 protein
  Pfam annotation: Domain name=DUF579; Domain location=1-79; Score =74.4; E_value=4.2e-19; Accession=PF04669.5; Description=Protein of unknown function (DUF579)
GWTPEAPGRMGAIYTAGMAARARRPGEGATDVFVHDVDRPVEDAFSKAFLCEGYLAEQVGRIRHFVIPSHREKEGTPFCP

SEQ ID NO: 80961 - protein, 402 aa, Setaria italica
  Transcript Sequence Number=SeqID_14987
  Gene Ontology: Mol. function=ATP-dependent helicase activity; Cellular component=plasma membrane; Biological process=interspecies interaction between organisms
  Homolog annotation: Hit_ID=Q2R1M8; Match level="QueryCoverage=97%, HitCoverage=62%, E-value=0.0, Identity=88%"; Hit description=DEAD -box ATP-dependent RNA helicase 52C
  Pfam annotation: Domain name=DEAD; Domain location=64-249; Score =249.6; E_value=7.5e-72; Accession=PF00270.21; Description=DEADDEAH box helicase
  Pfam annotation: Domain name=Helicase_C; Domain location=320-396; Score=132.1; E_value=1.8e-36; Accession=PF00271.23; Description =Helicase conserved C-terminal domain
  Pfam annotation: Domain name=ResIII; Domain location=60-244; Score= -33.5; E_value=0.034; Accession=PF04851.7; Description=Type III restriction enzyme, res subunit
  Pfam module annotation: Pfam domain module=DEAD::Helicase_C::ResIII; Domain location=64-249::320-396::60-244
LAAADGTAPFEEHQNTGTFFGPYEDIPVETSGREVPPPVATFAEIDLGDALNENIRRCRYVRPTPVQRYAIPISLAGRDLMACAQTGSGKTAAFCFPIISGIMRGPPAGRPQRGGGMGMRTAYPSALILSPTRELSMQIHEEARKFSYQTGVRVVVAYGGAPITQQLRDLERGVDILVATPGRLVDLLERARVSLQSIRYLALDEADRMLDMGFEPQVRRIVEQMDMPPPGVRQTLLFSATFPKEIQRMASDFLENYIFLAVGRVGSSTELIVQRIEFVQEADKRSHLMDLLHAQRDTGKQNLTLVFVETKRGADSLESWLCMNGFPATSIHGDRNQQEREYALRSFKSGQTPILVATDVAARGLDIPHVAHVVNFDLPNDIDDYVHRIGRTGRAGKSGLCN

SEQ ID NO: 80962 - protein, 171 aa, Setaria italica
  Transcript Sequence Number=SeqID_14988
  Gene Ontology: Mol. function=ATP-dependent helicase activity; Cellular component=plasma membrane; Biological process=translation
  Homolog annotation: Hit_ID=Q2R1M8; Match level="QueryCoverage=60%, HitCoverage=16%, E-value=1e-52, Identity=96%"; Hit description=DEAD -box ATP-dependent RNA helicase 52C
  Pfam annotation: Domain name=GRP; Domain location=58-165; Score= -25.7; E_value=0.037; Accession=PF07172.3; Description=Glycine rich protein family
  Pfam annotation: Domain name=Helicase_C; Domain location=1-59; Score =78.5; E_value=2.5e-20; Accession=PF00271.23; Description=Helicase conserved C-terminal domain
  Pfam module annotation: Pfam domain module=GRP::Helicase_C; Domain location=58-165::1-59
QEREYALRSFKSGQTPILVATDVAARGLDIPHVAHVVNFDLPNDIDDYVHRIGRTGRAGKSGLATAFFNDNNSSLAKSLAELMQESNQEVPAWLSRYAARPSYGGGGGRNRRSGGGNRFGGRDFRNDSSSFSKGGSRGGGGDYYGGGSSGGGSSSYGGGGYGGAGAPSAWD

SEQ ID NO: 80963 - protein, 298 aa, Setaria italica
  misc_feature (31)..(31): Xaa can be any naturally occurring amino acid
  Transcript Sequence Number=SeqID_14989
  Gene Ontology: Mol. function=nucleic acid binding
TKDDVSVVCARLQRLMGMDANGSQHRSGRIXPPGDSSSRTSTCSGISKDICINAERLLPNGANRNTCLPPATTSRDSSISSGSPSSTASAVIHQSNYHESIHNNQQNLSDPKSQKYIPPGGRSRSSTTSVQHMQHPCRPIEGTSLESSSNMSLVSQGSKGHLNEQLDSNNDKSEASSQLGNDTSNSKQTTSAENGTSDTSQQKPQYSNVVSQGQVVPSRRFTVLGRPKATGQISNGTSSSTKLALVKTEHSDRVTLPRSHLVSQSLEQLSQQGFSYCQISCWSREKNGCPDIIEKLVP

SEQ ID NO: 80964 - protein, 678 aa, Setaria italica
  Transcript Sequence Number=SeqID_14990
  Gene Ontology: Mol. function=protein serine/threonine kinase activity; Cellular component=membrane; Biological process=protein amino acid phosphorylation
  Homolog annotation: Hit_ID=B9S4N3; Match level="QueryCoverage=87%, HitCoverage=57%, E-value=1e-132, Identity=44%"; Hit description =Protein phosphatase 2c, putative
  Pfam annotation: Domain name=Pkinase; Domain location=220-674; Score =22.9; E_value=7.4e-10; Accession=PF00069.17; Description=Protein kinase domain
  Subcellular localization annotation: CTP_CleavageSite=28; ConfidenceScore=5.06e-01
MLHANLHVNQDFGSSAITQHNLADYVVRVALQKGTTDNVAAVVVPLGSPSSAGTTLEDWSQFEENLKTSILPVQNIPYQLKPDDITSSAVIDMEYFRRSSTKFQRFLVEAKLKRLGCFYLSESLDEDMDYIFRVPEAYQREEVHEFNHIPPDAALYSDGNLEKYKDRQFCLYLGHQDGEMGRCNGPEAVANFFGLLDSLPHNGSKSNGSHSFGNKIDFRYKRKRRFDRGSYGEVWLAFHWNCSEDRDAHKEPQHFTTIPKSDSYNCTNSNTMSSDEDHVSETVDGDLFILKRIMVERGNAAYLSGLREKYFGELFSNASRTLEGMSRTESSSTIFSMDMQSDTDILLERNMSVTEEPLKHVARFIESFESESREIWLVYHNEGRSLSKLIYTAEETKLVTGNNNEEVRHIQVLHPSKWWYWLRTTKAGQNQMQNLLWQLLMGLKACHDRNITHRDIKPENMIICFEDVETGKCLREVPSEAKKNKLNMRLIDFGSAIDDYTLKHLYGSGPTRSEQTFEYTPPEALLNSNWFQGSKSARLKYDIWSVGVVMLELIMGSPHIFQISDRTRVLMDQRLEGWSEQTKELAYKLRSYMELCILIPGISTQHGSGSSEQGQFGLASWKCSEESFAHQVKIRDPLKMGFPNLWALRLARQLLVWHPEDRLSVDEALNHPYFQETP

SEQ ID NO: 80965 - protein, 237 aa, Setaria italica
  Transcript Sequence Number=SeqID_14991
  Gene Ontology: Mol. function=phosphatidylinositol phosphate kinase activity; Biological process=phosphatidylinositol metabolic process
  Homolog annotation: Hit_ID=Q9M1K2; Match level="QueryCoverage=99%, HitCoverage=30%, E-value=4e-96, Identity=71%"; Hit description =Putative phosphatidylinositol-4-phosphate 5-kinase 4
  Pfam annotation: Domain name=PIP5K; Domain location=1-233; Score =217.3; E_value=3.9e-62; Accession=PF01504.10; Description =Phosphatidylinositol-4-phosphate 5-Kinase
LHCVKLAGANQKKVRFVIMGNLFCSEYPIHRRFDLKGSSLGRTTDKPQTEIDQYTTLKDLDLNFIFRLKKQWFQEFQRQVDRDCEFLEQEKIMDYSLLVGVHFRDNREKLLSEGSIDYDINNILTPCLSRGNTGQLLADPNRCPKIKLGANMPSRAELTARKSDCELQLIGEPTGEYYDVILYFGIIDILQDYDISKKLEHAYKSFQYDATSISAVDPRQYSRRFRDFIYKAFQEDG

SEQ ID NO: 80966 - protein, 128 aa, Setaria italica
  Transcript Sequence Number=SeqID_14992
  Gene Ontology: Mol. function=hydrolase activity; Biological process =lipid catabolic process
NTIRIQGTGSRRGGGGGRAPRACGGETREQAVWKAEAMLLQRSVESVLFQGRKLAGETNAEKLERFARELAKEHARPEAAAAGRSTGEPRRRYAGRRFFSHTQADAAQGNHVVVVSQQHRRFNGGRET

SEQ ID NO: 80967 - protein, 92 aa, Setaria italica
  Transcript Sequence Number=SeqID_14993
  Gene Ontology: Mol. function=kinase activity; Cellular component =nucleus; Biological process=cell cycle
  Homolog annotation: Hit_ID=B6TP49; Match level="QueryCoverage=100%, HitCoverage=47%, E-value=3e-27, Identity=70%"; Hit description=CDK -activating kinase assembly factor MAT1 family protein
AEDLAAALKASRMNPVKTDADDTDVGSSQGISGGAGFQGQYAPAAVPGGMGQPRPTGMPPQPIGGRSDPLQGDDEETRRLRAERAARAGGWT

SEQ ID NO: 80968 - protein, 179 aa, Setaria italica
  Transcript Sequence Number=SeqID_14994
  Gene Ontology: Mol. function=kinase activity; Cellular component =nucleus; Biological process=cell cycle
  Homolog annotation: Hit_ID=B6TP49; Match level="QueryCoverage=100%, HitCoverage=92%, E-value=3e-76, Identity=78%"; Hit description=CDK -activating kinase assembly factor MAT1 family protein
  Pfam annotation: Domain name=MAT1; Domain location=3-178; Score=6.6; E_value=1.8e-06; Accession=PF06391.5; Description=CDK-activating kinase assembly factor M
MTIRRKMASIFNKTREHFPTLKDYNDYLEEVEDMTFNLIEGIDVDAIEAKIARYQKENSEQIVLSRAKRAEDLAAALKASRMNPVKTDADDTDVGSSQGISGGAGFQGQYAPAAVPGGMGQPRPTGMPPQPIGGRSDPLQGDDEETRRLRAERAARAGGWTIELSKRRAMEEAFSAIFI

SEQ ID NO: 80969 - protein, 132 aa, Setaria italica
  Transcript Sequence Number=SeqID_14995
  Gene Ontology: Mol. function=transporter activity; Cellular component= integral to membrane; Biological process=transport
  Homolog annotation: Hit_ID=B9SY49; Match level="QueryCoverage=80%, HitCoverage=19%, E-value=1e-27, Identity=52%"; Hit description =Organic cation transporter, putative
  Subcellular localization annotation: CTP_CleavageSite=79; ConfidenceScore=5.47e-01
PIGPSRRGAAGMSTFYFFSGGIAALAGVAALFPRSWRALYVVTSLPSLAFVAAVVPFVSESPRWYLVRRRADDAMRVLRAIAVANGRTVPDDVTLKLDDEDEEGTKGVDDESANSSSSSGSIVDVFRSRTTR

SEQ ID NO: 80970 - protein, 109 aa, Setaria italica
  Transcript Sequence Number=SeqID_14996
  Gene Ontology: Mol. function=aspartic-type endopeptidase activity; Biological process=proteolysis
  Homolog annotation: Hit_ID=Q5JQU0; Match level="QueryCoverage=80%, HitCoverage=53%, E-value=4e-12, Identity=42%"; Hit description =OSJNBa0061C06.12 protein
MVRLKWGSPLLWLVLFSSSLTFTTCAGLRLELTHLDANCTVEERMRRAMARTRHQLAWTDAVSAPVHWVRSQYIAEYPIGDPPQQAEAIIDTGSNLMWTQCSGCRSSST

SEQ ID NO: 80971 - protein, 219 aa, Setaria italica
  misc_feature (135)..(135): Xaa can be any naturally occurring amino acid
  Transcript Sequence Number=SeqID_14997
  Gene Ontology: Mol. function=aspartic-type endopeptidase activity; Biological process=proteolysis
  Homolog annotation: Hit_ID=B6TS94; Match level="QueryCoverage=95%, HitCoverage=46%, E-value=1e-10, Identity=35%"; Hit description =Aspartic proteinase nepenthesin-1
  Subcellular localization annotation: CTP_CleavageSite=57; ConfidenceScore=5.17e-01
IIDTGSNLMWTQCSGCRSSSTSCFSQGLSIYDPSQSRTAHQPVACGDAACSLGSETRCAGDGQACGVFTSYGAGTITGLLRTEEFTFGSEKVTLDFGCITATRITPGSLDGASGIIGLGRGGLSLVSQLRDTTFXLTPYSTDTVDQSHLFVGSSAGPSPGNNAPVTSVPFVESPNGDPFSTSTFYYLPLTGITVGGTSLDVPAAAFGLRQVSSGDWEVT

SEQ ID NO: 80972 - protein, 261 aa, Setaria italica
  Transcript Sequence Number=SeqID_14998
  Gene Ontology: Cellular component=integral to membrane
  Homolog annotation: Hit_ID=Q5Z570; Match level="QueryCoverage=98%, HitCoverage=95%, E-value=5e-31, Identity=37%"; Hit description =Embryogenesis transmembrane protein-like
YFNATAFMSSLVVIMLLVSKRLYSKGLEGYALHACVLIDLISLMGAFAAGSCRKVSTSVYVILVVVAVAVYVMIQVVVLTFAKDKVNNLLEKMYTFGLSERQYPSMNHERSIRSKKRTEHKWRKDLMLIGTLAVTVTYQAGLLPPGGFWPDDQVGQHFAGDPILHDTHPTRFKVFFYCNATAFMASMVMVILLLNNTISKYRRSLLAMKTAMVLDLLGLLGAYAAGSCRKLKTSAYIFALFIAVFIYIVIHVLLSFDRCLY

SEQ ID NO: 80973 - protein, 76 aa, Setaria italica
  Transcript Sequence Number=SeqID_14999
GRARLTTVPACRCCACTARSPLLPLPVVAHAFRVHCSPCRQPLDLKRSTHLSPAVAHALDLLLLHFFFLLLVLLPS

SEQ ID NO: 80974 - protein, 65 aa, Setaria italica
  Transcript Sequence Number=SeqID_15000
  Gene Ontology: Mol. function=drug transporter activity; Cellular component=membrane; Biological process=multidrug transport
  Homolog annotation: Hit_ID=B6TU04; Match level="QueryCoverage=70%, HitCoverage=9%, E-value=6e-18, Identity=89%"; Hit description =Antiporter/ drug transporter/ transporter
DARASPPSPPAVAARALLDLPCCLNTCLEWWSYEILVLLTGRLPDARRMVAVIAVTLNFDYLLFA

SEQ ID NO: 80975 - protein, 151 aa, Setaria italica
  misc_feature (14)..(14): Xaa can be any naturally occurring amino acid
  Transcript Sequence Number=SeqID_15001
  Gene Ontology: Mol. function=drug transporter activity; Cellular component=membrane; Biological process=multidrug transport
  Homolog annotation: Hit_ID=B6TU04; Match level="QueryCoverage=68%, HitCoverage=21%, E-value=6e-21, Identity=51%"; Hit description =Antiporter/ drug transporter/ transporter
  Pfam annotation: Domain name=MatE; Domain location=45-151; Score= -17.0; E_value=0.018; Accession=PF01554.10; Description=MatE
DLAVAAMIAAYVLXHELQAGRRRSTTTTTCSSTLTWLGLLRLALPCCLNTCLEWWSYEILVLLTGRLPDARRMVAVIAVTLNFDYLLFAGMLSLSVSASVRVSNELGAGDATLARRAARVSIAGGAIAGVAGGLVMLAARRPWARMYHPQP

SEQ ID NO: 80976 - protein, 46 aa, Setaria italica
  Transcript Sequence Number=SeqID_15002
CLIASLIYISPTNNLLLLVSPHVREKRQMQAVVGSIFTTPTSNNKS

SEQ ID NO: 80977 - protein, 421 aa, Setaria italica
  Transcript Sequence Number=SeqID_15003
  Gene Ontology: Mol. function=sequence-specific DNA binding; Cellular component=nucleus; Biological process=regulation of transcription, DNA-dependent
  Homolog annotation: Hit_ID=B2ZTC6; Match level="QueryCoverage=61%, HitCoverage=47%, E-value=8e-83, Identity=60%"; Hit description=BEL14 protein (Fragment)
  Pfam annotation: Domain name=Homeobox; Domain location=304-362; Score= 3.3; E_value=0.0057; Accession=PF00046.21; Description=Homeobox domain
  Pfam annotation: Domain name=POX; Domain location=115-249; Score =197.7; E_value=3.2e-56; Accession=PF07526.3; Description=Associated with HOX
  Pfam module annotation: Pfam domain module=Homeobox::POX; Domain location=304-362::115-249
AVHHPHLLDFSPPPNTVAMEPPPPSFDHGHLLALHVDGTDMTVGGGGGVVPTHHRVLAADDTAAWPQAAVSLSLYNYNAAGGPSSLFGHHQHQFAVPPAAAVSSLAPTSSMQRPFQLRSSKYLVPVQELLSEFCSLEGDLLHAMNGGVNKRALNGGNKWDDVETSSSSGLWGHPSLSSMDLLELERMKARLLSMVEEVDRRYRRYREQMRAVEVSFEAVAGAGASQVYTRLALRAMSRHFRCLRDALVAQVRALRKAMGERDGSASSPAGATKGDTPRLKVLDQCLRQQRAFQQPGTIENYPWRPQRGLPERAVAVLRAWLFEHFLHPYPNDVDKHILARQTGLSRSQVSNWFINARVRLWKPMIEDMYTEEVKQQSEAAQNPSGGGAGAGAGAVKPEQQSTTTIGESAFRITSAGNNPTT

SEQ ID NO: 80978 - protein, 144 aa, Setaria italica
  Transcript Sequence Number=SeqID_15004
  Gene Ontology: Mol. function=sequence-specific DNA binding; Cellular component=nucleus; Biological process=regulation of transcription, DNA-dependent
  Homolog annotation: Hit_ID=Q38897; Match level="QueryCoverage=99%, HitCoverage=28%, E-value=2e-09, Identity=31%"; Hit description =Homeobox protein BEL1 homolog
VSNWFINARVRLWKPMIEDMYTEEVKQQSEAAQNPSGGGAGAGAGAVKPEQQSTTTIGESAFRITSAGNNPTTTSINVTDGGDHHHLLGSYPSLHGSVSLTLGLQQQPFASPMMMMLHGEETEEPVLPYIDLTAGSQFLHDLAG

SEQ ID NO: 80979 - protein, 114 aa, Setaria italica
  misc_feature (68)..(68): Xaa can be any naturally occurring amino acid
  Transcript Sequence Number=SeqID_15005
VSNWFINARVRLWKPMIEDMYTEEVKQQSEAAQNPSGGGAGAGAGAVKPEQQSTTTIGESAFRITSAXEQPLGLQQQPFASPMMMMLHGEETEEPVLPYIDLTAGSQFLHDLAG

SEQ ID NO: 80980 - protein, 63 aa, Setaria italica
  Transcript Sequence Number=SeqID_15006
MNKKKGMEGGQSESVKGPGPGMVFWSRSCSRPYTSMSPGFLATNLIIRGHFSQAVHVHASALE

SEQ ID NO: 80981 - protein, 172 aa, Setaria italica
  Transcript Sequence Number=SeqID_15007
  Gene Ontology: Mol. function=protein binding; Cellular component =signalosome; Biological process=red or far red light signaling pathway
  Homolog annotation: Hit_ID=B6THB6; Match level="QueryCoverage=85%, HitCoverage=33%, E-value=7e-77, Identity=91%"; Hit description=COP9 signalosome complex subunit 1
  Pfam annotation: Domain name=RPN7; Domain location=104-172; Score= -46.0; E_value=0.026; Accession=PF10602.1; Description=26S proteasome subunit RPN7
MDVEGEVPAAAAAAIANGLGGGEEASPAPFSAEQLDVEAYAAQYSGRTRLARLIFIADRCGVEAMQLEALRMAYDEIKRGEDVQLHRDVAVKINGRLGPRYGLDQAWVDTVARRAEQRKEKLENELNGYRTNLIKESIRMGYNDIGDFFYAHGQLSDAFKSYIRTRDYCTTS

SEQ ID NO: 80982 - protein, 170 aa, Setaria italica
  misc_feature (158)..(158): Xaa can be any naturally occurring amino acid
  Transcript Sequence Number=SeqID_15008
  Gene Ontology: Mol. function=protein binding; Cellular component =signalosome; Biological process=red or far red light signaling pathway
  Homolog annotation: Hit_ID=B6THB6; Match level="QueryCoverage=99%, HitCoverage=37%, E-value=5e-81, Identity=89%"; Hit description=COP9 signalosome complex subunit 1
  Pfam annotation: Domain name=RPN7; Domain location=31-170; Score =141.2; E_value=3.3e-39; Accession=PF10602.1; Description=26S proteasome subunit RPN7
RNEIKRGEDVQLHRDVAVKINGRLGPRYGLDQAWVDTVARRAEQRKEKLENELNGYRTNLIKESIRMGYNDIGDFFYAHGQLSDAFKSYIRTRDYCTTSKHIVQMCMNVILVSIELGQFAHVTNYVSKAEQTPDSLDPIIVAKLRAAAGLANLETRNXQIAARKFVETGI

SEQ ID NO: 80983 - protein, 416 aa, Setaria italica
  Transcript Sequence Number=SeqID_15009
  Gene Ontology: Mol. function=ubiquitin-protein ligase activity; Cellular component=nucleus; Biological process=ubiquitin-dependent protein catabolic process
  Homolog annotation: Hit_ID=B9RCS8; Match level="QueryCoverage=96%, HitCoverage=98%, E-value=1e-128, Identity=55%"; Hit description =Protein binding protein, putative
  Pfam annotation: Domain name=PHD; Domain location=134-196; Score =18.8; E_value=0.00023; Accession=PF00628.21; Description=PHD-finger
  Pfam annotation: Domain name=zf-UBR; Domain location=46-115; Score =72.8; E_value=1.2e-18; Accession=PF02207.12; Description=Putative zinc finger in N-recognin (UBR b
  Pfam module annotation: Pfam domain module=PHD::zf-UBR; Domain location=134-196::46-115
MADTARDGVDAFADEVEPTLTIGEYIEGIEAEELEVDLVLGGDDGKECTYAGGYLKRQAVFSCLTCVPDGVAGVCTACSLACHDGHEIVELWTKRRFRCDCGNSKFGGHLCKLCPEKDSENPENCYNHNFKGSYCTCGRPYPDPEAKEQVEMIQCCICEDWFHEDHIGLNSIEEIPRDEEGEPLYEDFICHKCSPVCHFLKLYPQTIWASGKQKLASQTDTSNSTVMEGGPSDQANIEKHENGDLVDHMCGEKTSMENGTAKDIAVPEKANLGSSSGDICKLGMDVNTMPAVTERNMPFFMSKGWRDTLCRCETCTNFYAQQGIAYLVDKEDSIEEYEKIAKQKREKKLEQQEGAETNFLNSLNHVQKIEILSGINDMKNEFQSFLESFDSSKPVTSEDIRSVFENLAKKKKQRLS

SEQ ID NO: 80984 - protein, 375 aa, Setaria italica
  Transcript Sequence Number=SeqID_15010
  Homolog annotation: Hit_ID=Q01JE0; Match level="QueryCoverage=94%, HitCoverage=41%, E-value=1e-172, Identity=80%"; Hit description =B0402A04.2 protein
YDSFTTLLPSRRDGEGGGGGAAWDATASRLYAWDPSACGAHRIGVRIRDPEVENDGGEVAVEAAVPSEILMPETDLGYVVTHVSLNTDGSSLLLVGSHHLSVLYVHERVSEDGDTIICRTAPVASQILPSNSDGIKVLQASWHPFSNNHFAVLTSDAVFRLFDLSSDLEQPEQEFYLQPILPGKCQNASAICPVAFSYGSDHLWDRFSLFILFSDGSIFVLCPVVPFGSDYSKKHIQEIYEDVNAFGLKSSNPNVVTNSHLAIAWLEATFPDLLHQSTETSLLMSKAHPYAPVDDSLTLQGPLCRVCEENNESEAKTSTCEGKAVGFMYSSAGKDSVLVTAWGSGQLQVDALADEIQPQWNIGIPTRLNVDSHGK

SEQ ID NO: 80985 - protein, 111 aa, Setaria italica
  Transcript Sequence Number=SeqID_15011
  Homolog annotation: Hit_ID=B6TX39; Match level="QueryCoverage=100%, HitCoverage=53%, E-value=3e-32, Identity=60%"; Hit description=YLS9
RFRGAVLSPAAAAASPSEFYQRRKTAQAVRLEFDGKSVAVPGDVSTELENEVKGAAMLSLELSVNVRVRYVFGTIKIRQKPRVWCAVSIPVPTTPGGFSFLGTDDRCWVKY

SEQ ID NO: 80986 - protein, 41 aa, Setaria italica
  Transcript Sequence Number=SeqID_15012
VIQSYPDKPPTVRFQTRINMTCVNQETGLVLMHLFSYMPTS

SEQ ID NO: 80987 - protein, 402 aa, Setaria italica
  misc_feature (387)..(387): Xaa can be any naturally occurring amino acid
  Transcript Sequence Number=SeqID_15013
  Gene Ontology: Mol. function=transcription regulator activity; Cellular component=nucleus; Biological process=protein modification process
  Homolog annotation: Hit_ID=Q10PJ7; Match level="QueryCoverage=93%, HitCoverage=47%, E-value=4e-96, Identity=53%"; Hit description=Helix- loop-helix DNA-binding domain containing protein, expressed
  Pfam annotation: Domain name=F-box; Domain location=330-377; Score =33.4; E_value=9e-07; Accession=PF00646.25; Description=F-box domain
MKLRLRSMEARGGAAAVETHRVDLPPTATLGDVKTLLAAKLSALPVPAESVRLSLNRSEELVSPDPAATLPALGLASGDLVFFALSPLTALAPPAQALPRNPSPGSGSVPTAMAVDGGKGSEKPSTGGSSLQARAVVVNPSVPAASSPADVVMAETVDATKGWSSFVLRDLKREMGNVVGAEGTAGGRLVAALHAALLEFGFHITNPMGSRLSLPPDWPPVASKPLAIKYTIPELSPMLHVAEEGKVAVLNFSLMPNFVIVYGYVPGAQSEVRRLCLELPRLEPLLYLDSDQLSAVQERGILDLWTVLKDEMCLPLMISLCQLNGLRLPPCLMALPADLKSKVLDLLPGDDLARVECTCKEMRNLAADDSLWKKFVQFRNSGEGPRXVHEREGHICRSMAGQ

SEQ ID NO: 80988 - protein, 261 aa, Setaria italica
  misc_feature (22)..(22): Xaa can be any naturally occurring amino acid
  Transcript Sequence Number=SeqID_15014
  Gene Ontology: Mol. function=hydrolase activity, hydrolyzing O -glycosyl compounds; Cellular component=extracellular region; Biological process=carbohydrate metabolic process
  Homolog annotation: Hit_ID=B5U8Y9; Match level="QueryCoverage=98%, HitCoverage=26%, E-value=1e-137, Identity=88%"; Hit description =Alpha-glucosidase
  Pfam annotation: Domain name=Glyco_hydro_31; Domain location=1-261; Score=51.6; E_value=3.1e-12; Accession=PF01055.18; Description =Glycosyl hydrolases family 31
MIGRPAPMPYWAFGFHQCRWGXYKNTVGVEGVVEGYRNAQIPLDVIWNDDDHMDAAKDFTLDPVNYPRPKLLAFLDKIHARGMKYIVLIDPGIAVNNSYGVYQRGMARDIFIKLDGQPYLAQVWPGPVYFPDFLNPNGVSWWIDEVRRFHDLVPVDGLWIDMNEASNFCTGKCTIPKKHQCPIPDSKTPWVCCLDCKNLTNTRWDEPPYKINASGQTARLGFNTIATSASHYNGILEYNAHSLYGFSQAIATHKALQGSRV

SEQ ID NO: 80989 - protein, 299 aa, Setaria italica
  misc_feature (228)..(228): Xaa can be any naturally occurring amino acid
  Transcript Sequence Number=SeqID_15015
  Gene Ontology: Mol. function=protein kinase activity; Cellular component=plasma membrane; Biological process=protein amino acid phosphorylation
  Homolog annotation: Hit_ID=B6SWG2; Match level="QueryCoverage=99%, HitCoverage=43%, E-value=1e-114, Identity=72%"; Hit description =Protein kinase
  Pfam annotation: Domain name=Pkinase; Domain location=64-298; Score =21.1; E_value=9.5e-10; Accession=PF00069.17; Description=Protein kinase domain
  Pfam annotation: Domain name=Pkinase_Tyr; Domain location=73-297; Score=-17.9; E_value=1.5e-12; Accession=PF07714.9; Description =Protein tyrosine kinase
  Pfam module annotation: Pfam domain module=Pkinase::Pkinase_Tyr; Domain location=64-298::73-297
  Subcellular localization annotation: CTP_CleavageSite=38; ConfidenceScore=5.49e-01
GKVVIDVSSSADYDALASGKQTTNTTTSSSSSAARSLVASDVRGAVEALTVYKYSELEKATAGFAEERQVPGTSVYRAVINGDAAAVKRVVGDVSGQVGILMRVNHSCLVRLSGLCVHRGDTYLVFEFAENGALSDWLHGRGGGGGSGSTLRWRQRVQVAFDVADGLNYLHHYTNPPCVHKNLKSSNVLLDGDLRAKVSSFGLARAVAAADGGAQLTRHVVGTQGYLXAPEYLEHGLITPKLDVFAFGVILLELLSGKEAAFADAETGEETLLWEAAEEALVADGGEDVDRAKVRAFVG

SEQ ID NO: 80990 - protein, 88 aa, Setaria italica
  misc_feature (26)..(26): Xaa can be any naturally occurring amino acid
  Transcript Sequence Number=SeqID_15016
  Subcellular localization annotation: CTP_CleavageSite=12; ConfidenceScore=5.15e-01
LGTGTDRARRKAASLGRACRRWAAAXRSRAPPCAPPPAPRRRSRWRRELHYTIRSRNYIFFSTTILVQNLFLVIEAFHDSLARTAGSE

SEQ ID NO: 80991 - protein, 419 aa, Setaria italica
  misc_feature (61)..(61): Xaa can be any naturally occurring amino acid
  Transcript Sequence Number=SeqID_15017
  Gene Ontology: Mol. function=IMP dehydrogenase activity; Cellular component=cytosol; Biological process=purine nucleotide biosynthetic process
  Homolog annotation: Hit_ID=Q9AY75; Match level="QueryCoverage=99%, HitCoverage=83%, E-value=0.0, Identity=87%"; Hit description=Inosine- 5'-monophosphate dehydrogenase
  Pfam annotation: Domain name=CBS; Domain location=26-136; Score=16.2; E_value=0.0036; Accession=PF00571.20; Description=CBS domain
  Pfam annotation: Domain name=DUF561; Domain location=90-321; Score= -134.0; E_value=0.024; Accession=PF04481.4; Description=Protein of unknown function (DUF561)
  Pfam annotation: Domain name=His_biosynth; Domain location=118-302; Score=-121.9; E_value=0.062; Accession=PF00977.13; Description =Histidine biosynthesis protein
  Pfam annotation: Domain name=IMPDH; Domain location=1-409; Score =476.4; E_value=4e-140; Accession=PF00478.17; Description=IMP dehydrogenase  GMP reductase domain
  Pfam annotation: Domain name=NPD; Domain location=53-394; Score= -123.6; E_value=0.008; Accession=PF03060.7; Description=2 -nitropropane dioxygenase
  Pfam module annotation: Pfam domain module=CBS::DUF561::His _biosynth::IMPDH::NPD; Domain location=26-136::90-321::118-302::1 -409::53-394
  Subcellular localization annotation: CTP_CleavageSite=18; ConfidenceScore=5.17e-01
AAVVHCNTEPDAQAAIVRAAKSRRLPFVSSVPFFAPSSAPTLNDFAGYEYALVTELGDSLXRLVGVAVAADAASREVPAPVSEYMLPAPRSASASFDFEQAAAFLADEGLDCAPLISDDGEVIDLITAKDVERIRSYPKLGKPSLGADGKFIVAASIGTREDDKRRLEQLVKAGANAIVIDSSQGNSIYQLDMIKYAKKMYPEVDLIGGNVVTIAQAQNLIQAGVDGLRVGMGSGSICTTQEVCAVGRGQATAVYKVSSYANDHNVPVIADGGISNSGHIVKALSLGASTVMMGSFLAGSHEAPGTYEYKDGRRVKKYRGMGSLEAMTKGSDARYLGDTLKLKVAQGVVGAVADKGSVLRFIPYTMQAVKQGFQDLGASSLQSAHDLLRSETLRLEVRTGAAQVEGGIHGLVSYEKKAF

SEQ ID NO: 80992 - protein, 319 aa, Setaria italica
  misc_feature (215)..(215): Xaa can be any naturally occurring amino acid
  Transcript Sequence Number=SeqID_15018
  Gene Ontology: Cellular component=cell wall
  Homolog annotation: Hit_ID=B6TFP8; Match level="QueryCoverage=40%, HitCoverage=77%, E-value=2e-51, Identity=77%"; Hit description =Disease resistance response protein 206
  Pfam annotation: Domain name=Dirigent; Domain location=6-172; Score =153.6; E_value=6e-43; Accession=PF03018.6; Description=Dirigent-like protein
MAAKAVLLLLLLSVLLAAEAADDGTTTHLSFFMHDIVSGSNPTAVKVIKGPGSTTAPALGMAFGDTTVVDDALTEASSPSSAAVGRMQGIYMLSSQSGAALMVCANLLLTSGDHNGSTIAVLGRDDTDADVRELAVVGGTGKFRMASGYVLWKTSSMSGADATVKLDVYLTTGGGNGTIDADAPASPVGGGGGSPSGSSGTKASSGGARTTGGGXGRRRRRGCGGWILGLVRKLIGDVWWWRAQSRPADTDRVEKFGEMSVYARSGGADSFYCMWLHHGFPLFISFLCPHTLLHRSTMWLLLFTDEAFLLSLTKKKKKQ

SEQ ID NO: 80993 - protein, 69 aa, Setaria italica
  misc_feature (52)..(52): Xaa can be any naturally occurring amino acid
  Transcript Sequence Number=SeqID_15019
  Gene Ontology: Mol. function=ATPase activity, coupled to transmembrane movement of substances; Cellular component=integral to membrane; Biological process=transport
  Homolog annotation: Hit_ID=B9HYE2; Match level="QueryCoverage=100%, HitCoverage=10%, E-value=1e-17, Identity=65%"; Hit description =Peroxisomal membrane ABC transporter family, PMP family (Fragment)
LRWRSWMTSYYMKRYFNNRTFYKIQSQSIIDNPDQRINDDLSAFTGTALAFXLTLFNAAVDLISFSNIL

SEQ ID NO: 80994 - protein, 82 aa, Setaria italica
  Transcript Sequence Number=SeqID_15020
AVGEEVGGGRGRRRLGGRRGGEGDGHGRDGGHGSRKSAVECAGRRREGREEQEAALKQLRKSLVIRAKPMPSFYQERPPQGT

SEQ ID NO: 80995 - protein, 344 aa, Setaria italica
  Transcript Sequence Number=SeqID_15021
  Homolog annotation: Hit_ID=B6TU56; Match level="QueryCoverage=98%, HitCoverage=92%, E-value=1e-98, Identity=59%"; Hit description=Seed specific protein Bn15D14A
  Pfam annotation: Domain name=TPX2; Domain location=198-254; Score =91.0; E_value=4.1e-24; Accession=PF06886.3; Description=Targeting protein for Xklp2 (TPX2)
YLFCSPIVKEALEISTDEESDVVICHPNGDSNTDGCDEATSGNHDDDSPEDQVTSSVKDPNVEGDTQEDKCVNQESLKLIDQEQSAPPKSPAKSASSGSERPKRVVPQPFSLSTQRRSSGGNGGVSSPSINKEKSGDKSSISPASMTKKSTPVAPRKTLQPEQTFHPQEEDSCSVTSSTTTSTRAGRTKTTVPVPPSFVCANRADKRREFYTKLEEKHKALEAEKDEAEARKKEEQEAALKQLRKSLVIRAKPMPSFYQEGPPPKVELKKVPPTRAKSPKFTSSRRKSCSDTAQTPEGKNTSASSARTHRHSIGSSKDANRVQCSLKNGVATKTRAVKPELKAL

SEQ ID NO: 80996 - protein, 80 aa, Setaria italica
  misc_feature (45)..(45): Xaa can be any naturally occurring amino acid
  Transcript Sequence Number=SeqID_15022
  Homolog annotation: Hit_ID=B6SNC5; Match level="QueryCoverage=100%, HitCoverage=33%, E-value=2e-11, Identity=56%"; Hit description=VQ motif family protein
  Pfam annotation: Domain name=VQ; Domain location=16-46; Score=48.4; E_ value=2.8e-11; Accession=PF05678.6; Description=VQ motif
  Subcellular localization annotation: CTP_CleavageSite=13; ConfidenceScore=5.05e-01
GPRVGKPARRRSRASRRAPVTLLNTDTANFRAMVQQFTGIPAPPXAGAFGGPVINFAGDYGFPPSSGVMSFAETRNNLHR

SEQ ID NO: 80997 - protein, 60 aa, Setaria italica
  Transcript Sequence Number=SeqID_15023
MASGGGKAKASSWAAAMSVGTVEALKDQAGLCRWNYAFRSAQQRARGAVAGTGSGSNAHA

SEQ ID NO: 80998 - protein, 120 aa, Setaria italica
  Transcript Sequence Number=SeqID_15024
  Subcellular localization annotation: CTP_CleavageSite=38; ConfidenceScore=5.38e-01
PLQKAQQPAPSAAGMRAVFLTPPGAKRECTGTGVFIPRQAGAPTEPRKKPACSTVLLPARVVQALNLNVEDLGARPIYPGGFALDHDALVSRSNALLASRSSQLPGGAAREVNLPQEWTY

SEQ ID NO: 80999 - protein, 80 aa, Setaria italica
  Transcript Sequence Number=SeqID_15025
  Gene Ontology: Mol. function=quinolinate synthetase A activity; Biological process=NAD biosynthetic process
  Homolog annotation: Hit_ID=B8C0T0; Match level="QueryCoverage=76%, HitCoverage=11%, E-value=7e-12, Identity=54%"; Hit description =Quinolinate synthetase (Fragment)
DMFGHEVVEKIKEQYCDAFLTAHFEVPGEMFSLAMEAKPRGMGVVGSTQNILDFIKDHLKGALDRNVDEHLQFVLRNRIR

SEQ ID NO: 81000 - protein, 87 aa, Setaria italica
  Transcript Sequence Number=SeqID_15026
  Homolog annotation: Hit_ID=Q6YRM5; Match level="QueryCoverage=100%, HitCoverage=17%, E-value=8e-45, Identity=95%"; Hit description=Zinc finger (C3HC4-type RING finger) protein family-like
LNPSLINVVHHFHLKEGVRYVNIGQGVMLINHYKYQVWEVFKDKFSGRVATYVADWQDEENVGSRDRAPGLGTKPVEPEDWPHRFCE

SEQ ID NO: 81001 - protein, 100 aa, Setaria italica
  misc_feature (25)..(25): Xaa can be any naturally occurring amino acid
  Transcript Sequence Number=SeqID_15027
METFSNSGYYSGSFPGKSTRIGTEXLEGLDLGVGGSRLWGFLGKWPTNWARQRSFSGGLCGRAGRRTEEKRQQEGEDEEQRDCSVLLSPLGLMDWFLRGI

SEQ ID NO: 81002 - protein, 407 aa, Setaria italica
  Transcript Sequence Number=SeqID_15028
  Gene Ontology: Mol. function=zinc ion binding; Cellular component =intracellular; Biological process=embryonic development ending in birth or egg hatching
  Homolog annotation: Hit_ID=B4G0P8; Match level="QueryCoverage=100%, HitCoverage=95%, E-value=0.0, Identity=78%"; Hit description =Antigenic determinant of rec-A protein
  Pfam annotation: Domain name=KOW; Domain location=352-385; Score =31.5; E_value=3.4e-06; Accession=PF00467.21; Description=KOW motif
  Pfam annotation: Domain name=Kin17_mid; Domain location=31-158; Score= 259.2; E_value=9.5e-75; Accession=PF10357.1; Description=Domain of Kin17 curved DNA-binding pr
  Pfam module annotation: Pfam domain module=KOW::Kin17_mid; Domain location=352-385::31-158
LQKLRWYCQMCQKQCRDENGFKCHCMSESHQRQMQVFGMAPERVVEGFSEEFLETFLALIRRAHRHSRVAATVVYNEYIADRHHVHMNSTRWATLTEFVKFLGREGYCKVEDTPKGWFMTYIDRDSEQAVKARLKRKRIKSDMAEDERQERMIARQIERAQKSLAKANDGDEGNVAEGESESESGSEEDYSGSDDDGEEREDDSKEANKATGKIAIALQKSVPGPKVNPFEDKPKVNFGFDEEDSGVREKKDEVDKKKGKDVKAAEARRSALDELMKEEEKAKERSNRKDYWLCPGIVVKVMSKSLAEKGYYKQKGVVKKVIDKYVGEIEMLESKHVLRVDQDELETVIPQIGGLVRIVNGAYRGSKARLLSVDTEKFCAKVQVEKGLYDGKILRAVEYEDICKISS

SEQ ID NO: 81003 - protein, 97 aa, Setaria italica
  Transcript Sequence Number=SeqID_15029
  Gene Ontology: Cellular component=chloroplast envelope
  Homolog annotation: Hit_ID=B6TCK1; Match level="QueryCoverage=92%, HitCoverage=34%, E-value=6e-41, Identity=87%"; Hit description=DnaJ domain containing protein
AFLVSIAGWSIATSAETGPAFQLAMSLVSCIYFLNDKMKNLVRASATGLGVFVGGWILGSLLVPVLPAFIIPPTWSIELLTSLMAYVFMFLGCTFLK

SEQ ID NO: 81004 - protein, 133 aa, Setaria italica
  Transcript Sequence Number=SeqID_15030
  Gene Ontology: Cellular component=chloroplast envelope
RRPHVTGPPPADVAPFVPASNHWGNWTCLLTTAALGIWSEKRTPVGKALSGALVSVLLGLTASSAGVVAADALAYRVVLDYFLPLAIPLLLFRTNLHRVLHSTGVLLLAFLLGSGSRRAERCEHTSPRSSRTL

SEQ ID NO: 81005 - protein, 705 aa, Setaria italica
  Transcript Sequence Number=SeqID_15031
  Gene Ontology: Mol. function=metal ion binding; Cellular component =integral to membrane
  Homolog annotation: Hit_ID=Q653B5; Match level="QueryCoverage=100%, HitCoverage=100%, E-value=0.0, Identity=74%"; Hit description=DHHC -type zinc finger domain-containing protein-like
  Pfam annotation: Domain name=zf-DHHC; Domain location=170-234; Score =108.0; E_value=3.1e-29; Accession=PF01529.12; Description=DHHC zinc finger domain
MARKHGWQLPAHTLQIVAITVFFLLVVAFYAFFAPFLGTQVLEYVAIGVYTPVALAVFILYIRCTSINPADPGIMSKFEDGFINVPANSAGVEGMNFPQKENNATGTNSPTSTCRSSLDGHSNQRGSSLGETNINLGSQQPKKRSSCWLIGGLLCAIFVKEDCRKPDDSEQQANGEEALFCTLCNAEVRKFSKHCRSCDKCVDGFDHHCRWLNNCVGRKNYFTFLSLMAISLIWLAIEFGAGIAVIVLCFVDKNASRNIQDKLGNGLTPAPFAVIVGIFTLLSLVACIPLGELFFFHIILIRKGITTYDYVVAMRAMSEAAPEDEEGANIIYSPSNSATTGFSVGSSLGLHHKGSWCTPPRIFIDHDEVIPHLDPGMVPSTVDPDAAGYAERANKAKKAVKISARSLAKLDKNEVMKAAAKARASSSVLRPIDTRRGHEADVVSSGNASIRSSMSVDYSGTKESNSEMRLSPLQNSYPQSLASQDDYETGTPTASSLSSPVHIHKLASHSQFSAAPHPPPPERPAPGMMRPPVPTTQGIPRPPVPTTQITNPMFQSATSYVRENRRASVVWDQEAGRYVSVPAQTRIGPGVEQAARNPRFLANPSGEPSSHGRSLAPGNTSSSAMPSGQPSERLTYSGQSIFFGGPILSTPGINAQRNEAVARARPEGSRDPNAQQRDIRGEKARTGSLPVFAPGTFQRNPAYDK

SEQ ID NO: 81006 - protein, 54 aa, Setaria italica
  Transcript Sequence Number=SeqID_15032
YGFQLLASFFCTISTNPSASGKGGSGRRIEDGFVVITAVGYLIHLSVGAICHAT

SEQ ID NO: 81007 - protein, 158 aa, Setaria italica
  Transcript Sequence Number=SeqID_15033
  Gene Ontology: Mol. function=actin binding; Cellular component =integral to membrane; Biological process=actin cytoskeleton organization and biogenesis
  Homolog annotation: Hit_ID=Q6H7U3; Match level="QueryCoverage=98%, HitCoverage=19%, E-value=8e-30, Identity=48%"; Hit description =Formin-like protein 10
  Subcellular localization annotation: CTP_CleavageSite=64; ConfidenceScore=5.12e-01
TRTTTPTSQVIGGTLENNATSDAPKPMPPPPPPPPLPPPIKKAPPPPPGPPKGSKARLAQLSPVESSRSEGSSAGEQTSESSEAEVNPPRPKLRPFYWDKVLANPDQSMAWHDIKFGSFHVNEDMIEELFGYSAGKRNSLKDKELPSMDPAAQNISLL

SEQ ID NO: 81008 - protein, 122 aa, Setaria italica
  Transcript Sequence Number=SeqID_15034
SLALDRLQAAGEFIQKPFKIQLGRGLYGECLAIRADGHSKLSHEIGLELSRRSAAAGLRPIGAVVFMQRGILKVCLRTTDNTTNTAEIAKAYGGGGKPSSSSFALRMDEFNTWTLVKSRVMN

SEQ ID NO: 81009 - protein, 109 aa, Setaria italica
  Transcript Sequence Number=SeqID_15035
SHRFKVRVFLTLLIIQTKEQGGNEIKRSALGDEFLYYCLIGAHDNSGQGLAGLARRRGPALATGRPSQNASLTLHQRLHLRREPVHGRERQRDHRGNCAHPAAVPDVDE

SEQ ID NO: 81010 - protein, 53 aa, Setaria italica
  Transcript Sequence Number=SeqID_15036
RYESYEKHEELAGGRRYQSYQSTTQEYTGGGGGGYGYGTCPPLNNSHLLGYGA

SEQ ID NO: 81011 - protein, 47 aa, Setaria italica
  Transcript Sequence Number=SeqID_15037
MAAKWAQKTVVIPAQRRGCHLITPKILREIEGDLSGFKCGLAHFFRT

SEQ ID NO: 81012 - protein, 58 aa, Setaria italica
  Transcript Sequence Number=SeqID_15038
  Subcellular localization annotation: CTP_CleavageSite=47; ConfidenceScore=5.01e-01
MGWASRFLTAVTFLAAGVLFAPDALRLGGSGSGSGAAAAARLVHLLAFATAWGAGLWV

SEQ ID NO: 81013 - protein, 107 aa, Setaria italica
  Transcript Sequence Number=SeqID_15039
  Gene Ontology: Mol. function=transporter activity; Cellular component= membrane; Biological process=sodium ion transport
  Homolog annotation: Hit_ID=Q768R5; Match level="QueryCoverage=65%, HitCoverage=12%, E-value=5e-22, Identity=82%"; Hit description =Plastidic 2-oxoglutarate/malate transporter
  Subcellular localization annotation: CTP_CleavageSite=11; ConfidenceScore=5.23e-01
GAAVLTRTLTFAAAFSAFGDPIPWLIALAFFFARGFIKTGLGSRVAYAFVAAFGSSSLGLGYSLVFAEALPAPASPPSPSPSAAAPPSPSPSPTPSPPPSPSSPPPP

SEQ ID NO: 81014 - protein, 511 aa, Setaria italica
  Transcript Sequence Number=SeqID_15040
  Gene Ontology: Mol. function=transporter activity; Cellular component= membrane; Biological process=sodium ion transport
  Homolog annotation: Hit_ID=Q768R5; Match level="QueryCoverage=91%, HitCoverage=80%, E-value=0.0, Identity=83%"; Hit description =Plastidic 2-oxoglutarate/malate transporter
  Pfam annotation: Domain name=CitMHS; Domain location=76-454; Score= -138.6; E_value=0.073; Accession=PF03600.8; Description=Citrate transporter
  Pfam annotation: Domain name=Na_sulph_symp; Domain location=43-511; Score=828.1; E_value=5.3e-246; Accession=PF00939.11; Description =Sodium:sulfate symporter transmembrane region
  Pfam module annotation: Pfam domain module=CitMHS::Na_sulph_symp; Domain location=76-454::43-511
  Subcellular localization annotation: CTP_CleavageSite=50; ConfidenceScore=5.49e-01
YLFVAAAAPTTSGVSCGILPPVSASASARAAPAAPPPKPALQGAAITPLLATVATGVLIWLVPAPSGVPRNAWQLLAIFLSTIVGIITQPLPLGAVALLGLGAAVLTRTLTFAAAFSAFGDPIPWLIALAFFFARGFIKTGLGSRVAYAFVAAFGSSSLGLGYSLVFAEALLAPAIPSVSARAGGIFLPLVKALCEACGSRAGDGTERRLGAWLMLTCFQTSVVSSAMFLTAMAANPLSANLTAATIGEGIGWTLWAKAAIVPGMLSLVLVPLILYVIYPPEVKSSPDAPRLAKERLAKMGPMSKEEKIMAGTLLLTVGLWIFGGMISVDAVSAAILGLGVLLITGVVTWKECLAESVAWDTLTWFAALIAMAGYLNKYGLIAWFSETVVKFVGGLGLSWQLSFSVLVLLYFYSHYFFASGAAHIGAMFAAFLSVAKALGTPSLFAAMVLSFLSNLMGGITHYGIGSAPVFYGAGYVPLAQWWGYGFVISVVNIIIWLGVGGFWWKMIGLW

SEQ ID NO: 81015 - protein, 297 aa, Setaria italica
  Transcript Sequence Number=SeqID_15041
  Gene Ontology: Mol. function=nucleoside-triphosphatase activity; Cellular component=mitochondrion; Biological process=DNA metabolic process
  Homolog annotation: Hit_ID=B6TNM4; Match level="QueryCoverage=100%, HitCoverage=69%, E-value=1e-145, Identity=84%"; Hit description=DNA repair protein recA
  Pfam annotation: Domain name=RecA; Domain location=1-260; Score =382.4; E_value=7.8e-112; Accession=PF00154.13; Description=recA bacterial DNA recombination protein
KTTLALHVIAEAQKNGGYCAFVDAEHALDPALAESIGVDTNNLLLSQPDCAEQALSLVDTLIRSGSVDVVVVDSVAALVPKTELDGEMGDAHVALQARLMSQALRKLSHSLSLSQTILLFINQTRAKVATFGFGGPTEVTSGGNALKFYASVRLNIKRIGLVKKGEETIGSQVAVKIVKNKHAPPFKTAQFEIEFGKGICRSSELVELGLKRKLIKKISGAYYSFNDITFHGKDNLKSYLTENESVAKDLEMQLKKLMETEAPKEQEAEGGSPSDLPEEIVTPETSSEEDLAAVVEA

SEQ ID NO: 81016 - protein, 84 aa, Setaria italica
  Transcript Sequence Number=SeqID_15042
  Subcellular localization annotation: CTP_CleavageSite=41; ConfidenceScore=5.56e-01
MCSCACARLPHPLFRPTPSPNPQPAFPQGPTPARSRALVARAGAAARDDAHSPPSSFDFLALKRELELEEEEGAVVAVEADEER

SEQ ID NO: 81017 - protein, 124 aa, Setaria italica
  Transcript Sequence Number=SeqID_15043
  Gene Ontology: Mol. function=receptor activity; Cellular component =integral to membrane
  Homolog annotation: Hit_ID=B9RL98; Match level="QueryCoverage=99%, HitCoverage=16%, E-value=3e-54, Identity=78%"; Hit description =Xenotropic and polytropic murine leukemia virus receptor pho1, putative
  Pfam annotation: Domain name=EXS; Domain location=1-103; Score= -127.8; E_value=0.00063; Accession=PF03124.6; Description=EXS family
LVIIVSSIATIYQLYWDFVKDWGLLQFNSKNTWLRNDFNLKQKYIYFLSMGLNLVLRLAWLQTVIHPNIGSLDSRVTLFFLAALEVIRRGHWNFYRLENEHLNNAGKFRAVKVVPLPFHEVEDN

SEQ ID NO: 81018 - protein, 57 aa, Setaria italica
  misc_feature (48)..(48): Xaa can be any naturally occurring amino acid
  Transcript Sequence Number=SeqID_15044
  Gene Ontology: Mol. function=superoxide dismutase activity
  Homolog annotation: Hit_ID=Q5FB28; Match level="QueryCoverage=85%, HitCoverage=18%, E-value=8e-14, Identity=77%"; Hit description =Superoxide dismutase
FLEENICDAYFSTLQDDMLTYVTNFMDHLISWDTVTLRMMRAESFVNXLNEPNIPVA

SEQ ID NO: 81019 - protein, 258 aa, Setaria italica
  Transcript Sequence Number=SeqID_15045
  Gene Ontology: Mol. function=superoxide dismutase activity; Cellular component=chloroplast; Biological process=superoxide metabolic process
  Homolog annotation: Hit_ID=Q5FB28; Match level="QueryCoverage=100%, HitCoverage=100%, E-value=1e-120, Identity=82%"; Hit description =Superoxide dismutase
  Pfam annotation: Domain name=Sod_Fe_C; Domain location=135-241; Score= 124.7; E_value=3e-34; Accession=PF02777.10; Description=Ironmanganese superoxide dismutases, C-term
  Pfam annotation: Domain name=Sod_Fe_N; Domain location=45-130; Score =102.8; E_value=1.2e-27; Accession=PF00081.14; Description =Ironmanganese superoxide dismutases, alpha-
  Pfam module annotation: Pfam domain module=Sod_Fe_C::Sod_Fe_N; Domain location=135-241::45-130
  Subcellular localization annotation: CTP_CleavageSite=43; ConfidenceScore=5.17e-01
MAASALHLRLLPSPPAGVKLQQRRLRSRILRQGGLSRRYSKVVCYYGLTTPPYKLDALEPYMSRRTVELHWGKHHHDYVEGLNKQLATSPLYGYTLEELIKEAYNNGNPLPEYNNAAQVWNHHFFWESMQPEGGGLPEGGVLQQIEKDFGSFTNFREEFIRSALQLLGSGWVWLVLKRNERKLSVVHTRNAISPLAFGDIPIISLDLWEHAYYLDYKDDMLTYVTNFMDHLISWDTVTLRMMRAESFVNLNEPNIPVA

SEQ ID NO: 81020 - protein, 694 aa, Setaria italica
  Transcript Sequence Number=SeqID_15046
  Gene Ontology: Mol. function=nucleotide binding; Cellular component =cytosol; Biological process=translation
  Homolog annotation: Hit_ID=Q9SRD2; Match level="QueryCoverage=95%, HitCoverage=52%, E-value=0.0, Identity=71%"; Hit description =Putative translation initiation factor IF-2; 73082-68138
  Pfam annotation: Domain name=GTP_EFTU; Domain location=102-315; Score= 155.9; E_value=1.2e-43; Accession=PF00009.19; Description=Elongation factor Tu GTP binding domain
  Pfam annotation: Domain name=GTP_EFTU_D2; Domain location=341-419; Score=27.8; E_value=4.4e-05; Accession=PF03144.17; Description =Elongation factor Tu domain 2
  Pfam annotation: Domain name=MMR_HSR1; Domain location=105-230; Score= 12.2; E_value=7.4e-05; Accession=PF01926.15; Description=GTPase of unknown function
  Pfam module annotation: Pfam domain module=GTP_EFTU::GTP_EFTU_D2::MMR_ HSR1; Domain location=102-315::341-419::105-230
YCFVLQEEEEEEDEEWDAKSWDDIDVNLPKTSAFEEEEAKPVQKQENSKAQPVTTSVKKVIPPVANSKKSEADDGGASNGNIKRNKKKGPVKEDSSKNGNDLRSPICCILGHVDTGKTKLLDCIRRTNVQEGEAGGITQQIGATYFPTENIRERTRELKADATLKVPGLLVIDTPGHESFSNLRSRGSSLCDIAILVVDIMHGLEPQTIESLNLLKSRDAVFIVALNKVDRLYGWKRCQNAPIVKALKQQNEDVKREFNMRVTDIVTQFKMQGVNTALYYKNKEMEDTFNIVPTSAVSGEGIPDLLLLLVQWAQKTMEEKLTFVDEVQCTVLEVKVVEGHGTTVDVVLVNGILHEGDQIVVCGMQGPIVTTVRALLTPHPMRELRVKGTYIHHKEIRAAQGVKISAQGLEHAIAGTALYVLGPDDDLDKLKDAVMEEMTRVRNRIDKSGEGVYVQASTLGSLEALTEFLKSPAVNIPFCDFSIGPVHKKDVMKASVMLERKKEYATILAFDVKVMPDARDLAEESGVKIFVADIIYHLFDQFTAYIKNLKEEKKKESAEEAVFPCVLKIMPNCVFNKKDPIVLGVDVLEGIAKVGTPLCIPTKEFIDIGKIASIEINHKQVDMATKGQKVAIKIIANNSDEQQRSFGRHFDMEDELVSRISRRSIDILKQNYREDLSFEDWKLVVKLKTILKIQ

SEQ ID NO: 81021 - protein, 552 aa, Setaria italica
  Transcript Sequence Number=SeqID_15047
  Gene Ontology: Mol. function=nucleotide binding
  Homolog annotation: Hit_ID=Q5ZB10; Match level="QueryCoverage=10%, HitCoverage=6%, E-value=5e-11, Identity=62%"; Hit description =Translation initiation factor if-2-like
LQQGQEEKKKDKVGRSAPGKDEDDEAAPPPPPVAEEEDEDPLVAGAAAAKKSQKKKKKKGTFVTDDEDVVKALADVEDSQPADEPEPEEVKTQDSVPAPDADDATGKKSKKKKKKGGFMVDGEDADQILGKMEDHPPPVEEPEPKDMKDEAPVAAATPVDDAEGKKSKKKKKKSGRTAQEEEDLDKLFAELGVAPSAEDKPVQAPDSTSVAKEDVGAAGDGNVDDKAGEGEVESAAAKKKKKKKEKEKEKKAAAKGAEAKKEEEKEQEAPKGKVDMKKLPKHVREMQEALARRKEAEERQKREEEERLRKEEEERLRREEEERKAEEAKRRKKEREKEKLLKKKQEGKLLTGKQKEEAKRLEAMRRQFLEQSELQKAEGTAPETKKRPIYDSKKKKAQPKTAETAKIVEEQQEEVNEANNDEEEYVLVDQESQSQVEESEERTEPDQEAEEPKPEQEEEEEEDEEWDAKSWDDIDVNLPKTSAFEEEEAKPVQKQENSKAQPVTTSVKKVIPPVANSKKSEADDGGASNGNIKRNLRKRRRKSKRRLKGRLT

SEQ ID NO: 81022 - protein, 380 aa, Setaria italica
  Transcript Sequence Number=SeqID_15048
  Gene Ontology: Mol. function=catalytic activity; Cellular component =chloroplast; Biological process=metabolic process
  Homolog annotation: Hit_ID=Q6YZQ7; Match level="QueryCoverage=99%, HitCoverage=70%, E-value=1e-110, Identity=55%"; Hit description =Putative fatty acyl coA reductase
  Pfam annotation: Domain name=NAD_binding_4; Domain location=1-264; Score=219.9; E_value=6.6e-63; Accession=PF07993.4; Description=Male sterility protein
MLHEIIGKELFSVLREEHGADFQSFIKEKISPLAGDMIHENLGLESTQAKQLFEEIDIIVNGAATTNFYERYDVALASNTLGTVNICKFAKQCSHLKLLLHVSTAYVASCKQKGRILEKPLQMGQTLKKGRCIDVEAELDLANDVKAKLVKTRSGNDTSHQKLQKVAMKELGLKRAKYFGWPNVYAFTKAMGEMLLGTMRGDLPVVIMRPSIVISTFQDPFPGWIEGIRTMDVMIAASYEQKLPCFIGGHVLDSIPGDMVVNATMVAMATHYDCSGTQVVYHVTSALQNPLSCNLLEESVYGYCLINPRVRDDKRTMQHERPMLFSRYAYFHAYMVLAYKTRLQVLYLANRLLLCGRFTEYHNKLNRSLNCLMFMAKLYA

SEQ ID NO: 81023 - protein, 139 aa, Setaria italica
  misc_feature (117)..(117): Xaa can be any naturally occurring amino acid
  Transcript Sequence Number=SeqID_15049
  Gene Ontology: Mol. function=pseudouridine synthase activity; Biological process=pseudouridine synthesis
  Homolog annotation: Hit_ID=Q0J4D4; Match level="QueryCoverage=98%, HitCoverage=29%, E-value=1e-57, Identity=80%"; Hit description=RNA pseudourine synthase 3, mitochondrial
  Subcellular localization annotation: CTP_CleavageSite=57; ConfidenceScore=5.13e-01
RQANVARLGAPKPGPRPRQLLSLPPFPAGADPLPGRKVVPRRVTAVSWVKHYFADVPQEAVQAHFNRRMVFSECSEHEFLAESIRTQKHHLKKIKHNDVMEPGMRIHLPVSVAEGEXKKRYETIPTATLHPNKDEIEYL

SEQ ID NO: 81024 - protein, 84 aa, Setaria italica
  Transcript Sequence Number=SeqID_15050
  Gene Ontology: Mol. function=metal ion binding
  Homolog annotation: Hit_ID=B9SU90; Match level="QueryCoverage=100%, HitCoverage=11%, E-value=7e-20, Identity=57%"; Hit description=Zinc finger protein, putative
AEQPRINSALVEVIRMAKISKNANSGGSSAPYQYIRNDDRPDKAFTTERAKKAGKANASSGQIFVTIAPDHFGPILAENDPRRN

SEQ ID NO: 81025 - protein, 247 aa, Setaria italica
  Transcript Sequence Number=SeqID_15051
  Gene Ontology: Mol. function=transcription factor activity; Cellular component=endoplasmic reticulum; Biological process=ubiquitin -dependent protein catabolic process
  Homolog annotation: Hit_ID=B6T8L2; Match level="QueryCoverage=95%, HitCoverage=42%, E-value=1e-119, Identity=87%"; Hit description=F -box domain containing protein
  Pfam annotation: Domain name=WD40; Domain location=113-147; Score =13.2; E_value=1.1; Accession=PF00400.24; Description=WD domain, G -beta repeat
  Pfam annotation: Domain name=WD40; Domain location=152-190; Score =13.7; E_value=0.8; Accession=PF00400.24; Description=WD domain, G -beta repeat
  Pfam annotation: Domain name=WD40; Domain location=19-55; Score=3.4; E_value=15; Accession=PF00400.24; Description=WD domain, G-beta repeat
  Pfam annotation: Domain name=WD40; Domain location=200-236; Score =23.6; E_value=0.00084; Accession=PF00400.24; Description=WD domain, G-beta repeat
  Pfam annotation: Domain name=WD40; Domain location=73-109; Score =35.5; E_value=2.2e-07; Accession=PF00400.24; Description=WD domain, G-beta repeat
  Pfam module annotation: Pfam domain module=WD40::WD40::WD40::WD40::WD4 0; Domain location=113-147::152-190::19-55::200-236::73-109
LIFSGGRDSVVRMWNMEEGLLIDTSRPLGGTIRAIAADTRLLVTGGTNAYIQCWRAVEGNDHLFHISGNGTDQNSEFRLWGHEGPLTCLALDSLRIYSGSWDMTVRVWDRTRMECLQKLMHADWVWDLAPHGNTIASTAGRDVYVWDIRNSELTSLISNAHVGNAYSLARTHLMDVLFTGGEDGAIRLFNISDVSDDEDSKPLATWVPHSGPVHSLAFEYPWLVSASSDGRIALIDSRKLLTPKKSF

SEQ ID NO: 81026 - protein, 50 aa, Setaria italica
  Transcript Sequence Number=SeqID_15052
  Gene Ontology: Mol. function=hydrolase activity
  Homolog annotation: Hit_ID=B6SWJ5; Match level="QueryCoverage=100%, HitCoverage=15%, E-value=1e-18, Identity=86%"; Hit description =Hydrolase
NRHLEGNSRLVVIKNAGHAVNLEKPKEVCKNIIEFFKEPVAEAANGVDKV

SEQ ID NO: 81027 - protein, 155 aa, Setaria italica
  Transcript Sequence Number=SeqID_15053
  Gene Ontology: Mol. function=ATPase activity, coupled to transmembrane movement of ions, phosphorylative mechanism; Cellular component=membrane
  Homolog annotation: Hit_ID=B6TVS8; Match level="QueryCoverage=48%, HitCoverage=41%, E-value=7e-22, Identity=64%"; Hit description =Copper-transporting ATPase PAA1
  Pfam annotation: Domain name=HMA; Domain location=80-152; Score=47.1; E_value=6.9e-11; Accession=PF00403.18; Description=Heavy-metal -associated domain
  Subcellular localization annotation: CTP_CleavageSite=63; ConfidenceScore=5.78e-01
MESTALIAQLPLLISRSRSKPISPASVTRARSLTSISFSSGSRRVALFSRRGREYAGVGSSVSAAAATGEAADGGSETILLSVQGMMCDGCAASVKRILESQPEVTSATVDFKEASAVVWTTAEARASDDWHKLCGEKLAKHLGTCGFESRLQGN

SEQ ID NO: 81028 - protein, 271 aa, Setaria italica
  Transcript Sequence Number=SeqID_15054
  Gene Ontology: Cellular component=peroxisome
  Homolog annotation: Hit_ID=B6UG46; Match level="QueryCoverage=66%, HitCoverage=98%, E-value=9e-44, Identity=61%"; Hit description =Peroxin Pex14
  Pfam annotation: Domain name=Pex14_N; Domain location=55-148; Score =13.7; E_value=3.8e-06; Accession=PF04695.5; Description=Peroxisomal membrane anchor protein (Pex14p) conserved region
MADLSTIADGDVTEEAKGQEADQGSSEGSHGTTLQDTMERDIRKGKAALESTELMREDLVQSAVSFLKHPKVVTSSDGQRRSFLENKGLTVDEIDEAFRQLQSPSSNSLSANTCTSQGVSNHSCRITQQETEVGTKCMDGSERVEPETEPVAPVVPCHPKSYMEIMEMIQRGERPDDIQDINDDPPNPDQPISEPRMAPKPKPWEKQGQESLAWDLKSPSSVSSDLRSEVQHDITNKAVESADGSNHGDSLVQAEVDAGLESPTDDAASLK

SEQ ID NO: 81029 - protein, 62 aa, Setaria italica
  misc_feature (35)..(35): Xaa can be any naturally occurring amino acid
  Transcript Sequence Number=SeqID_15055
  Gene Ontology: Mol. function=DNA binding
  Homolog annotation: Hit_ID=B6UCC7; Match level="QueryCoverage=85%, HitCoverage=15%, E-value=3e-14, Identity=75%"; Hit description =Transcription factor GTE6
EKRQKDEESKGVVSTSTSREAAIAKLAKDTDDELXAPTKQLEELRKMVVNRCRFILYCPISF

SEQ ID NO: 81030 - protein, 346 aa, Setaria italica
  Transcript Sequence Number=SeqID_15056
  Gene Ontology: Mol. function=DNA binding; Cellular component=nucleus; Biological process=regulation of transcription, DNA-dependent
  Homolog annotation: Hit_ID=B6UCC7; Match level="QueryCoverage=93%, HitCoverage=94%, E-value=1e-147, Identity=80%"; Hit description =Transcription factor GTE6
  Pfam annotation: Domain name=Bromodomain; Domain location=83-171; Score=118.2; E_value=2.7e-32; Accession=PF00439.17; Description =Bromodomain
MTPANGAAAPEAVAEAGLAPEVESEADAFQRQVDDLVSKTDVLERRVNEVVDFYDGKKHGSGGRKGGRHGPHPRGMPDLMRQFGVVLREITSDKKAWPFREPVDVVGMNLHDYYKIITKPMDFSTIQNKMEGKDVTTYKNVREIYADVRLIFANAMKYNDEENVVHLMAKSLLEKFEEKWLQFLPKVESEEKRQKDEESKGVVSTSTSREAAIAKLAKDTDDELNQINKQLEELRKMVVNRCRKMTTDEKRKLGAGLCHLSPDDLNKALEIVAQDNPSFQTKAEEVDLDMDAQSETTLWRLKFFVREALERQANVASGKMDENAKRKREICNALAKTASKRIKKQP

SEQ ID NO: 81031 - protein, 120 aa, Setaria italica
  Transcript Sequence Number=SeqID_15057
  Gene Ontology: Mol. function=hydrolase activity, hydrolyzing O -glycosyl compounds; Cellular component=anchored to membrane; Biological process=carbohydrate metabolic process
  Homolog annotation: Hit_ID=B4FGE4; Match level="QueryCoverage=92%, HitCoverage=63%, E-value=2e-41, Identity=83%"; Hit description =Glucan endo-1,3-beta-glucosidase 1
  Pfam annotation: Domain name=X8; Domain location=1-67; Score=66.3; E _value=1.1e-16; Accession=PF07983.5; Description=X8 domain
ADGGRADCTAIQQGGACYDPPDLQRHASYAFNDYFLRAGGAASPAACDFSGAAALTALNPSHGSCVFPSSTSPKNGSFTGTTTYGASGTDLSYNSSWKPNSWSWLLHISLFVMLSFVTHL

SEQ ID NO: 81032 - protein, 311 aa, Setaria italica
  misc_feature (27)..(27): Xaa can be any naturally occurring amino acid
  Transcript Sequence Number=SeqID_15058
  Gene Ontology: Mol. function=transferase activity, transferring groups other than amino-acyl groups
  Homolog annotation: Hit_ID=Q8LLA0; Match level="QueryCoverage=97%, HitCoverage=54%, E-value=1e-103, Identity=63%"; Hit description=HCBT- like putative defense response protein
  Pfam annotation: Domain name=Transferase; Domain location=1-302; Score=-48.5; E_value=1.5e-08; Accession=PF02458.7; Description =Transferase family
VLAAQVTELADGVFVAMSLNHGVADGXTFWHFFSTWSEISRSGSSDAGGELSTPPPVLERWFLETSSVPITLPFGKLEDIVRRPEYPPVQECFFNFSAESVRKLKARANAEMAGTATATSTISSLQSLLAHTWRAVCRARELAPERETTYTLLVGCRGRMKGIPRDYVGNTVAFAVARCTAGEVVEKGLGWAAWLMNRAVASFDEATVRDDLASWPQDPRFLYVKPPGEAAATIITGSSPRFDVYGNDFGWGRPVAVRSGAGNKTDGKVTVYAGRGGAGSMALEVCLEPEVLARLVADEEFMEAVSAAATA

SEQ ID NO: 81033 - protein, 161 aa, Setaria italica
  Transcript Sequence Number=SeqID_15059
  Gene Ontology: Cellular component=nuclear pore; Biological process =intracellular protein transmembrane transport
  Homolog annotation: Hit_ID=B6UAH6; Match level="QueryCoverage=86%, HitCoverage=43%, E-value=1e-56, Identity=77%"; Hit description=MPPN domain containing protein
  Pfam annotation: Domain name=MPPN; Domain location=83-160; Score =79.4; E_value=1.3e-20; Accession=PF05172.5; Description=MPPN (rrm -like) domain
  Subcellular localization annotation: CTP_CleavageSite=25; ConfidenceScore=5.33e-01
VASSPSPRAAASRSPSWDRSRGRVALSAPGSPMDGVVEPARKEVLALPPPASPGTPPLATTAEAQSSVTPAQAPVRTEPVANGGEAEREEWVTVFGFSIGDTNLVLREFEKCGVILRHHSGPRDGNWIHILYQRSYDARKALQKNGIQLSSGLIVGVKPID

SEQ ID NO: 81034 - protein, 80 aa, Setaria italica
  Transcript Sequence Number=SeqID_15060
  Subcellular localization annotation: CTP_CleavageSite=14; ConfidenceScore=5.23e-01
AVHSSPPARSTGASGSLVRPGVTSRDSCWIRTVFSVKGLQEFPLGEKQAAWLFIFLSYFLRYLTSSFFSSHWNDVKVLFD

SEQ ID NO: 81035 - protein, 131 aa, Setaria italica
  Transcript Sequence Number=SeqID_15061
  Gene Ontology: Mol. function=small conjugating protein ligase activity; Cellular component=cytosol; Biological process=ubiquitin -dependent protein catabolic process
  Homolog annotation: Hit_ID=Q69JN7; Match level="QueryCoverage=100%, HitCoverage=88%, E-value=6e-61, Identity=85%"; Hit description =Ubiquitin carrier protein
  Pfam annotation: Domain name=UQ_con; Domain location=5-131; Score =240.7; E_value=3.6e-69; Accession=PF00179.18; Description=Ubiquitin -conjugating enzyme
MASKRIQKELMDLQKDPPTSCSAGPAGEDLFHWQATIMGPSDSPYTGGVFFVNIHFPPDYPFKPPKVNFQTKVYHPNINSNGSICLDILKEQWSPALTISKVLLSISSLLTDPNPDDPLVPEIAHMYKNQR

SEQ ID NO: 81036 - protein, 148 aa, Setaria italica
  Transcript Sequence Number=SeqID_15062
  Gene Ontology: Mol. function=small conjugating protein ligase activity; Cellular component=cytosol; Biological process=ubiquitin -dependent protein catabolic process
  Homolog annotation: Hit_ID=Q69JN7; Match level="QueryCoverage=100%, HitCoverage=100%, E-value=2e-71, Identity=86%"; Hit description =Ubiquitin carrier protein
  Pfam annotation: Domain name=UQ_con; Domain location=5-142; Score =280.9; E_value=2.9e-81; Accession=PF00179.18; Description=Ubiquitin -conjugating enzyme
MASKRIQKELMDLQKDPPTSCSAGPAGEDLFHWQATIMGPSDSPYTGGVFFVNIHFPPDYPFKPPKVNFQTKVYHPNINSNGSICLDILKEQWSPALTISKVLLSISSLLTDPNPDDPLVPEIAHMYKNQRQRYEETARAWTQKYAMG

SEQ ID NO: 81037 - protein, 88 aa, Setaria italica
  Transcript Sequence Number=SeqID_15063
  Gene Ontology: Mol. function=hydrolase activity; Cellular component =chloroplast
  Homolog annotation: Hit_ID=B6SZF6; Match level="QueryCoverage=71%, HitCoverage=25%, E-value=6e-26, Identity=87%"; Hit description=HDDC2 protein
LPTKQIRELWMEYENNASLEAKVVKDFDKIEMILQALEYEKEQGRDLEEFFQSTAGKFQTDIGNVVPPSYLETPNTERNVIQSLWFPS

SEQ ID NO: 81038 - protein, 64 aa, Setaria italica
  Transcript Sequence Number=SeqID_15064
  Gene Ontology: Mol. function=hydrolase activity; Cellular component =chloroplast
  Homolog annotation: Hit_ID=B6SZF6; Match level="QueryCoverage=96%, HitCoverage=25%, E-value=7e-27, Identity=95%"; Hit description=HDDC2 protein
KNNASLEAKVVKDFDKIEMILQALEYEKEQGRDLEEFFQSTAGKFQTDIGKAWAAEIASRRKPK

SEQ ID NO: 81039 - protein, 121 aa, Setaria italica
  misc_feature (17)..(17): Xaa can be any naturally occurring amino acid
  Transcript Sequence Number=SeqID_15065
  Gene Ontology: Mol. function=hydrolase activity; Cellular component =chloroplast
  Homolog annotation: Hit_ID=B6SZF6; Match level="QueryCoverage=100%, HitCoverage=48%, E-value=2e-59, Identity=94%"; Hit description=HDDC2 protein
AIVHDIAEAIVGDITPXSDNVPKEEKSRMEKEALDHMCELLGGGSRAQEIRELWMEYENNASLEAKVVKDFDKIEMILQALEYEKEQGRDLEEFFQSTAGKFQTDIGKAWAAEIASRRKPK

SEQ ID NO: 81040 - protein, 105 aa, Setaria italica
  Transcript Sequence Number=SeqID_15066
  Gene Ontology: Mol. function=protein serine/threonine kinase activity; Cellular component=plasma membrane; Biological process =protein amino acid phosphorylation
  Homolog annotation: Hit_ID=B9SBN3; Match level="QueryCoverage=89%, HitCoverage=23%, E-value=5e-21, Identity=57%"; Hit description =Protein kinase APK1B, chloroplast, putative
MGNCMGGSPYVNKVSSNAKPESPPKIQSPSERDRSEDRKLPSNPGEVEALRRGASAAARNPLVAFSFAELRKVASDFHKDALIGGGGFGRVYKGSFAPAGDAPTL

SEQ ID NO: 81041 - protein, 138 aa, Setaria italica
  Transcript Sequence Number=SeqID_15067
KLAEAQSRLARCRDPRPPPSHTEPKPPPPPIKREPKPSPPPPIQREPKPSPPQPPPEKKSPAPAPQPAARPSLLIPGTNNRPAPRPEPMPGLKKTAAPSSSSSPAAPPPPERSRKEEKKPKRKIQEKEHQNLIPSVKK

SEQ ID NO: 81042 - protein, 65 aa, Setaria italica
  misc_feature (17)..(17): Xaa can be any naturally occurring amino acid
  Transcript Sequence Number=SeqID_15068
  Gene Ontology: Mol. function=signal transducer activity; Biological process=G-protein coupled receptor protein signaling pathway
  Homolog annotation: Hit_ID=B9T5D0; Match level="QueryCoverage=76%, HitCoverage=5%, E-value=9e-11, Identity=66%"; Hit description=GTP -binding protein alpha subunit, gna, putative
ICEFFVQAKFLYGSKFXPVEILDLKLMIQINVYKYLSTLLEWRECFEDQALKEDRELCTIDKAAG

SEQ ID NO: 81043 - protein, 561 aa, Setaria italica
  misc_feature (133)..(133): Xaa can be any naturally occurring amino acid
  misc_feature (137)..(137): Xaa can be any naturally occurring amino acid
  misc_feature (503)..(503): Xaa can be any naturally occurring amino acid
  Transcript Sequence Number=SeqID_15069
  Gene Ontology: Mol. function=signal transducer activity; Biological process=G-protein coupled receptor protein signaling pathway
  Homolog annotation: Hit_ID=B9T5D0; Match level="QueryCoverage=97%, HitCoverage=64%, E-value=0.0, Identity=63%"; Hit description=GTP -binding protein alpha subunit, gna, putative
  Pfam annotation: Domain name=G-alpha; Domain location=137-544; Score=- 17.9; E_value=6.2e-18; Accession=PF00503.12; Description=G-protein alpha subunit
QQGELDLLIGCALPPDRLAPGRYWYDKDSGLWGKEGERPDRIVNSKLSVGGKLRADASNGTTQVFVNGREITKTELRMLKLASVQCPRNTHFWLYDDGSYEEEGQNIIKGNIWQKASTRLIANLFSLPIPPGXVSSXKGDATGDSVRFVPDYLEQKSVQKLLLVGLEGSGSSTIFKQAKFLYGSKFSPVEILDLKLMIQINVYKYLSTLLEWRECFEDQALKEDRELCTIDKAAGETGVAQTRPSLYSLNQRLMQFADWLLEIVALGDLDAFFPAATREYAPIVQEVWKDAAIQATYKRNNEFHFLPDVASYFLVKVVEISSNEYEPTETDILYAEGINQWNGLSLLEFSLDDRYPFTESYVDKLDDPSMLTKYQLIRINSKGLNGGLRCLEMLEEVRAIIFCISLADYDQMWVRGSGELCNKMIASRDMFENVISHPSFEDTTCVLLLNKYDSFEAKVNRVPLTVCDWFADFSPVKPHHTHQSLASHAYYYIALKFKVLYSXSIGDRKLFVFQTKALERKTVDDAFRYIREVLRWDDVKNSDAFGSVEESLCSMDMSSSS

SEQ ID NO: 81044 - protein, 80 aa, Setaria italica
  Transcript Sequence Number=SeqID_15070
MEELAEAEHGLRKLLQLQCGGGGNGKGLSASKISVAAEQQQLVFSKKQEVKHLKQTSLWGCTFDTVVASLARAAFSTLAR

SEQ ID NO: 81045 - protein, 147 aa, Setaria italica
  misc_feature (137)..(137): Xaa can be any naturally occurring amino acid
  Transcript Sequence Number=SeqID_15071
  Homolog annotation: Hit_ID=Q10KZ9; Match level="QueryCoverage=100%, HitCoverage=43%, E-value=4e-65, Identity=80%"; Hit description =Nodulation protein, putative, expressed
MQRSGSGWFETLLNSHPNISSNGEIFNRVDRRENISSILQTLDKLYNLDWLTSAAKNECTAAFGLKLMLNQGILENHDDIVSYLNKKGVSVIFLFRRNTLRRVISVLANDYDKDAKQLNGTHKSHVHSKREAEILAXKFKPELDTST

SEQ ID NO: 81046 - protein, 157 aa, Setaria italica
  misc_feature (104)..(104): Xaa can be any naturally occurring amino acid
  Transcript Sequence Number=SeqID_15072
  Homolog annotation: Hit_ID=Q10KZ9; Match level="QueryCoverage=99%, HitCoverage=53%, E-value=5e-68, Identity=70%"; Hit description =Nodulation protein, putative, expressed
PYEELRYTHFKPRSYSRGKCSCTPVRFFVIVSMQRSGSGWFETLLNSHPNISSNGEIFNRVDRRENISSILQTLDKLYNLDWLTSAAKNECTAAFGLKWMLNQXRNTLRRVISVLANDYDKDAKQLNGTHKSHVHSKEEAEILAKFKPELDTSTLIL

SEQ ID NO: 81047 - protein, 64 aa, Setaria italica
  misc_feature (19)..(19): Xaa can be any naturally occurring amino acid
  Transcript Sequence Number=SeqID_15073
  Homolog annotation: Hit_ID=Q10KZ9; Match level="QueryCoverage=78%, HitCoverage=14%, E-value=8e-13, Identity=66%"; Hit description =Nodulation protein, putative, expressed
ADIVPSTYLIHFEQAEILXKFKPELDTSTLITNIRNIEKAIRDCLDHFKSTRHMMLYYEDIIGN

SEQ ID NO: 81048 - protein, 332 aa, Setaria italica
  misc_feature (316)..(316): Xaa can be any naturally occurring amino acid
  Transcript Sequence Number=SeqID_15074
  Homolog annotation: Hit_ID=Q10KZ9; Match level="QueryCoverage=100%, HitCoverage=98%, E-value=1e-143, Identity=73%"; Hit description =Nodulation protein, putative, expressed
  Subcellular localization annotation: CTP_CleavageSite=40; ConfidenceScore=5.08e-01
MHPFSLKSSKGAPILPRPVFVFFVALFGFYVCYLSFNQITLENKREGNSGEEQRANICRKPHVPYEELRYTHFPKPRSYSRGECSCTPVRFFVIVSMQRSGSGWFETLLNSHPNISSNGEIFNRVDRRENISSILQTLDKLYNLDWLTSAAKNECTAAFGLKWMLNQGILENHDDIVSYLNKKGVSVIFLFRRNTLRRVISVLANDYDKDAKQLNGTHKSHVHSKEEAEILAKFKPELDTSTLITNIRNIEKAIRDCLDHFKSTRHMMLYYEDIIGNSNALSQVQEFLRVPVRPLMSRQVKIHTRPLPDLVKNWEXVSSKLNGTEFAHFLDG

SEQ ID NO: 81049 - protein, 73 aa, Setaria italica
  Transcript Sequence Number=SeqID_15075
  Subcellular localization annotation: CTP_CleavageSite=43; ConfidenceScore=5.41e-01
ARRLRRPAPGHPATAAAATTRGPATPAGPMIRRTGAACRWRPASEHSKTPLQILSSCFRLQIAMWPGADARWF

SEQ ID NO: 81050 - protein, 71 aa, Setaria italica
  Transcript Sequence Number=SeqID_15076
  Gene Ontology: Mol. function=structural constituent of ribosome; Cellular component=ribonucleoprotein complex; Biological process =ribosomal large subunit assembly and maintenance
  Homolog annotation: Hit_ID=P12139; Match level="QueryCoverage=98%, HitCoverage=58%, E-value=9e-23, Identity=80%"; Hit description=50S ribosomal protein L20, chloroplastic
  Pfam annotation: Domain name=Ribosomal_L20; Domain location=2-70; Score=92.0; E_value=2e-24; Accession=PF00453.10; Description =Ribosomal protein L20
  Subcellular localization annotation: CTP_CleavageSite=66; ConfidenceScore=5.16e-01
MTRVPRGYIARRRRTKMRSFASNFRGAHLRLNRMITQQVRRAFVSSHRDRGRQKRDFRRLWITRINAATRG

SEQ ID NO: 81051 - protein, 74 aa, Setaria italica
  Transcript Sequence Number=SeqID_15077
  Subcellular localization annotation: CTP_CleavageSite=22; ConfidenceScore=5.03e-01
PNFQRNPLQDCCTSQANVFLNRQQANKTLKETQFSTCLHHCMMCSTSCLHITFFYIMITIFSLICHESLGINFV

SEQ ID NO: 81052 - protein, 569 aa, Setaria italica
  misc_feature (21)..(21): Xaa can be any naturally occurring amino acid
  misc_feature (24)..(24): Xaa can be any naturally occurring amino acid
  Transcript Sequence Number=SeqID_15078
  Gene Ontology: Mol. function=zinc ion binding; Cellular component =intracellular
  Homolog annotation: Hit_ID=B6TZY2; Match level="QueryCoverage=31%, HitCoverage=84%, E-value=3e-87, Identity=87%"; Hit description=Zinc finger protein 291
VLIPMLSASLENYIKVAALLXNDXNLLPNKTSTENTESSGEVLDGFLWTVTMIVGHVHLDDEQLQMQGGLIELIVAYQIIHRLRDLFALYDRPQVEGSPLPSSIRFGLNLLAVLTSKPGNFSTIDWESCKCRTLGGTIVQEYEYLSSQDSMGNQLMTLEQSGDNKLASLCSELPEENKSCKLHDLSIPGDRKLVDEARKDLIPVSGGLNNPAMQPPDLGIATEKRSEIPSQGDENSTIDSFLEGRKVNNVGSGYNSSPGKGNETSLKHPVMLLLSAMTETGLVSLPSLLTAVLLQANNRSSSEQTSAILPSNFEEVATGVLKVLNNVARLDINLLQCMLARSDLKMEFFHLISFLLSHCMNKWRVPNDQVGLLLLESLLLLGYFSLFHAENQAVLRWGKSPTILHKLCDLPFVFFSDPELMPILAAALIAVCYGCDQNRSVVQQEISTDMLRSLLKSCQTSLTSPDSIAVDGSGNNSSDNTQSLLDTRSPQGDIPIRSSRKIGRPVVGKGVSGGIRFNRNRVQKDGRGRGVDDGPLKQRAGEASSNFMLHRKIPASFLDRAEEFFCSET

SEQ ID NO: 81053 - protein, 395 aa, Setaria italica
  misc_feature (84)..(84): Xaa can be any naturally occurring amino acid
  Transcript Sequence Number=SeqID_15079
  Gene Ontology: Mol. function=zinc ion binding; Cellular component =intracellular; Biological process=mitotic spindle elongation
  Homolog annotation: Hit_ID=Q501L8; Match level="QueryCoverage=55%, HitCoverage=24%, E-value=4e-17, Identity=33%"; Hit description =Scaper protein (Fragment)
PENKFDRLKSADVVKKSTVHLEKEKQITAPWKSMDAWKEKRNWEDILKSPARSSRVSHSPGVGRKVTDRGRVLHDKLMSPEKKXRSAMDMKKEAEEKHARALRIRIQLESERVQRLQRTSEKLNRVNEWQAVRSSKLREVMNARHQRGESRHEAYLAQVAKRAGDESTKVNEVRFITSLNEENKKFLLRQKLYDSEMRRAEKLQVIKTKQKEDTAREEAVLERRKFLEAEKMQRLAEIQRKKEEAIFRREEERKASSAAREARAAEQQRRKEIRAKAQQEEAELLAQKLAEKLRESEQRRKYHLEQIRERASMDLRDQTSPFQRRFPSKDGQIRSTNSGEDSQITGNSSTADSVVKSSNNVQMKRRIKKIRQRLMALKHEFIEPPIGESTGITLL

SEQ ID NO: 81054 - protein, 65 aa, Setaria italica
  misc_feature (35)..(35): Xaa can be any naturally occurring amino acid
  Transcript Sequence Number=SeqID_15080
  Homolog annotation: Hit_ID=Q9MAJ5; Match level="QueryCoverage=100%, HitCoverage=9%, E-value=4e-18, Identity=58%"; Hit description =F27F5.22
ISETVIEDRFCLEHGTEGWYDALDHHFRWLLQYRXRPSSCRWGDSMRILAYTCPWPADHPKAKTK

SEQ ID NO: 81055 - protein, 52 aa, Setaria italica
  Transcript Sequence Number=SeqID_15081
  Homolog annotation: Hit_ID=Q9MAJ5; Match level="QueryCoverage=96%, HitCoverage=7%, E-value=7e-11, Identity=64%"; Hit description =F27F5.22
DALVPIDPLSPQISLHPGETAAVWVSLNVPCGQPPGLYEGEIFITAVKTELE

SEQ ID NO: 81056 - protein, 507 aa, Setaria italica
  misc_feature (15)..(15): Xaa can be any naturally occurring amino acid
  misc_feature (497)..(497): Xaa can be any naturally occurring amino acid
  Transcript Sequence Number=SeqID_15082
  Homolog annotation: Hit_ID=Q9MAJ5; Match level="QueryCoverage=98%, HitCoverage=79%, E-value=0.0, Identity=60%"; Hit description=F27F5.22
IDPLSPQISLHPGEXTAAVWVSLNVPCGQPPGLYEGEIFITAVKTELDSRTESLPKSERYRLHRELRSCLDITEPRDYSSSEEMVQRLTSASTTLKRMLDNPALQDCQENNGFGDMMDEDVMNNVSVRLKLSLTVWDFTLPVTPSLPAVFGISETVIEDRFCLEHGTEGWYDALDHHFRWLLQYRISPFFCRWGDSMRILAYTCPWPADHPKASEYYSDPRLAAYAVPYAPILSCTDAAKNSLRREVEILKSKPHWSKAYFYLWDEPLNVDQYDMICNISNELKSYAPDVRILTTYYCGPSGSELAPSTFEAFVKVPNVLRPHTQIFCTSEWVLGTREDLVKDIVAELRPDLGEEWWTYVCMGPSDPQPNWHLGMRGTQHRAVMWRVWKEGGTGFLYWGTNCYEKAMIPSAEICFRRGLPPGDGVLFYPGEVFSSSHEPVASTRLERILSGMQDIEYLKLYSSRYGREEGLALLEKTGMYLGPDRYTLDHGPVDVMXRGEVYRTCRS

SEQ ID NO: 81057 - protein, 241 aa, Setaria italica
  Transcript Sequence Number=SeqID_15083
  Gene Ontology: Mol. function=methyltransferase activity; Cellular component=mitochondrion; Biological process=ubiquinone biosynthetic process
  Homolog annotation: Hit_ID=B6UI48; Match level="QueryCoverage=100%, HitCoverage=79%, E-value=1e-125, Identity=88%"; Hit description =Ubiquinone biosynthesis methyltransferase COQ5
  Pfam annotation: Domain name=Methyltransf_11; Domain location=41-158; Score=69.5; E_value=1.3e-17; Accession=PF08241.4; Description =Methyltransferase domain
  Pfam annotation: Domain name=Methyltransf_12; Domain location=41-156; Score=38.4; E_value=2.9e-08; Accession=PF08242.4; Description =Methyltransferase domain
  Pfam annotation: Domain name=Ubie_methyltran; Domain location=1-240; Score=355.0; E_value=1.4e-103; Accession=PF01209.10; Description =ubiECOQ5 methyltransferase family
  Pfam module annotation: Pfam domain module=Methyltransf _11::Methyltransf_12::Ubie_methyltran; Domain location=41-158::41 -156::1-240
VFSSVASSYDLMNDLMSVGLHRLWKDRLVSKLNPFPGMKHLDVAGGTGDVVVTILERIKSVGHRAMQGTLTATEEDTHIYVCDINPNMLNVGKKRAVERGYSEEHCLSWIQGDAEALSFEDGSMDGYTIAFGIRNVTHIEKVLSEAYRVLKRGGRFLCLELSHVDVPVFKQIYDVYSFSVVPTMGELVAGDRQSYQYLVESIRRFPNQEKFAQMIQEAGFERVEYENLVGGVVAIHSGLKL

SEQ ID NO: 81058 - protein, 58 aa, Setaria italica
  Transcript Sequence Number=SeqID_15084
GASETRLWTEDDDADAGEEQEKPPAPSSGRRQKPGGVGASGQGFCLLIQGFRGFSKST

SEQ ID NO: 81059 - protein, 325 aa, Setaria italica
  Transcript Sequence Number=SeqID_15085
  Gene Ontology: Mol. function=nucleotide diphosphatase activity; Cellular component=vacuole; Biological process=metabolic process
  Homolog annotation: Hit_ID=Q42974; Match level="QueryCoverage=100%, HitCoverage=67%, E-value=1e-165, Identity=84%"; Hit description =Nucleotide pyrophosphatase
  Pfam annotation: Domain name=Phosphodiest; Domain location=1-264; Score=234.5; E_value=2.7e-67; Accession=PF01663.14; Description=Type I phosphodiesterase  nucleotide pyrophosphatase
NNYFPDPISGDHFNMANHDPKWWGGEPLWATAAAQGVLAATFFWPGSEVKKGSWNCPDKYCRHYNGSVPFEDRVDTILGYFDLPSDEMPQFLTLYFEDPDHQGHQVGPDDPAITDAVIRIDEMLGRLIAGLEARGVFEDVNIILLGDHGMVGTCDKKLVFLEELAPWIKLKEDWVLSMTPLLAIRPPDGVSPAEVVAKMNEGLGSGKVENGEYLRMYLKEDLPSRLHYSENYRIPPIIGLLAEGYKVEMKRSKRNECGGAHGYDNAFFSMRTIFAAHGPRFQGGRTVPSFENVEIYNVIASILNLKPAPNNGSASFPGMILLSSK

SEQ ID NO: 81060 - protein, 198 aa, Setaria italica
  misc_feature (179)..(179): Xaa can be any naturally occurring amino acid
  Transcript Sequence Number=SeqID_15086
  Gene Ontology: Mol. function=ATPase activity, coupled to transmembrane movement of substances; Cellular component=integral to membrane; Biological process=transport
  Homolog annotation: Hit_ID=Q6J0P5; Match level="QueryCoverage=100%, HitCoverage=13%, E-value=5e-93, Identity=81%"; Hit description =Multidrug-resistance associated protein 3
VFWTIISCHRSGIVVSGLFALLKVLAISSGPVLLKAFINVSLGKGSFKYEGYVLAATMFICKCCESLSQRQWYFRTRRLGLQVRSFLSAAIYKKQQKLSNSAKMKHSSGEIMNYVTVDAYRIGEFPYWFHQTWSTSVQLCIALVILYNAVGLAMIASLVVIIITVLCNALLSWNADSHXSKLMEAQDARLKAMTESLI

SEQ ID NO: 81061 - protein, 170 aa, Setaria italica
  Transcript Sequence Number=SeqID_15087
  Gene Ontology: Mol. function=porphobilinogen synthase activity; Cellular component=chloroplast; Biological process=tetrapyrrole biosynthetic process
  Homolog annotation: Hit_ID=Q5Z8V9; Match level="QueryCoverage=81%, HitCoverage=32%, E-value=3e-72, Identity=95%"; Hit description=Delta- aminolevulinic acid dehydratase, chloroplastic
  Pfam annotation: Domain name=ALAD; Domain location=1-151; Score=99.3; E_value=1.4e-26; Accession=PF00490.13; Description=Delta -aminolevulinic acid dehydratase
NSLLAQLINCFIIHDYSIMSYTAKYASSFYGPFREALDSNPRFGDKKTYQMNPANYREALIETAADEAEGADILLVKPGLPYLDVIRLLRDNSALPIAAYQVSGEYSMIKAGGALGMIDEQKVMMESLMCLRRAGADIILTYFARQAAGVLVVGLLGIPKLGSKTLVKGP

SEQ ID NO: 81062 - protein, 428 aa, Setaria italica
  Transcript Sequence Number=SeqID_15088
  Gene Ontology: Mol. function=porphobilinogen synthase activity; Cellular component=chloroplast; Biological process=tetrapyrrole biosynthetic process
  Homolog annotation: Hit_ID=Q5Z8V9; Match level="QueryCoverage=100%, HitCoverage=100%, E-value=0.0, Identity=88%"; Hit description=Delta -aminolevulinic acid dehydratase, chloroplastic
  Pfam annotation: Domain name=ALAD; Domain location=100-422; Score =745.7; E_value=3.4e-221; Accession=PF00490.13; Description=Delta -aminolevulinic acid dehydratase
  Subcellular localization annotation: CTP_CleavageSite=47; ConfidenceScore=5.50e-01
MASTVSFSPSNVQMLQARSGHGHGHAAFGSCSAVPRAGPRLRSTAVRVSSEQEAAAAVRAPSGKTIEECEADAVAGRFPAPPPLVRPKAPEGTPEIRPLDMTKRPRRNRKSPALRAAFQETTISPANFVLPLFIHEGEDDAPIGAMPGCYRLGWRHGLLDEVYKARDVGVNSFVLFPKVPDALKSPTGDEAYNDNGLVPRTIRLLKDKFPDIVVYTDVALDPYSSDGHDGIVREDGVIMNDETVYQLCKQAVSQARAGADVVSPSDMMDGRVGALRAALDAEGFHDVSIMSYTAKYASSFYGPFREALDSNPRFGDKKTYQMNPANYREALIETAADEAEGADILLVKPGLPYLDVIRLLRDNSALPIAAYQVSGEYSMIKAGGALGMIDEQKVMMESLMCLRRAGADIILTYFARQAAGVLCGMGSK

SEQ ID NO: 81063 - protein, 167 aa, Setaria italica
  Transcript Sequence Number=SeqID_15089
  Gene Ontology: Mol. function=molecular_function; Cellular component =integral to membrane; Biological process=biological_process
  Homolog annotation: Hit_ID=Q94AA1; Match level="QueryCoverage=84%, HitCoverage=30%, E-value=1e-40, Identity=58%"; Hit description=UNC93- like protein
FTKSIVTPALGISGVGGAMAIFGAAGTVCALVTGYLTSGLYSATLIVSFGAIAHAVVLFWLLLFYSPMVGVLGAAVPLLIGALWGVGDGMLNTELNAVVGLLFEDSKEASFAQFKVWECGAIAVIFFLSPHITLQAMLILMTAALFISLGAFLLLTIFVEKSSPVRS

SEQ ID NO: 81064 - protein, 190 aa, Setaria italica
  Transcript Sequence Number=SeqID_15090
  Gene Ontology: Mol. function=transferase activity
  Homolog annotation: Hit_ID=B6T444; Match level="QueryCoverage=96%, HitCoverage=33%, E-value=2e-54, Identity=50%"; Hit description =Glycosyltransferase
  Pfam annotation: Domain name=DUF563; Domain location=1-154; Score =44.8; E_value=3.8e-12; Accession=PF04577.6; Description=Protein of unknown function (DUF563)
HDVSDVLLPLFLTAHQFDRDVQLLITNNKPWFIKKYAAIFHRLTKHHIIDFDADNQVRCYPHVIVGLRSHRDLGIDPNSTPQNYTMVDFHLFVRESYGLPAPEVDIPYRADKDDPERKPRIMLIDRGKTRRFMNAPDVLQGLDWFGFEVVKADPRIDSNLDEFVRLVDSCDAIMGVHGAGLTNMIVPAVR

SEQ ID NO: 81065 - protein, 152 aa, Setaria italica
  Transcript Sequence Number=SeqID_15091
  Homolog annotation: Hit_ID=B9RT09; Match level="QueryCoverage=82%, HitCoverage=17%, E-value=3e-15, Identity=35%"; Hit description =Pentatricopeptide repeat-containing protein, putative
DNGGGCEWLDPTSFLPSQEGVSGVCTTTTAAMEEILSFARSLAAAGHSAFTEFLAGYNHGDLNEEVCVELLRRMSEEGLDCAHLFQWLREKQPVPVSPQVWLAGIVALGRCRMADEVLEIVARLPSEREFREAVVYNAAISAVAYCERYDGA

SEQ ID NO: 81066 - protein, 101 aa, Setaria italica
  Transcript Sequence Number=SeqID_15092
PRAGAAAAIWRARVRRTGGGSGEDEAAPAVVRIWGLSRLGFSLAPPADGDGGGGGLVGAGVGAWLPLRSAPSTRGGERTHTHTRCRWPPLRQSPAPPLLST

SEQ ID NO: 81067 - protein, 73 aa, Setaria italica
  Transcript Sequence Number=SeqID_15093
  Gene Ontology: Mol. function=hydrolase activity; Biological process =metabolic process
  Homolog annotation: Hit_ID=B6T355; Match level="QueryCoverage=100%, HitCoverage=21%, E-value=1e-15, Identity=61%"; Hit description =Gibberellin receptor GID1L2
LLVCAAEGDFLRWRGRAYAEAVAAARGGGLGEDAAGVELLETVGEGHVFHLFKPDCDKAKEMLDKVVAFINAP

SEQ ID NO: 81068 - protein, 72 aa, Setaria italica
  Transcript Sequence Number=SeqID_15094
  Subcellular localization annotation: CTP_CleavageSite=39; ConfidenceScore=5.23e-01
PRLLPQVASSPGTAPHVQPPIAKNSTARPSPPHHPVPAQAQELREIKAPDWTWTRRMRAPGTSGTGRDDWLT

SEQ ID NO: 81069 - protein, 287 aa, Setaria italica
  Transcript Sequence Number=SeqID_15095
  Homolog annotation: Hit_ID=B9R7H5; Match level="QueryCoverage=96%, HitCoverage=54%, E-value=7e-46, Identity=39%"; Hit description =Transcription factor, putative
  Pfam annotation: Domain name=DUF547; Domain location=178-287; Score =111.4; E_value=3.1e-30; Accession=PF04784.6; Description=Protein of unknown function, DUF547
RPGRSLSQGDCPGKENQSCGTNSCRDFGRAPLSNVPKCRIPPAEKCAGVQTTSTVEDHKAIDGSNGIDSDMASTAANKVSEELLTCLMAIFSQMSTSRSHDEEQASSPSVSGSCESSSDGACAGTGDPYGVLEFGCRDIGWYKQFRSVDAASFDTNVSAGDAAALGRRLKALLRKLSSVDLVGLSHQQRLAFWINTYNSCMMNAFLEHGAPTNPHMLVAMMPKATINVSGRVLSAMTIEHFVLRLPYGAKHVNTEAVKGDGTAVLGLEWPEPLVTFALSCRSWSSPA

SEQ ID NO: 81070 - protein, 85 aa, Setaria italica
  Transcript Sequence Number=SeqID_15096
MEGLIPLVYRAIVEYRKAREAVAIGSFLYGDQPCGSRASSSSRLFGDPDGSWYAATSLSPAASPPARASLVSPLLRSASRRRCAG

SEQ ID NO: 81071 - protein, 36 aa, Setaria italica
  Transcript Sequence Number=SeqID_15097
LAGDFMKPRIQEVDQLLKLGVNVTIYSGQMEVLLAQ

SEQ ID NO: 81072 - protein, 161 aa, Setaria italica
  Transcript Sequence Number=SeqID_15098
  Gene Ontology: Mol. function=serine-type carboxypeptidase activity; Cellular component=extracellular region; Biological process =proteolysis
  Homolog annotation: Hit_ID=Q67Y83-2; Match level="QueryCoverage=98%, HitCoverage=40%, E-value=9e-48, Identity=55%"; Hit description =Isoform 2 of Serine carboxypeptidase-like 51
  Pfam annotation: Domain name=Peptidase_S10; Domain location=1-158; Score=-216.6; E_value=0.017; Accession=PF00450.14; Description =Serine carboxypeptidase
GYLESMAAASQEGGFEGLMNTVIKKKLGIVPKDVSWGEESGDVFDALAGDFMKPRIQEVDQLLKLGVNVTIYSGQLDLICATKGTMDWVQKLKWDGLKSFMDSPRKPIYCNKEGQSGTQAFVRSYKNLNFYWILGAGHMVPIDNPCPALKMLADITRSPAK

SEQ ID NO: 81073 - protein, 390 aa, Setaria italica
  Transcript Sequence Number=SeqID_15099
  Gene Ontology: Mol. function=serine-type carboxypeptidase activity; Cellular component=extracellular region; Biological process =proteolysis
  Homolog annotation: Hit_ID=Q67Y83; Match level="QueryCoverage=89%, HitCoverage=75%, E-value=3e-96, Identity=51%"; Hit description =Serine carboxypeptidase-like 51
  Pfam annotation: Domain name=Peptidase_S10; Domain location=38-390; Score=44.8; E_value=2.5e-17; Accession=PF00450.14; Description =Serine carboxypeptidase
MSPVASLSQVAMAPRPFVALLLLLCAAAAFVLAADAAGTADGSEEWGYVQVRPKAHMFWWLYHSPQRVDNGRTPWPTVLWLQGGPGASGVGYGNFMEIGPLDSELKPRATTWLAKADLLFVDNPVGTGFSYVEGGDKSLMARTDAEAARDLVALLCALYRDNPRLRASPLYIVAESYGGKFAVTTALAALRAVEQGRLRANLAGVALGDSWISPLDFVMSWGPLLYQVSRVDEKGLQQCNSVAAKIKDQVEKQQFADAEESWSELESVVLENSNSVDFYNFLKDDAPSDATTTTAQRKRSTLSSFRSKKGYSGYLESMAAASQEGGFEGLMNTVIKKKLGIVPKDVSWGEESGDVFDALAGDFMKPRIQEVDQLLKLGVNVTIYSGQVRN

SEQ ID NO: 81074 - protein, 74 aa, Setaria italica
  Transcript Sequence Number=SeqID_15100
  Gene Ontology: Mol. function=transcription factor activity; Cellular component=nucleus; Biological process=regulation of transcription, DNA-dependent
  Homolog annotation: Hit_ID=Q64MA1; Match level="QueryCoverage=100%, HitCoverage=30%, E-value=2e-22, Identity=70%"; Hit description =Dehydration-responsive element-binding protein 1A
  Subcellular localization annotation: CTP_CleavageSite=67; ConfidenceScore=5.16e-01
MCQIKKEMSAESGSPCSSPSASTSPEHHQTVWTSPPKRPAGRTKFRETRHPVFRGVRRRGNAGRWVCEVRVPGR

SEQ ID NO: 81075 - protein, 168 aa, Setaria italica
  Transcript Sequence Number=SeqID_15101
  Gene Ontology: Cellular component=integral to membrane
  Homolog annotation: Hit_ID=B6TX86; Match level="QueryCoverage=88%, HitCoverage=91%, E-value=2e-37, Identity=58%"; Hit description =PGPS/D12
  Pfam annotation: Domain name=PLAC8; Domain location=34-133; Score =182.1; E_value=1.6e-51; Accession=PF04749.9; Description=PLAC8 family
MYPAKPSDAAAAAPVTGVPVGGPPVAAGNATSQWSSGLFDCFDDCGLCCLTCWCPCITFGRVAEIVDRGATSCGTSGALYALLAYLTGCQWIYSCTYRSKMRAQFGLPENPCCDCCVHFCCEACALCQQYKELKARGFDPELGWDLNAQRGAGAGQAMYAPAAQGMGR

SEQ ID NO: 81076 - protein, 173 aa, Setaria italica
  Transcript Sequence Number=SeqID_15102
  Gene Ontology: Cellular component=integral to membrane
  Homolog annotation: Hit_ID=B6TX86; Match level="QueryCoverage=56%, HitCoverage=58%, E-value=3e-37, Identity=79%"; Hit description =PGPS/D12
  Pfam annotation: Domain name=PLAC8; Domain location=34-138; Score =180.6; E_value=4.4e-51; Accession=PF04749.9; Description=PLAC8 family
  Subcellular localization annotation: CTP_CleavageSite=26; ConfidenceScore=5.09e-01
MYPAKPSVAAASAPVTGVPMGGPPVAAGNATSQWSSGLFDCFDDCGLCCLTCWCPCITFGRVAEIVDRGATSCGMSGAMYTLLALVAYLTGFRCQWIYSCTYRSKMRAQFGLPETPCCDCCVHFFCERCALCQQYKELKARGFDPEIGWDLNAQRGAGAGQAMYAPAAQGMGR

SEQ ID NO: 81077 - protein, 90 aa, Setaria italica
  Transcript Sequence Number=SeqID_15103
ALSGFPAARCLSTSVASDDDDDEGGSSEQEAAAASGHPEHVGRVCAAIADVIAAGASRFASAALSALAPPLSEALVLAVLDRFKHAHRPS

SEQ ID NO: 81078 - protein, 75 aa, Setaria italica
  Transcript Sequence Number=SeqID_15104
  Pfam annotation: Domain name=Mit_gmP; Domain location=10-71; Score =56.6; E_value=9.6e-14; Accession=PF10247.1; Description=Putative mitochondrial genome mainten
MARTDSCLARVGAGAVIGGAVGGAVGACYGTFEAFRYKIPGLLKIRYIGQTTVGSAAIFGLFLGAGSLIHCGKSY

SEQ ID NO: 81079 - protein, 94 aa, Setaria italica
  misc_feature (63)..(63): Xaa can be any naturally occurring amino acid
  Transcript Sequence Number=SeqID_15105
PPAARRRRRRHGGSHSREDMDLSDSDSDDGESRASDKSSDYGTPPPASASSKAGGGAGAATPXSIDAIDRHLRSLHLKYNEPISPNPSPGLVAT

SEQ ID NO: 81080 - protein, 79 aa, Setaria italica
  Transcript Sequence Number=SeqID_15106
EWQGPPHPQTLFTVLNIFWSFLLFYSFLFKLYPFLSLYDAECLGVHTLLQWFSLPTVAFSVLASSFFSQTTQESCVSFH

SEQ ID NO: 81081 - protein, 348 aa, Setaria italica
  Transcript Sequence Number=SeqID_15107
  Gene Ontology: Mol. function=pyridoxal phosphate binding; Biological process=biotin biosynthetic process
  Homolog annotation: Hit_ID=B0F481; Match level="QueryCoverage=100%, HitCoverage=41%, E-value=1e-129, Identity=64%"; Hit description =Mitochondrial bifunctional diaminopelargonate synthase-dethiobiotin synthetase
  Pfam annotation: Domain name=Aminotran_3; Domain location=4-286; Score=-70.1; E_value=3.7e-10; Accession=PF00202.13; Description =Aminotransferase class-III
KVLALNGSYHGDTLGAMEAQAPSAYTSFIQQPWYSGRGLFLDPPTVCIKSETCNVSLPQSMQHYPRTSGDTCFPSLAEVFCKTRDTSSAADLYLSYIKQQLSEFSQSSNSDHLAALIIEPVIQGAGGMLMIDPLFQRVLVRECRSRKIPVIFDEVFTGFWRLGVESASELLGCLPDIACYAKLMTGGIVPLAATLATEEVFESFKSDSKLTALLHGHSYTAHAMGCMAALKAIQWYRDPSTNSNLDLDHMKLKELWDGALVKQLSSLPNVKRVVSLGTLCAIELKAEGSDAGYASLYASSLVQQLRREDDIYIRPLGNVIYLMCGPCTPRDSCSRQLHKVLRRLCDLN

SEQ ID NO: 81082 - protein, 71 aa, Setaria italica
  misc_feature (11)..(11): Xaa can be any naturally occurring amino acid
  Transcript Sequence Number=SeqID_15108
  Gene Ontology: Mol. function=peptidyl-prolyl cis-trans isomerase activity; Cellular component=chloroplast envelope; Biological process=protein transport
  Homolog annotation: Hit_ID=Q9FLP1; Match level="QueryCoverage=98%, HitCoverage=11%, E-value=5e-16, Identity=58%"; Hit description =Trigger factor-like protein
IGDLVVLDIFXAESINSDGSKGEKISSAESTGFHLDTEENNNLVPGFLGSLIGIRPGEARSFPIQFPESFD

SEQ ID NO: 81083 - protein, 90 aa, Setaria italica
  Transcript Sequence Number=SeqID_15109
  Gene Ontology: Mol. function=peptidyl-prolyl cis-trans isomerase activity; Cellular component=chloroplast envelope; Biological process=protein transport
  Homolog annotation: Hit_ID=Q9FLP1; Match level="QueryCoverage=60%, HitCoverage=9%, E-value=1e-14, Identity=68%"; Hit description =Trigger factor-like protein
FPGFHLDTEENNNLVPGFLGSLIGIRPGEARSFPIQFPESFDQESLRGVCAQFTVSVMLLKSTLKISVVHAITPALQDQLVSAEGVVPQF

SEQ ID NO: 81084 - protein, 172 aa, Setaria italica
  Transcript Sequence Number=SeqID_15110
  Gene Ontology: Mol. function=peptidyl-prolyl cis-trans isomerase activity; Cellular component=chloroplast envelope; Biological process=protein transport
  Homolog annotation: Hit_ID=B9SYY0; Match level="QueryCoverage=100%, HitCoverage=31%, E-value=4e-61, Identity=63%"; Hit description =Trigger factor, putative
  Pfam annotation: Domain name=Trigger_C; Domain location=1-162; Score =41.8; E_value=2.6e-09; Accession=PF05698.6; Description=Bacterial trigger factor protein (TF) C-terminus
GCNTIDEVRERILERCKEVEKTAIEQATDNAILDQLGKLVEVDVPRALFQEQGQQLYGAKLLQLQAERKLDKDQLASLSTQRSVQAYLEDEKENITRIIKQMLAVGDIFKSENLQYSTEQLIKEVENLVAEFKQYNQDYNEDNIKQQVQDVLEAAKVLEWLKENCTIEYVRR

SEQ ID NO: 81085 - protein, 392 aa, Setaria italica
  Transcript Sequence Number=SeqID_15111
  Gene Ontology: Mol. function=peptidyl-prolyl cis-trans isomerase activity; Cellular component=chloroplast envelope; Biological process=protein transport
  Homolog annotation: Hit_ID=B9SYY0; Match level="QueryCoverage=80%, HitCoverage=57%, E-value=1e-103, Identity=55%"; Hit description =Trigger factor, putative
  Pfam annotation: Domain name=FKBP_C; Domain location=242-334; Score= -6.9; E_value=0.017; Accession=PF00254.20; Description=FKBP-type peptidyl-prolyl cis-trans isomer
  Pfam annotation: Domain name=Trigger_N; Domain location=75-227; Score= 87.0; E_value=6.6e-23; Accession=PF05697.5; Description=Bacterial trigger factor protein (TF)
  Pfam module annotation: Pfam domain module=FKBP_C::Trigger_N; Domain location=242-334::75-227
  Subcellular localization annotation: CTP_CleavageSite=65; ConfidenceScore=5.95e-01
MELATATATAAAAVASASRNHSSFSSPRAVSASWNSPSLASTSPASTSRRRGRWLPVTSAAVELREAAAGGGDSVRVTETPQPGSSVKFSVEVPASIIQECYQLTLQEYAKRFKVPGFRPGKIIPENILINYVGPEHVQDATIEAILKHTLPQALSSVEDKALEDSVRILTQFDDMRSSFSLDDVFRYDVAVDIAPEVRWLSEDKYKNLKVVVEIDEAVDAEKATEKELQRRHKALGLLRIVADRGLQIGDLVVLDIFAESINSDGSKGEKISSAESTGFHLDTEENNNLVPGFLGSLIGIRPGEARSFPIQFPESFDQESLRGVCAQFTVVCKELFYRELPEMDDSLAGKLLPGCNTIDEVRERILERCKEVEKTAIEQATDNAILDSSLW

SEQ ID NO: 81086 - protein, 571 aa, Setaria italica
  Transcript Sequence Number=SeqID_15112
  Gene Ontology: Mol. function=transporter activity; Cellular component= membrane; Biological process=oligopeptide transport
  Homolog annotation: Hit_ID=B6TII9; Match level="QueryCoverage=99%, HitCoverage=99%, E-value=0.0, Identity=85%"; Hit description=Peptide transporter PTR2
  Pfam annotation: Domain name=MFS_1; Domain location=48-510; Score= -10.1; E_value=0.061; Accession=PF07690.8; Description=Major Facilitator Superfamily
  Pfam annotation: Domain name=PTR2; Domain location=110-502; Score =291.7; E_value=1.6e-84; Accession=PF00854.13; Description=POT family
  Pfam module annotation: Pfam domain module=MFS_1::PTR2; Domain location=48-510::110-502
MEEGGEHTSLLVKDDASCHREEPQNLLEANQGSQPKSKLSGWRAPALILGLECLESMAFNGIATNLVVYIRSVLHGGIASSASTVSLWYGTSFFVPILGAAVADTYLGNYKTILISLIMYLLGMVLITVATFMPSTSVICDMSSCLSSDGTQNLIFFVGLYLTAVGCGGVRSALLPFGANQFSNEHSLDVKKRRIFFSLFYICVIFGVITSGTIIVWVQENVSWAIGYGIATTCIGLALIGFLVGTPIFRQDEPCGSPVKSIFQVIVASFRNISLEVPADSSLLYEVRSNHTQRAKLAHSDDFRFLDKAAVIFDPSLASGSCRSSWSLCTVTEVEELKILIRLLPIWVTGILFGAAISQMHTTFIQQGTVMNTKIGSLSIPPASLYSFEVICVTLWVLFVNKVVVPATRTYFANGAELTQLQRIGIGRFLMIFAMAMAALLETKRLQSVQEGEPLSIVWQLPQYFVIAGAECFAIITQLEFFHGQAPDSMKSMLTAFALLTTALGNYLSSAIITFIAGVTKIWQSPGWIPDDLNRGHLDYYYWCLTALTMANFVVYLYFASKYKLKKVVIS

SEQ ID NO: 81087 - protein, 60 aa, Setaria italica
  Transcript Sequence Number=SeqID_15113
EEAGGRTCNFCRSFLCSLPLRRVHALVIDVFSFDALDVDGELGVPTYAFYPAGAAALAVY

SEQ ID NO: 81088 - protein, 159 aa, Setaria italica
  misc_feature (121)..(121): Xaa can be any naturally occurring amino acid
  Transcript Sequence Number=SeqID_15114
  Gene Ontology: Mol. function=protein serine/threonine phosphatase activity; Cellular component=protein serine/threonine phosphatase complex; Biological process=protein amino acid dephosphorylation
  Homolog annotation: Hit_ID=Q6L5C4; Match level="QueryCoverage=21%, HitCoverage=6%, E-value=5e-10, Identity=85%"; Hit description =Probable protein phosphatase 2C 52
  Subcellular localization annotation: CTP_CleavageSite=54; ConfidenceScore=5.34e-01
SASSSTPHRPTPSSPRTQIQSLTDPPPPRSDRLRLLPIGSRRVLGVCGDFRWFYDGAVKDQESAANTASASAAVSEASGDSPAASEAAAVSARPSARLPHDKRLGVRHPLKHRRFRAGGRXMVEPGGVPPAQAVAEGEEEEEASEVEEEEEASSTETDM

SEQ ID NO: 81089 - protein, 444 aa, Setaria italica
  misc_feature (16)..(16): Xaa can be any naturally occurring amino acid
  misc_feature (80)..(80): Xaa can be any naturally occurring amino acid
  Transcript Sequence Number=SeqID_15115
  Gene Ontology: Mol. function=protein serine/threonine phosphatase activity; Cellular component=protein serine/threonine phosphatase complex; Biological process=protein amino acid dephosphorylation
  Homolog annotation: Hit_ID=Q6L5C4; Match level="QueryCoverage=96%, HitCoverage=84%, E-value=1e-147, Identity=65%"; Hit description =Probable protein phosphatase 2C 52
  Pfam annotation: Domain name=PP2C; Domain location=180-420; Score =278.7; E_value=1.3e-80; Accession=PF00481.13; Description=Protein phosphatase 2C
VRLGVRHPLKHRRFRXRGKMMVEPGGVPPAQAVAEGEEEEEASEVEEEEEASSTETDMQAADVEVSSAPAAGVQAMEVEXAEMEASPEPAVAVGVTELEAQPDEEDEVSSIAMAQGERKQEAAPATSAVLAVEAPKEKDQDKEREEKEKRDKERERQKERERVDEVGYMSGGWKSVDGSLNCGYSSFRGKRASMEDFYDIKSSKIDDKQISLFGIFDGHGGSRAAEYLKEHLFDNLMKHPEFMTDTKLAISETYRRTDSEFLDAERNSHRDDGSTASTAVLVGDHLYVANVGDSRAVISKAGKAIALSEDHKPNRSDERKRIESAGGIVMWAGTWRVGGVLAMSRAFGNRLLKQFVIAEPEIQEQEIDDELEFLIIASDGLWDVVPNEDAVALVKMEEEPEAAARKLTETAFSRGSGDNITCIVVKFQHDKPGGGSPSPSGDKS

SEQ ID NO: 81090 - protein, 84 aa, Setaria italica
  Transcript Sequence Number=SeqID_15116
  Gene Ontology: Mol. function=protein binding; Cellular component =membrane coat; Biological process=intracellular protein transport
  Homolog annotation: Hit_ID=Q5QMU1; Match level="QueryCoverage=97%, HitCoverage=12%, E-value=9e-36, Identity=81%"; Hit description=AP-3 complex delta subunit-like protein
REALHLMMGMVDENNIMDIASMLVSHAAKSDPEFANDILGVVLAACGRNVYELVADFDWYALLLTDMARSLHCAQGDEIGRQSC

SEQ ID NO: 81091 - protein, 146 aa, Setaria italica
  misc_feature (43)..(43): Xaa can be any naturally occurring amino acid
  Transcript Sequence Number=SeqID_15117
  Gene Ontology: Mol. function=ubiquitin-protein ligase activity; Cellular component=ubiquitin ligase complex; Biological process =protein ubiquitination
  Homolog annotation: Hit_ID=Q8H333; Match level="QueryCoverage=100%, HitCoverage=25%, E-value=2e-30, Identity=52%"; Hit description=Arm repeat-containing protein-like
NVAACAEGRAALMDAGAVATASAILSGDGSRSSELQEWCVAAXLYAMSRGSPRFRGLARAAGADRQLMLIAEQASPGVHEDMAQMALRTMLGLADNSDDDQITECMSNEGNHGGGRVPHRRRVASWSAPPPATPASSHQWRSVCID

SEQ ID NO: 81092 - protein, 63 aa, Setaria italica
  Transcript Sequence Number=SeqID_15118
THSIHLLTTDDPSAPLHTLYWISHRRTLAIANHEHQSQYPIPSRQHTHTNQSNFKLLFLRECW

SEQ ID NO: 81093 - protein, 75 aa, Setaria italica
  misc_feature (66)..(66): Xaa can be any naturally occurring amino acid
  Transcript Sequence Number=SeqID_15119
  Subcellular localization annotation: CTP_CleavageSite=34; ConfidenceScore=5.32e-01
MLLLHPRAVPAPALRGRPPPPRPRPRRRLVPPPLAAASGSIAVSSDEDAFTRCSGYLFEEGAATEXSLPIAYDLP

SEQ ID NO: 81094 - protein, 445 aa, Setaria italica
  Transcript Sequence Number=SeqID_15120
  Gene Ontology: Mol. function=transferase activity; Cellular component= mitochondrial outer membrane; Biological process=glycolysis
  Homolog annotation: Hit_ID=Q2KNB4; Match level="QueryCoverage=99%, HitCoverage=88%, E-value=0.0, Identity=84%"; Hit description =Hexokinase-3
  Pfam annotation: Domain name=Hexokinase_1; Domain location=1-183; Score=204.0; E_value=4.1e-58; Accession=PF00349.13; Description =Hexokinase
  Pfam annotation: Domain name=Hexokinase_2; Domain location=185-438; Score=214.7; E_value=2.5e-61; Accession=PF03727.8; Description =Hexokinase
  Pfam module annotation: Pfam domain module=Hexokinase_1::Hexokinase _2; Domain location=1-183::185-438
ARLRQVVDAMVVEMHAGLASDGGSKLKMLLTFVDALPTGNEEGIYYAIDLGGTNFRALRVEVGSGSVVTSRKVELPIPEELTKGTIEELFNFVAIALKDFVEREDGKDEKRALGFTFSFPVRQTSVSSGSLIRWTKGFSIENAVGKDVAQCLNEALAMSGLNVRVTALVNDTVGTLALGHYHDEDTVAAVIIGAGTNACYIERTDAIIKCQGLLTNSGGMVVNMEWGNFWSSHLPRTPYDISLDDETQNRNDQGFEKMISGIYLGEIARLVLHRMALESDVFGDAADNLSTPFTLSTPLLAAIREDDSPDLSEVRRILQEHLKIPDTPLKTRRLVVKVCDIVTRRAARLAAAGIVGILKKLGRDGSGVASSGRTRGQPRRSVVAIEGGLYQGYPVFREYLDEALVEILGEEVARTVALRVTEDGSGVGAALLAAVYSSNRQQGSI

SEQ ID NO: 81095 - protein, 81 aa, Setaria italica
  Transcript Sequence Number=SeqID_15121
MGGGGAHGGTTYKGYTIPHNKRWHTVAGKGLCAVMWFWVFYRAKQDGAVLLGLRHPWDGHDDHSHGHGHEHEASSSSSSSH

SEQ ID NO: 81096 - protein, 81 aa, Setaria italica; identical to SEQ ID NO: 81095
  Transcript Sequence Number=SeqID_15122

SEQ ID NO: 81097 - protein, 116 aa, Setaria italica
  misc_feature (95)..(95): Xaa can be any naturally occurring amino acid
  misc_feature (107)..(107): Xaa can be any naturally occurring amino acid
  misc_feature (109)..(109): Xaa can be any naturally occurring amino acid
  Transcript Sequence Number=SeqID_15123
  Gene Ontology: Cellular component=plastoglobule
  Homolog annotation: Hit_ID=B6STS2; Match level="QueryCoverage=79%, HitCoverage=32%, E-value=3e-41, Identity=91%"; Hit description=SOUL heme-binding protein
QALAASQRRAADLAAEAAKYAFPSRRFEPRTLEEALMSVPDLETVPFRVLKREADYEIREVESYFVAETTMPGRSGLDFNGSSQSFNVLASYLFXTASEQMEMTTPXFXRKGEPSS

SEQ ID NO: 81098 - protein, 186 aa, Setaria italica
  Transcript Sequence Number=SeqID_15124
  Gene Ontology: Mol. function=hydrolase activity
  Homolog annotation: Hit_ID=B9RES9; Match level="QueryCoverage=97%, HitCoverage=85%, E-value=2e-83, Identity=80%"; Hit description =Guanine deaminase, putative
  Pfam annotation: Domain name=dCMP_cyt_deam_1; Domain location=28-130; Score=135.7; E_value=1.5e-37; Accession=PF00383.14; Description =Cytidine and deoxycytidylate deaminas
MEEAKVVESKDGTISVASAFAGHQEAVQDRDHKFLSKAVEEAYRGVDCGDGGPFGAVVVRNDEVVVSCHNMVLKHTDPTAHAEVTAIREACKKLGKIELSDCEIYASCEPCPMCFGAVHLSRIKRLVYGAKAEAAIAIGFDDFIADALRGTGYYQKSNMEIKQADGNGALIAEQVFEKTKEKFQMY

SEQ ID NO: 81099 - protein, 226 aa, Setaria italica
  Transcript Sequence Number=SeqID_15125
  Gene Ontology: Mol. function=metal ion binding
  Homolog annotation: Hit_ID=Q6L4G5; Match level="QueryCoverage=100%, HitCoverage=45%, E-value=7e-95, Identity=50%"; Hit description =Putative zinc finger protein
  Pfam annotation: Domain name=Hemerythrin; Domain location=133-195; Score=31.3; E_value=4e-06; Accession=PF01814.15; Description =Hemerythrin
KEEEQVFPLLVKKFSHEEQANLVWQFLCSFPVNMMADFLPWISASVSPDDNQDILDCLRKIVPEEKLLQEIVFSWIGGKSFRTIAQDFSDPYLKSSFTCECSSDQADKHTCSLEHSKIGKRKSTESSQLATHPIDEILYWHNAIRRELSDIAEEAKRIQQSGDFSDIADFNTRLQFIADVCIFHSIAEDQVIFPAVDGELSFVQEHAEEERRFNKFRSLIEQIQIS

SEQ ID NO: 81100 - protein, 105 aa, Setaria italica
  misc_feature (12)..(12): Xaa can be any naturally occurring amino acid
  Transcript Sequence Number=SeqID_15126
  Gene Ontology: Mol. function=hydrolase activity
  Homolog annotation: Hit_ID=Q7XSV9; Match level="QueryCoverage=98%, HitCoverage=36%, E-value=1e-41, Identity=81%"; Hit description =OSJNBa0027H06.16 protein
DTIELDDATAYXGRMERLVNDLRADLGIPDLLVIQVGLASGEGNYTDIVREAQKNIKLPNVILVDAIGLPLRDDQLHLSTEAHLRLGDMLGQAYLKFNSSTDSRQ

SEQ ID NO: 81101 - protein, 604 aa, Setaria italica
  misc_feature (167)..(167): Xaa can be any naturally occurring amino acid
  Transcript Sequence Number=SeqID_15127
  Gene Ontology: Mol. function=histone acetyltransferase activity; Cellular component=nucleus; Biological process=regulation of transcription, DNA-dependent
  Homolog annotation: Hit_ID=Q6YXY2; Match level="QueryCoverage=100%, HitCoverage=35%, E-value=0.0, Identity=62%"; Hit description =Probable histone acetyltransferase HAC-like 1
  Subcellular localization annotation: CTP_CleavageSite=78; ConfidenceScore=5.15e-01
MNVGQAAHLSGQMSGQAAQMNQVANSGVGVGVGGADGLQQHQPMQDMASLTGTDQQFVMLRTTMRDRIFECLGRKQLSAEWRKRLPELAKRLEEMLFRKFPNRNEYYNMMNGPVEPQLQFAIKTLSAQNQQNQQNPQMSRQIASSSGYGTMIPTPGMTQGTSGENFXRVPYVSDNNTLSSSGAGMVPQNANMGTSMPGSMSNGYQHSNNTITQNSTPNSIQSAMGSVGVQRQLPHMIPTPGFSNQQNVPVNPEYSNGTGYFNGDSAVAPHMQHQKQFSSNQNSNQIQHIGGHSNSGIHSSMLDNSSAYGLSDGHMNGGIGLHGSNMQLTNRTTAPEAYMNIPPYGSSPKPLQQQFNQRSQQRIPTSVDMAGSGSFYATGSTPLTTANSQSMNVANLQSRSRMNPMLVNNQLNIQSIQPQPQIKTEVLDQPEKVNFQSSQLTHDQLIRQHSMPQHQVQPNSQFVQNQYHISQQQPNPQHQQAMLRSNSFKQSQMASSHSMQLSEQGTLPHTELVSSQASDPVDIPSFQGQYQQRNALDNVKGGQMFGHLSGSQNFHASASHGSQQLLPSNPQLDDGSNDVSYVLKGSQTEQILRPQWQPQTTEKA

SEQ ID NO: 81102 - protein, 79 aa, Setaria italica
  Transcript Sequence Number=SeqID_15128
  Gene Ontology: Mol. function=oxidoreductase activity, acting on single donors with incorporation of molecular oxygen, incorporation of two atoms of oxygen; Cellular component=plastoglobule; Biological process=oxidation reduction
  Homolog annotation: Hit_ID=B9S1S9; Match level="QueryCoverage=69%, HitCoverage=8%, E-value=6e-16, Identity=70%"; Hit description=9-cis -epoxycarotenoid dioxygenase, putative
LVLVAPNVLSVEHALERMELVHGCVEKVRIDLRTGAVSRTPLSAGNLDFGVIHPSSRRSSDGRSIPGAQNSKRKHTQTE

SEQ ID NO: 81103 - protein, 659 aa, Setaria italica
  Transcript Sequence Number=SeqID_15129
  Gene Ontology: Mol. function=oxidoreductase activity, acting on single donors with incorporation of molecular oxygen, incorporation of two atoms of oxygen; Cellular component=plastoglobule; Biological process=oxidation reduction
  Homolog annotation: Hit_ID=B9S1S9; Match level="QueryCoverage=77%, HitCoverage=81%, E-value=0.0, Identity=62%"; Hit description=9-cis -epoxycarotenoid dioxygenase, putative
  Pfam annotation: Domain name=RPE65; Domain location=135-634; Score =688.7; E_value=4.9e-204; Accession=PF03055.7; Description=Retinal pigment epithelial membrane protein
  Subcellular localization annotation: CTP_CleavageSite=52; ConfidenceScore=5.36e-01
MERTLITSNLSMAAHPSRSSGRVHYISPAASAAAQNSSYNRKKSTPSRPPPSAAATATVVTSPPPATDNAQPAAPKQAEQQEKGERVAAKTTTSRTATARARAPTSQALARPRRRPAPAAASLPMAFCSALEEAINTFVDPPALRPSVDPRNVLSANWAPVDELPPTPCPVVRGVIPRCLAGGAYIRNGPNPQHLPRGPHHLFDGDGMLHSLLLPAADSPPSADPILCSRYVQTYKYIVERDAGAPVMPNVFSGFHGLAGFARGAVVAARVLTGQMNPAEGVGLANTSLAFFGGRLYALGESDLPYAVRVDPATGEVTTHGRCDFGGRLFMGMTAHPKKDPITGEVFAFRYGPVPPFVTYFRFDAAGNKGPDVPIFSVMQPSFLHDFAVTERYAIFPEIQIVMQPMGMVAGGAPVGSDSGKVPRIGVLPKYATDESEMRWFEVPGFNIMHTLNAWEEAGGDELVLVAPNVLSVEHALERMELVHGCVEKVRIDLRTGAVSRTPLSAGNLDFGVIHPGYLGRRNRYGYFGIGDPMPKISGVAKLDLERAGTGDCTVATRDFGPGCFAGEPFFVPDDVEGDGNEDDGYVVCYVHDERTGENRFVVMDARSPTLDIVAEVQLPARVPYGFHGLFVTQAELQAQQRWSEHTRSTEFQEKTHTN

SEQ ID NO: 81104 - protein, 79 aa, Setaria italica
  Transcript Sequence Number=SeqID_15130
  Subcellular localization annotation: CTP_CleavageSite=29; ConfidenceScore=5.31e-01
MKSQKRTNTLVGQTQFRCTRTFCTSLQPRDAGKQNRPAKKQATYISNVFMEEPPRQGSLRRAPKPPHMSTRGRPCSPPP

SEQ ID NO: 81105 - protein, 381 aa, Setaria italica
  Transcript Sequence Number=SeqID_15131
  Homolog annotation: Hit_ID=Q017C3; Match level="QueryCoverage=67%, HitCoverage=74%, E-value=3e-40, Identity=36%"; Hit description=[S] KOG2861 Uncharacterized conserved protein
  Pfam annotation: Domain name=DUF155; Domain location=160-333; Score =160.2; E_value=6.3e-45; Accession=PF02582.6; Description =Uncharacterised ACR, YagE family COG1723
  Subcellular localization annotation: CTP_CleavageSite=45; ConfidenceScore=5.41e-01
QTLALRPPPPPPRVPSSFLLLRPHRPTYPNPASAPSRLLLRPFASVAPVPGRDHLDSKDQGPPPAPLPPPPPEELASDDEAYYHEHLLEVAQENQTRVVPVKAFFLCTSIDLRSLQSQNSFNVIPPTSRATNYVVLRYYDVKGDPEGFKSGVIDESHCHYMVVFQYGSIVLFNVSDHEADGYLNIVEKHASGLLPEMRKDDYAVVEKPTLETWMQGGLDYIVLRDLSIDGIRTIGSVLGQSIALDYYIRQVDGMVAEFTDINRGMEKTGTFTMERKKLFQLVGKANSNLADVILKLGLFERSDIAWKNANYAQIWEYLRDEYELTQRFGNLDFKLKFVEHNIRFLQEILQNRKSDFLEWLIIILISVEILISVYNIVQEQM

SEQ ID NO: 81106 - protein, 98 aa, Setaria italica
  misc_feature (92)..(92): Xaa can be any naturally occurring amino acid
  Transcript Sequence Number=SeqID_15132
  Gene Ontology: Mol. function=hydrolase activity, hydrolyzing O -glycosyl compounds; Cellular component=anchored to membrane; Biological process=carbohydrate metabolic process
  Homolog annotation: Hit_ID=B6TJF7; Match level="QueryCoverage=93%, HitCoverage=21%, E-value=3e-39, Identity=90%"; Hit description =Glucan endo-1,3-beta-glucosidase 7
APVHPLEATSSALLGISYGRVGNNLPPATSVPHILASLGVGRVRLYDADPATTRAFANTGVELVVGVPDECLATVSTPAGAASWVRSNIAPXLPATKI

SEQ ID NO: 81107 - protein, 144 aa, Setaria italica
  misc_feature (7)..(7): Xaa can be any naturally occurring amino acid
  Transcript Sequence Number=SeqID_15133
NVLKKEXVDDHDSFLSCCEGYLSSHSNSQAMTPTYVSSYGLVEQISELQDELQYLQHEAEIVLPRERGRCTDELCRMIQTLEQTLGVPLSDGQPKLTPWPLAQSLEELEMVSQQVYSSVSEVTLARDEKVENLKQPSRNAQQER

SEQ ID NO: 81108 - protein, 212 aa, Setaria italica
  Transcript Sequence Number=SeqID_15134
WESNQPGGCCSGREPANELVALVNGRRAASKLPLLRNSAGLGCMALQYISECMAMAAAACSSDNTVACQPPEAHITEVYATNCGVELPTVDIISGRLVGCCNHREDVMVASAMANGNGSTQSQMMLGKEHSQVGAALDRHGRDGPFFWCLLFSSGSANSTFLLDAGGKGIHQTHGCFSAPDTTTCNAAAPVAGAGALLLLFLFHFLPILLLS

SEQ ID NO: 81109 - protein, 84 aa, Setaria italica
  Transcript Sequence Number=SeqID_15135
ACLSGWWLTDAGALPKPGPVGTDSSSAGEETFRAKQGLISAGVVDNWRHAVRCLKQPCLVVKLDSAPYLSRSPSRAVKLQRNGN

SEQ ID NO: 81110 - protein, 58 aa, Setaria italica
  Transcript Sequence Number=SeqID_15136
FFFFFGLTAGLLFHHTVGVTHMLRRLHVEGIDQHQQVQPTYVTYPCIRRDIQPAIWGE

SEQ ID NO: 81111 - protein, 71 aa, Setaria italica
  Transcript Sequence Number=SeqID_15137
DDEPWRRKIQRLLPPAGITVKHIRTGEDVALSRRIAASFLLMTMADFSDQLFDWQDRLFDNANGLLEFRGN

SEQ ID NO: 81112 - protein, 108 aa, Setaria italica
  Transcript Sequence Number=SeqID_15138
MPPMPRSLDEALAAARPFLRGEEAQVDPALPELAAVLRAAGAGECWHKHGTFLAHLLDVYRILRLWRAPDAVARCGLYHSAYSNSYVNLAIFQPNTGRAHVAAVVGAP

SEQ ID NO: 81113 - protein, 405 aa, Setaria italica
  Transcript Sequence Number=SeqID_15139
RKTRNELRTGRLRPTVLRAAGAGECWHKHGTFLAHLLDVYRILRLWRAPDAVARCGLYHSAYSNSYVNLAIFQPNTGRAHVAAVVGAPAERLVHLFCVVPRQQLIHDDLLFHYTDDDLVADLDRSEASLHDARRGVFHDDEPWRRKIQRLLPPAGITVKHIRTGEDVALSRRIAASFLLMTMADFSDQLFDWQDRLFDNANGLLEFRGNTWTSLWPGTGKPGLWVTSNSRMGALYTLILREEEIYIAHRAHAAAGQEDGGHGSNDRDEDIDLVVPPVFDGCTKVLRAEDQKVARDLYWEAVCSGDEASDDWRKVEQLLQQSIAKNPFVGEPHLVLAQVYLNMERYGDAQVQAEEGLRLLLEWGSSWDKRMTWEGWVSWGRAMLTKSREKDWPHTSFGIINLGLVK

SEQ ID NO: 81114 - protein, 83 aa, Setaria italica
  Transcript Sequence Number=SeqID_15140
  Gene Ontology: Mol. function=protein serine/threonine kinase activity; Cellular component=integral to membrane; Biological process=protein amino acid phosphorylation
  Homolog annotation: Hit_ID=Q65X93; Match level="QueryCoverage=100%, HitCoverage=8%, E-value=6e-31, Identity=74%"; Hit description =Putative receptor like protein kinase
  Pfam annotation: Domain name=LRR_1; Domain location=37-59; Score=1.7; E_value=1.4e+02; Accession=PF00560.25; Description=Leucine Rich Repeat
  Pfam annotation: Domain name=LRR_1; Domain location=61-83; Score =18.5; E_value=0.027; Accession=PF00560.25; Description=Leucine Rich Repeat
  Pfam module annotation: Pfam domain module=LRR_1::LRR_1; Domain location=37-59::61-83
IKAKYRVKKNWAGDPCGPKTFAWDGLTCSYGISSHSRITGVNISFSGLDGDISSSFANLKAVQYLDLSHNNLTGSIPDALSQL

SEQ ID NO: 81115 - protein, 133 aa, Setaria italica
  misc_feature (62)..(62): Xaa can be any naturally occurring amino acid
  Transcript Sequence Number=SeqID_15141
  Homolog annotation: Hit_ID=B6TGW0; Match level="QueryCoverage=87%, HitCoverage=53%, E-value=9e-15, Identity=44%"; Hit description =Chloroplast channel forming outer membrane protein
METSLRLRGGGGLRIHAKEEKLALGHNSLLQADPLHPIIFHLPPIPSDTSDSLFIHATSGSXEIDAGAAAPSYLALFVRQFYPQIAANIGVGVQFHKGQRLTYNLRAKKALPFTSDGLLGLNLKRPLLTDTEF

SEQ ID NO: 81116 - protein, 166 aa, Setaria italica
  Transcript Sequence Number=SeqID_15142
  Homolog annotation: Hit_ID=B6TGW0; Match level="QueryCoverage=100%, HitCoverage=100%, E-value=1e-52, Identity=61%"; Hit description =Chloroplast channel forming outer membrane protein
METSLRLRGGGGLRIHAKEKLALGHNSLLQAHGEIDAGAAAPSYLALFVRQFYPQIAANIGVGVQFHKGQRLTYNLRAKKALPFTSDGLLGLNLKARLLTDTEFNPRKRTGAVELAWTILDFRKGQDVRLKLGYELYGKVPYLQLRENNWTLNAYMDGKWDVRFDM

SEQ ID NO: 81117 - protein, 443 aa, Setaria italica
  misc_feature (243)..(243): Xaa can be any naturally occurring amino acid
  Transcript Sequence Number=SeqID_15143
  Homolog annotation: Hit_ID=B8Q889; Match level="QueryCoverage=59%, HitCoverage=100%, E-value=5e-93, Identity=69%"; Hit description=SKIP interacting protein 3 (Fragment)
  Pfam annotation: Domain name=DUF827; Domain location=5-312; Score= -96.2; E_value=0.0032; Accession=PF05701.3; Description=Plant protein of unknown function (DUF827)
MSFVFVDGIRSSSYRNNVPNSGFLDESDMQEQLNRLREELRKEKEEKARALDEIEELRKTNTNRNKKLKSNGAEGQLDLTDRLQQLEGELEAAKDSEKKMLLSLEVQTKQLEQTKVSLEEAKLEIASLRDSSKNLEAFNTGRQPVKNLRRRGVMSFSFADPGEVETWSLQRELKLAVESEEKCKKAMDDLAIALKEQTTEAREAKGKLLLAQAELNNARTEVENLKASLENAEDKLQLALGKXSGRLKVESDELAAASKEKERGLVDCIKMFEGELSNGKEENEKLIESQRVVRDENSRLREMLKHAVGEANVARESLEIARVENSRLNEKIFEKESALQSIKQEYESLKISEAAAQSSIKELKDMVDAMFSSESTKTSAEASPRDAKGGEMKESSVAADDVYSHVERSTRLEDIKNPGKQKKKTILRKFSEVMKKRNSQNAI

SEQ ID NO: 81118 - protein, 79 aa, Setaria italica
  Transcript Sequence Number=SeqID_15144
  Gene Ontology: Mol. function=ATPase activity, coupled to transmembrane movement of substances; Cellular component=integral to membrane; Biological process=transport
  Homolog annotation: Hit_ID=Q5SMN1; Match level="QueryCoverage=100%, HitCoverage=5%, E-value=1e-27, Identity=72%"; Hit description =Putative multidrug resistance-associated protein 7
KLLAHIRTVKMYSWEKLFTERLVERRESEVKHLATRKYLDAWCVYFWATTPTLFSLFTFSIFAIMGHTLDAATVFTCVA

SEQ ID NO: 81119 - protein, 238 aa, Setaria italica
  misc_feature (223)..(223): Xaa can be any naturally occurring amino acid
  Transcript Sequence Number=SeqID_15145
  Gene Ontology: Mol. function=phosphoglucan, water dikinase activity; Cellular component=chloroplast; Biological process=carbohydrate metabolic process
  Homolog annotation: Hit_ID=Q2QTC2; Match level="QueryCoverage=100%, HitCoverage=20%, E-value=2e-95, Identity=70%"; Hit description =Phosphoglucan, water dikinase, chloroplastic
LGTPEVKLSGEADEEIGEGATVSGNIAVEEAVAGDGYLTLELESSKLGGLWQGSDAVFMRSNEHGNKDSERKWDTTGLGAVPLQLVEGDKVSRNWWRKLELIRGLLSKSVDDQSRLEALTYSAIYLKWIYTGQIPCFEDGGHHRPNKHAEISREIFREIERIYYGKNTSAQDLLVIRKIHPCLPSFKSEFTASVPLTRIRDIAHRNDIPHDLKQEIKHTIQNXLHRNAGPEDLIATEA

SEQ ID NO: 81120 - protein, 116 aa, Setaria italica
  misc_feature (108)..(108): Xaa can be any naturally occurring amino acid
  Transcript Sequence Number=SeqID_15146
  Gene Ontology: Mol. function=electron carrier activity; Cellular component=integral to membrane; Biological process=oxidation reduction
  Homolog annotation: Hit_ID=B6SYR0; Match level="QueryCoverage=100%, HitCoverage=23%, E-value=3e-52, Identity=81%"; Hit description =Taxane 13-alpha-hydroxylase
EIAESKGDGEALAWEDLAKMKFTWRVALEILRMVPPIFGNFRRATQDIEYDGYVIPKGWQVFWTASVTHMDAAIFHEPAKFDPSRFKDGSPATAPPCSFVAFGGGPRXICPGMEFA

SEQ ID NO: 81121 - protein, 121 aa, Setaria italica
  Transcript Sequence Number=SeqID_15147
  Gene Ontology: Mol. function=transferase activity, transferring phosphorus-containing groups; Cellular component=membrane; Biological process=two-component signal transduction system (phosphorelay)
  Homolog annotation: Hit_ID=Q2ACC1; Match level="QueryCoverage=100%, HitCoverage=12%, E-value=4e-61, Identity=93%"; Hit description =Histidine kinase
  Pfam annotation: Domain name=CHASE; Domain location=1-118; Score =28.0; E_value=3.8e-06; Accession=PF03924.5; Description=CHASE domain
RTTGKAVLTNPFLLGSNHLGVVLTFAVYRPDLPGDASVEQRVEATIGYLGGAFDVESLVENLLSKLAGNQDIVVNVYDVTNASEAMVLYGPPSLDDQVPLLHVSMLDFGDPFRKHEMRCRY

SEQ ID NO: 81122 - protein, 111 aa, Setaria italica
  Transcript Sequence Number=SeqID_15148
SRRHHRGRRGEEEDANLIYLMGAGGPPRSVCCCSSRSLSCCSRSISMMSGTTSTRKVVPAIQAALPVLRSSFFAMVAASRPCAANCDRERAARMPSPPSRLPRAEGDGMEI

SEQ ID NO: 81123 - protein, 120 aa, Setaria italica
  misc_feature (91)..(91): Xaa can be any naturally occurring amino acid
  Transcript Sequence Number=SeqID_15149
  Gene Ontology: Mol. function=ligase activity; Biological process =response to auxin stimulus
  Homolog annotation: Hit_ID=Q0D4Z6; Match level="QueryCoverage=99%, HitCoverage=19%, E-value=2e-37, Identity=68%"; Hit description =Probable indole-3-acetic acid-amido synthetase GH3.8
YVSSEASVGINLSPMCDPSEVSYTIMPTMAYFEFLPVDAAAGDAPAASHLLVELAGVEAGREYELVVTTYAGLYRYRVGDVLRVTGFHNAXPRVRFVRRRNVVLSIESDKTDEAELQRAG

SEQ ID NO: 81124 - protein, 65 aa, Setaria italica
  Transcript Sequence Number=SeqID_15150
KIGPHSGPLSKLFQCNLWCITAAHRNEHLMGLLRTFAQELKGKEPASSERKRKKSSKKDERVIDV

SEQ ID NO: 81125 - protein, 536 aa, Setaria italica
  Transcript Sequence Number=SeqID_15151
  Gene Ontology: Mol. function=transferase activity, transferring glycosyl groups
  Homolog annotation: Hit_ID=B6T8T9; Match level="QueryCoverage=100%, HitCoverage=83%, E-value=0.0, Identity=85%"; Hit description =Transferase, transferring glycosyl groups
  Pfam annotation: Domain name=Glyco_transf_8; Domain location=198-510; Score=358.4; E_value=1.3e-104; Accession=PF01501.12; Description =Glycosyl transferase family 8
VAADGTEVIEQVTRREAQDGGSASAISDEQEKTTGSQQQSSSKESLRETMPKQTSAKVLVENSQAAITDGKTKNTVLPDTWIRNIKDQLIKAKVYLGLGSIRANSQYLKDLRQRIREVQKVLGDASKDTDLPKNANEKVKALEQLLIKGKQMQDDCSIVVKKLRAMLHSAEEQLHAHKKQTVFLTQLAAKTLPKGLHCLPLRLANEYFSLDPGQQQFPNQHKLSNPKLYHYALFSDSILATAVVVNSTVLNAKHPSDHVFHIVTDRLNYAPMRMWFLTNPPGKATIEVQHIGEFTWLNDSYSPVLQQLGSQSMIDYYFGTNRANPDSNLKYRNPKYLSILNHLRFYLPEIYPKLDKMVFLDDDIVVKKDLTGLWSINMKGKVNGAVETCGESFHRFDHYLNFSNPVIAKNFDPHACGWAFGMNVFDLAEWKRQNITQIYHSWQKLNQDRSLWKLGTLPPGLITFWNKTFPLSRSWHVLGLGYNPHVNSRDIERAAVIHYNGNMKPWLEIGLPKFRSYWSRYLDYDQHFLRECNINP

SEQ ID NO: 81126 - protein, 95 aa, Setaria italica
  Transcript Sequence Number=SeqID_15152
  Gene Ontology: Mol. function=alpha,alpha-trehalose-phosphate synthase (UDP-forming) activity; Cellular component=alpha,alpha-trehalose -phosphate synthase complex (UDP-forming); Biological process =trehalose biosynthetic process
  Homolog annotation: Hit_ID=B2ZG28; Match level="QueryCoverage=100%, HitCoverage=10%, E-value=4e-50, Identity=100%"; Hit description =Trehalose-6-phosphate synthase
KVGWFLHTPFPSSEIYRTLPSRLELLRSVLCADLVGFHTYDYARHFVSACTRILGLEGTPEGVEDQGRLTRVAAFPIGIDSDRFKRALELPAVKR

SEQ ID NO: 81127 - protein, 50 aa, Setaria italica
  Transcript Sequence Number=SeqID_15153
  Gene Ontology: Mol. function=catalytic activity; Biological process =trehalose biosynthetic process
  Homolog annotation: Hit_ID=A6MIZ0; Match level="QueryCoverage=74%, HitCoverage=3%, E-value=2e-13, Identity=94%"; Hit description =Trehalose-phosphate synthase 1
GLFLSKKPGGCLAPADQKLTSQVHEIVGRINGRFGTLTAVPIHHLDRSLD

SEQ ID NO: 81128 - protein, 92 aa, Setaria italica
  Transcript Sequence Number=SeqID_15154
  Gene Ontology: Mol. function=catalytic activity; Biological process =trehalose biosynthetic process
  Homolog annotation: Hit_ID=B3VL84; Match level="QueryCoverage=92%, HitCoverage=15%, E-value=2e-42, Identity=97%"; Hit description =Trehalose-6-phosphate synthase 1 (Fragment)
EQVPPGLPSQTAIQQYLRSKNRLLILGFNSTLTEPVESSGRRGGDQIKEMELKLHPDLKGPLKALCEDEHTTVIVLSGSDRSVLDEIWRIKC

SEQ ID NO: 81129 - protein, 724 aa, Setaria italica
  misc_feature (104)..(104): Xaa can be any naturally occurring amino acid
  misc_feature (114)..(114): Xaa can be any naturally occurring amino acid
  Transcript Sequence Number=SeqID_15155
  Gene Ontology: Mol. function=alpha,alpha-trehalose-phosphate synthase (UDP-forming) activity; Cellular component=cytosol; Biological process=trehalose biosynthetic process
  Homolog annotation: Hit_ID=B2ZG28; Match level="QueryCoverage=97%, HitCoverage=78%, E-value=0.0, Identity=87%"; Hit description =Trehalose-6-phosphate synthase
  Pfam annotation: Domain name=DUF1117; Domain location=549-667; Score=- 44.9; E_value=0.1; Accession=PF06547.4; Description=Protein of unknown function (DUF1117)
  Pfam annotation: Domain name=Glyco_transf_20; Domain location=1-345; Score=521.8; E_value=8.5e-154; Accession=PF00982.13; Description =Glycosyltransferase family 20
  Pfam annotation: Domain name=Trehalose_PPase; Domain location=379 -629; Score=262.6; E_value=9.3e-76; Accession=PF02358.8; Description =Trehalose-phosphatase
  Pfam module annotation: Pfam domain module=DUF1117::Glyco_transf _20::Trehalose_PPase; Domain location=549-667::1-345::379-629
MFADVVYQHYQEGDVIWCHDYHLMFLPKCLKDHDNNMKVGWFLHTPFPSSEIYRTLPSRLELLRSVLCADLVGFHTYDYARHFVSACTRILGLEGTPEGVEDEXSFHSLGLKSXFPIGIDSDRFKRALELPAVKRHISELTQRFAGRKVMLGVDRLDMIKGIPQKILAFEKFLEENPAWNDKVVLLQIAVPTRTDVPEYQKLTSQVHEIVGRINGRFGTLTAVPIHHLDRSLDFHALCALYAVTDVALVTSLRDGMNLVSYEYVACQGSKKGVLILSEFAGAAQSLGAGAILVNPWNITEVADSIRHALTMSSDEREKRHRHNYAHVTTHTAQDWAETFVCELNDTVAEAQLRTRQVPPGLPSQTAIQQYLRSKNRLLILGFNSTLTEPVESSGRRGGDQIKEMELKLHPDLKGPLKALCEDEHTTVIVLSGSDRSVLDENFGEFKMWLAAEHGMFLRPTYGEWMTTMPEHLNMDWVDSVKHVFEYFTERTPRSHFEHRETSFVWNYKYADVEFGRLQARDMLQHLWTGPISNAAVDVVQGSRSVEVRSVGVTKGAAIDRILGEIVHSENMVTPIDYVLCIGHFLGKDEDIYVFFDPEYPSESKVKPEGSSTALDRRPNGRSSNGRSNSRNSQSRTQKVQQAVSERSSSSSHSSTSSDHSWREGSSVLDLKGENYFSCAVGRKRSNARFLLSSSEDVVSFLKELATATAGFQSSNADYMFLDRQ

SEQ ID NO: 81130 - protein, 326 aa, Setaria italica
  Transcript Sequence Number=SeqID_15156
  Gene Ontology: Mol. function=microtubule motor activity; Cellular component=microtubule associated complex; Biological process =microtubule-based movement
  Homolog annotation: Hit_ID=Q0WPV9; Match level="QueryCoverage=96%, HitCoverage=37%, E-value=2e-73, Identity=50%"; Hit description =Kinesin like protein
RQYKLKLLNPTEKTADSELSWLNVLSQETGENVQERINLQKALFELEETNKRNRMELQHLDDAIARHQVKEMDSTVLQALTSRRQVILDNIRDNDEAGSGYRKDIEMNESRRRQLQDMIEEAVSNNGNRTYLHILSQYRLLGMTNAELQIEMAMRDQVIHNQRESLRSLWNILYGTGLNQKQILKLAAKQGLTVEGCPLPSSSPDVTTPPSFPPHGRLPQFMSFSSPQSEPYSPSACFFQHGFSTMSLLKNQHETPTICRQEHLSSYYMTSGCSPYSGDGKQWSSGRSMPFFSTPEKLREMSGFYPGTENAQSQRRKEDPWSMERK

SEQ ID NO: 81131 - protein, 74 aa, Setaria italica
  Transcript Sequence Number=SeqID_15157
  Gene Ontology: Mol. function=protein serine/threonine kinase activity; Cellular component=nucleoplasm; Biological process=protein amino acid phosphorylation
  Homolog annotation: Hit_ID=A5HNE9; Match level="QueryCoverage=100%, HitCoverage=14%, E-value=2e-36, Identity=97%"; Hit description =Sucrose non-fermenting related protein kinase 1b
MDGSARGGGHSDALRNYNLGRTLGIGTFGKVKIAEHKLTGHRVAIKIINCRQMKNMEMEEKAKREIKILKLFIH

SEQ ID NO: 81132 - protein, 75 aa, Setaria italica
  Transcript Sequence Number=SeqID_15158
  Gene Ontology: Mol. function=protein serine/threonine kinase activity; Cellular component=nucleoplasm; Biological process=protein amino acid phosphorylation
  Homolog annotation: Hit_ID=A5HNE9; Match level="QueryCoverage=100%, HitCoverage=14%, E-value=5e-36, Identity=96%"; Hit description =Sucrose non-fermenting related protein kinase 1b
MDGSARGGGHSDALRNYNLGRTLGIGTFGKVKIAEHKLTGHRVAIKIINCRQMKNMEMEEKAKREIKILKLFIPP

SEQ ID NO: 81133 - protein, 74 aa, Setaria italica
  Transcript Sequence Number=SeqID_15159
TRSSGGGGVGFLSGGRSTPAYIALLQRSDSTVKRPDPLVGDEGWRSITLASCRPKNRAVPEMIQCAEGCGPSTA

SEQ ID NO: 81134 - protein, 94 aa, Setaria italica
  Transcript Sequence Number=SeqID_15160
MENRKEEQQGAAVGWMTVPAFGEWDVKNGAVPDYSMDFSKIREMRKQNKRELSRASLGGDEDLLQAQQGKPQAAAQPDKSSAAVAADDHHRRPL

SEQ ID NO: 81135 - protein, 217 aa, Setaria italica
  Transcript Sequence Number=SeqID_15161
  Gene Ontology: Mol. function=nucleotide binding; Cellular component =plasma membrane; Biological process=small GTPase mediated signal transduction
  Homolog annotation: Hit_ID=Q40524; Match level="QueryCoverage=95%, HitCoverage=99%, E-value=1e-94, Identity=79%"; Hit description=Nt -Rab11e protein (Fragment)
  Pfam annotation: Domain name=Arf; Domain location=1-174; Score=-52.3; E_value=1.7e-05; Accession=PF00025.13; Description=ADP-ribosylation factor family
  Pfam annotation: Domain name=GTP_EFTU; Domain location=11-176; Score=- 84.6; E_value=0.01; Accession=PF00009.19; Description=Elongation factor Tu GTP binding domain
  Pfam annotation: Domain name=MMR_HSR1; Domain location=14-129; Score=- 9.1; E_value=0.0069; Accession=PF01926.15; Description=GTPase of unknown function
  Pfam annotation: Domain name=Miro; Domain location=15-129; Score =70.3; E_value=7.2e-18; Accession=PF08477.5; Description=Miro-like protein
  Pfam annotation: Domain name=Ras; Domain location=15-176; Score =321.9; E_value=1.3e-93; Accession=PF00071.14; Description=Ras family
  Pfam module annotation: Pfam domain module=Arf::GTP_EFTU::MMR _HSR1::Miro::Ras; Domain location=1-174::11-176::14-129::15-129::15 -176
MGDDSEGEAEEYLFKVVIIGDSAVGKSNLLSRYARNEFNLHSKATIGVEFQTQSMDIDGKEVKAQIWDTAGQERFRAVTSAYYRGAFGALLVYDISRRSTFENVGRWLQELNTHSDTTVAKMLVGNKCDLDNIREVPVEEGKALAEAESMFFMETSALDATNVETAFEIVIKEIYSNVSRKILNSDSYKAELSLNRVSIDGDSKDDQKQQASRFGCC

SEQ ID NO: 81136 - protein, 80 aa, Setaria italica
  Transcript Sequence Number=SeqID_15162
  Subcellular localization annotation: CTP_CleavageSite=64; ConfidenceScore=5.69e-01
AFPCRPTPSPSHPTPPCRRPTPPRCGAPPRRHPAPPRRAVPPHLHRGAPPPPAPAPRSSPPLSRSAAAFCSAPRPLLPAS

SEQ ID NO: 81137 - protein, 394 aa, Setaria italica
  Transcript Sequence Number=SeqID_15163
  Gene Ontology: Mol. function=sequence-specific DNA binding; Cellular component=nucleus; Biological process=regulation of transcription, DNA-dependent
  Homolog annotation: Hit_ID=Q32SG4; Match level="QueryCoverage=100%, HitCoverage=100%, E-value=1e-137, Identity=65%"; Hit description =Protein WRKY1
  Pfam annotation: Domain name=Plant_zn_clust; Domain location=282-326; Score=77.6; E_value=4.4e-20; Accession=PF10533.1; Description=Plant zinc cluster domain
  Pfam annotation: Domain name=WRKY; Domain location=328-388; Score =142.3; E_value=1.5e-39; Accession=PF03106.7; Description=WRKY DNA -binding domain
  Pfam module annotation: Pfam domain module=Plant_zn_clust::WRKY; Domain location=282-326::328-388
MEGMEEANRAAVESCHRVQCDLSNPRGQLVPNKDLVAATGEAVGKFGSLTAKLSNSNGNGLQGHARVRKIKKPLPIFDSNLFLESSAVAVAAATPAKAPSASPITGLQLFPRYQMEGSSSKDPIRIHTQFPKRLMLENPAAALEGPSSQAPPVHMVQPVSVAPPAGTPTPALPAAHLHFIQQQQSYQRFQLMQQMKIQNEMMKRSIGDQGGSLSGGGGGGAKGVNLKFDTSNCTASSSRSFLSSLSMEGSLASFDGSRASRPFQLVSGSQASSTPELGLVQRKRCTGREDGSGRCATGSRCHCSKKRKLRIRRSIKVPAISNKVADIPADEFSWRKYGQKPIKGSPHPRGYYKCSSVRGCPARKHVERCVDDPSMLIVTYEGDHNHNRVVAQPA

SEQ ID NO: 81138 - protein, 201 aa, Setaria italica
  misc_feature (72)..(72): Xaa can be any naturally occurring amino acid
  misc_feature (150)..(150): Xaa can be any naturally occurring amino acid
  Transcript Sequence Number=SeqID_15164
  Homolog annotation: Hit_ID=Q7XR53; Match level="QueryCoverage=72%, HitCoverage=38%, E-value=1e-32, Identity=57%"; Hit description =OSJNBa0043A12.32 protein
  Pfam annotation: Domain name=UBA; Domain location=18-56; Score=18.3; E_value=0.033; Accession=PF00627.23; Description=UBATS-N domain
DPKQKAKDPKKSSHRSTYDQESVKLVMAGTGCSDAAIAEHVLGEMDGDVDAAIEYMIAEQFAMGANDAEGDXPYTDYALDEFSKWHDENQAIDHKDEASCSSKDETVQKPKDSHSKEKSKTKDCSCGSTKNHKVSCSLATATPPGEPSRXKGVQGKGQKGKKQKKKEQKQAQAAQVRKKEQAQAAQVKEPRVASDLGALCI

SEQ ID NO: 81139 - protein, 104 aa, Setaria italica
  Transcript Sequence Number=SeqID_15165
  Gene Ontology: Mol. function=G-protein coupled photoreceptor activity; Cellular component=membrane; Biological process=regulation of transcription, DNA-dependent
  Homolog annotation: Hit_ID=A0SE16; Match level="QueryCoverage=81%, HitCoverage=52%, E-value=8e-42, Identity=98%"; Hit description =Phytochrome B2 (Fragment)
AGGGGGGGGGGGGAATAATESVSKAVAQYNLDARLHAVFEQSGASGRSFDYSQSLRAPPTPSSEQQIAAYLSRIQRGGHIQPFGCTLAVADDSSFRLLAFSENA

SEQ ID NO: 81140 - protein, 107 aa, Setaria italica
  Transcript Sequence Number=SeqID_15166
LHTKVTVRSISHSPQARTSLIFVTALQMQGHIAKFVLEHLCYTHTNGCSLLKEEKRPIILEIWMGGQLLQKLEHREEIGCDPTVSSLFRLPITSPVRRYVQWTEHNL

SEQ ID NO: 81141 - protein, 287 aa, Setaria italica
  misc_feature (69)..(69): Xaa can be any naturally occurring amino acid
  Transcript Sequence Number=SeqID_15167
  Gene Ontology: Mol. function=metal ion binding
  Homolog annotation: Hit_ID=Q9AS72; Match level="QueryCoverage=95%, HitCoverage=48%, E-value=1e-142, Identity=79%"; Hit description =P0028E10.20 protein
  Pfam annotation: Domain name=WD40; Domain location=121-159; Score =14.8; E_value=0.37; Accession=PF00400.24; Description=WD domain, G -beta repeat
  Pfam annotation: Domain name=WD40; Domain location=76-115; Score =11.3; E_value=1.8; Accession=PF00400.24; Description=WD domain, G -beta repeat
  Pfam module annotation: Pfam domain module=WD40::WD40; Domain location=121-159::76-115
RTNLTGTKKRNRKGLIVIVLERKIYVYNFTDLKLLYQIDTLSNPKGLCCLSHHSNTSVLACPGVHQGHXRVEHFGLKMTKTIPAHDSNISCMALTMDGLLLATASTKGTLIRIFNTMDGTRLQEVRRGLDKAEIYSIALSPNVQWLAVSSDKGTVHIFSLRVRVAGEDSSNEQHTLEGPRMDHQNSSSSIDPLIQTNTGSNASSSLSFMRGILPKYFSSEWSFAQFHLPEVTRYIVAFGAQNTVMMVGLDGSFYRCSFDQVNGGQMLQKEYFRFLKSDSPPFRTSAS

SEQ ID NO: 81142 - protein, 263 aa, Setaria italica
  Transcript Sequence Number=SeqID_15168
  Gene Ontology: Mol. function=metal ion binding
  Homolog annotation: Hit_ID=Q9AS72; Match level="QueryCoverage=87%, HitCoverage=34%, E-value=1e-117, Identity=86%"; Hit description =P0028E10.20 protein
MSSQVSTSRGLHPPGKLGAFESSHVWPLSAPTSQPGAGLGDDQDVRLLSVAWNQDCGCFAAGTSNGFRIFNCEPFKETFRRDLKSGGFGIVEMLFRCNILALVGGGSNVQYPPNKVMIWDDHQSRCIGEFAFRSDVRAVKLAKDYIVIVLERKIYVYNFTDLKLLYQIDTLSNPKGLCCLSHHSNTSVLACPGVHQGHVRVEHFGLKMTKTIPAHDSNISCMALTMDGLLLATASTKGTLIRMQCYIFQLCQVLCVPLVGECH

SEQ ID NO: 81143 - protein, 95 aa, Setaria italica
  Transcript Sequence Number=SeqID_15169
  Gene Ontology: Mol. function=signal transducer activity; Biological process=regulation of transcription, DNA-dependent
  Homolog annotation: Hit_ID=O64511-3; Match level="QueryCoverage=72%, HitCoverage=19%, E-value=2e-17, Identity=53%"; Hit description =Isoform 3 of Protein TWIN LOV 1
MATSGAAEVDPGDRERQQHDRRRLASSLTARYSDWVLEALDELPGSFLLTDPSLAGHPIVYASRGLAALTGYPRREVLGRNARVFQGTATDRAAV

SEQ ID NO: 81144 - protein, 97 aa, Setaria italica
  Transcript Sequence Number=SeqID_15170
DYTLYGECIMVVYQRVPCQTLGKKFMCRYYYLYRIIKKKIKVQSYQLSNRIACCSFDGFSSKQRQSPTGTVKILVIDQVICKKIHKPNLSTLEKTNR

SEQ ID NO: 81145 - protein, 224 aa, Setaria italica
  misc_feature (38)..(38): Xaa can be any naturally occurring amino acid
  misc_feature (48)..(48): Xaa can be any naturally occurring amino acid
  Transcript Sequence Number=SeqID_15171
  Gene Ontology: Mol. function=oxidoreductase activity, acting on paired donors, with incorporation or reduction of molecular oxygen, 2-oxoglutarate as one donor, and incorporation of one atom each of oxygen into both ...
  Gene Ontology: Mol. function=donors; Cellular component=plasma membrane; Biological process=protein metabolic process
  Homolog annotation: Hit_ID=B4FLB6; Match level="QueryCoverage=99%, HitCoverage=71%, E-value=1e-116, Identity=91%"; Hit description =Oxidoreductase
  Pfam annotation: Domain name=2OG-FeII_Oxy; Domain location=50-171; Score=59.2; E_value=1.6e-14; Accession=PF03171.12; Description=2OG -Fe(II) oxygenase superfamily
  Pfam annotation: Domain name=ShK; Domain location=184-224; Score =29.0; E_value=1.9e-05; Accession=PF01549.16; Description=ShK domain -like
  Pfam module annotation: Pfam domain module=2OG-FeII_Oxy::ShK; Domain location=50-171::184-224
VVADNLSGKSTLSEVRTSSGTFLRKGQDPIVAGIEDKXIAAWTFLPKXENGEDIQVLRYKRGEKYEPHYDYFSDNVHTVRGGHRYATVLLYLTDVAAGGETVFPLAEEFDNGKDATLSECAQKGIAVKPRKGDALLFFNLKPDGTTDTVSGHGGCPVIKGEKWSATKWIRVASFDKVHHRQGNCTDENESCEKWAALGECIKNPEYMVGTAVLPGYCRRSCNVC

SEQ ID NO: 81146 - protein, 38 aa, Setaria italica
  Transcript Sequence Number=SeqID_15172
  Gene Ontology: Mol. function=metal ion binding; Cellular component =mitochondrial intermembrane space protein transporter complex; Biological process=protein import into mitochondrial inner membrane
  Homolog annotation: Hit_ID=B6T665; Match level="QueryCoverage=100%, HitCoverage=45%, E-value=7e-14, Identity=92%"; Hit description =Mitochondrial import inner membrane translocase subunit Tim10
HKEAELNMGENSCIDRCVSKYWQVTNLVGQLLGNQPKM

SEQ ID NO: 81147 - protein, 178 aa, Setaria italica
  Transcript Sequence Number=SeqID_15173
  Gene Ontology: Mol. function=binding
  Pfam annotation: Domain name=DUF1068; Domain location=10-178; Score =404.9; E_value=1.3e-118; Accession=PF06364.4; Description=Protein of unknown function (DUF1068)
MAGAGASSAWGPSPALVTALVALLGLGLAAYIVGPQLYWHAAEALTAAGACPACDCNCDARPLLDLPEDCAKQFKGVKSRATGEETEKSFTELLIEELRQREEEATQAQQEADVKLLEAKKLASQYQKEADKCSSGMDTCEEAREKSAEALVEQKKLTSLWEQRARELGWKPENTRHT

SEQ ID NO: 81148 - protein, 155 aa, Setaria italica
  Transcript Sequence Number=SeqID_15174
  Gene Ontology: Cellular component=extracellular region; Biological process=sexual reproduction
  Homolog annotation: Hit_ID=Q8H274; Match level="QueryCoverage=97%, HitCoverage=54%, E-value=7e-74, Identity=86%"; Hit description =Expansin-like A3
  Pfam annotation: Domain name=DPBB_1; Domain location=1-78; Score =58.2; E_value=3.2e-14; Accession=PF03330.10; Description=Rare lipoprotein A (RlpA)-like double
  Pfam annotation: Domain name=Pollen_allerg_1; Domain location=90-155; Score=2.7; E_value=0.0017; Accession=PF01357.13; Description=Pollen allergen
  Pfam module annotation: Pfam domain module=DPBB_1::Pollen_allerg_1; Domain location=1-78::90-155
VPRRGPRQHRGGLGCGRCFQMRCRDARLCSSRGVRVVLTDFHRSNRTDFLLGGPAFAGLAKPGVAHELKRLDALSVEYKRIPCDYKDKNLSVLVEEGSKSPSNLVVKFLYQGGQTDILAVDVAPVGSSEWRFMTRVHGPVWRTDRAPAGPLQFRA

SEQ ID NO: 81149 - protein, 516 aa, Setaria italica
  Transcript Sequence Number=SeqID_15175
  Gene Ontology: Cellular component=plasma membrane
  Homolog annotation: Hit_ID=Q25A82; Match level="QueryCoverage=99%, HitCoverage=88%, E-value=0.0, Identity=87%"; Hit description =H0413E07.12 protein
  Pfam annotation: Domain name=C2; Domain location=204-288; Score =110.8; E_value=4.7e-30; Accession=PF00168.22; Description=C2 domain
  Pfam annotation: Domain name=C2; Domain location=384-466; Score =122.3; E_value=1.6e-33; Accession=PF00168.22; Description=C2 domain
  Pfam module annotation: Pfam domain module=C2::C2; Domain location =204-288::384-466
FSSVSHRSKVKWLNQELTKIWPFVNQAASELIKTSVEPTLEQYRPIILASLKFSKLTLGTVAPQFTGISIIENNKESGIVMELEMNWDANPNIILDVKTRLGVALPIQVKDIGFTGIFRLIFKPLVEELPCFGAVCFSLRKKKKLDFRLKVIGGEISAIPGISDALEETIKNAIEDSITWPVRKVIPIIPGDYSDLELKPVGTLEVKLVQARDLTNKDLIGKSDPFAIVYVRPLPDKMKRSKTINNDLNPIWNEHFEFIVEDADTQTVTVKIYDDDGIQESELIGCAQVRLKDLQPGKVKDIWLKLVKDLEIQRDRKDRGQVHLELLYCPFDMKDDAPNPFRQQFSMTSLERTMTSMENGSGGSSFDMMSSSRKRKEIIVRGVLSVTVISGEDLPAMDMNGKSDPYVVLSLKKTKTKYKTRVVNESLNPVWNQTFDFVVEDGLHDMLILEVYDHDTFRRDYMGRCILTLTKVLLEEDYEESFNLEGAKSGKLNLRLKWSPQPIMRDSREEDSLRFR

SEQ ID NO: 81150 - protein, 162 aa, Setaria italica
  Transcript Sequence Number=SeqID_15176
  Gene Ontology: Cellular component=intracellular
  Pfam annotation: Domain name=DMA; Domain location=83-121; Score=5.7; E_value=0.083; Accession=PF03474.6; Description=DMRTA motif
RDDSEDQIREQQVPWEVCRSSVNLNNGKQCLKRKRVQFSEAKPSSIRTKSNRRMLPKSRFSRSDSRIEEKVKTREYIDNNEATFQGVEFILTGFPNQKEKEIESLIRKCGGYVLSKVPPFPLDKRKNMAEVPSWKPPIVLSPKKVSTAKFLYGCAIDAWMLN

SEQ ID NO: 81151 - protein, 89 aa, Setaria italica
  Transcript Sequence Number=SeqID_15177
GLPLAGRSAGSASPLQICSYESFETRKKLHKNRQGKKQIDVCGLSERCLGSCPNSSPLPTRFGMSGEDSQGALLRSRGVRATPRQWRPR

SEQ ID NO: 81152 - protein, 97 aa, Setaria italica
  Transcript Sequence Number=SeqID_15178
MSWFEIPEPIVKLELGGVNYGLWALVTRITLQARGLWGHITGESACPPAPVPPPQPQANAAKEVVDAANKAFKDYQSALDAYKQWDVDDARAMLILL

SEQ ID NO: 81153 - protein, 76 aa, Setaria italica
  Transcript Sequence Number=SeqID_15179
ATTNDNNHTYKLFFYIFLKEARTVLYQETIKSTMSRTRKKMNEPTTKLHKTCNFPHYLTQMKRETKTTRVSVYLPY

SEQ ID NO: 81154 - protein, 88 aa, Setaria italica
  Transcript Sequence Number=SeqID_15180
SASCAVGGAECDYRYLYGLAADSHHYTQGYLGSEIFTLGGDAAPGIGFGCTNMSEGGYGTGSGLVGLGRGPLSLVSQLNAGAFSYCLA

SEQ ID NO: 81155 - protein, 507 aa, Setaria italica
  Transcript Sequence Number=SeqID_15181
  Gene Ontology: Mol. function=transporter activity; Cellular component= integral to membrane; Biological process=RNA-dependent DNA replication
  Homolog annotation: Hit_ID=B6ST65; Match level="QueryCoverage=99%, HitCoverage=97%, E-value=0.0, Identity=82%"; Hit description =Glycerol 3-phosphate permease
  Pfam annotation: Domain name=MFS_1; Domain location=28-445; Score =134.9; E_value=2.5e-37; Accession=PF07690.8; Description=Major Facilitator Superfamily
  Pfam annotation: Domain name=Sugar_tr; Domain location=27-487; Score=- 144.7; E_value=0.0027; Accession=PF00083.16; Description=Sugar (and other) transporter
  Pfam module annotation: Pfam domain module=MFS_1::Sugar_tr; Domain location=28-445::27-487
CTKNLLGIQLFECARGSPISFRSCQALVLVLTFLSYASYHATRKTTSIVKSVLDPKTNLGILHWPSHLYLQNLKGAENNRTLSSGWAPFNAEDGTALLGEIDLAFLGVYAIGMFFAGHLGDRVDLRILLTIGMIGTGLFTAAFGAGYWFNIHNFYYFLGMQMMAGLFQSSGWPSVVAVVGNWFGKSKRGLILGIWNAHTSVGNISGSLIAAAMLKYGWCWSFAVPGIMIALVGLTVFLFLPVSPDVIGIQEDFHLKDSEKTGMDTPLLERRSQAKEKAVGFIEAWRIPGVAPFALCLFFCKLVAYTFLYWLPFYISHTAIGGQYLSNSSAGVLSTLFDVGGVVGGILAGHISDRLDARALTAASFTFSAIPALFFYRIYGSISLTWNIALMFITGMLVNGPYALITTAVSADLGTHSSLNGNSRALATVTAIIDGTGSIGAAVGPLLTGYISARSWSAVFTMLMASALVAGLLLTRLVVAEVVAKMEPRRTPDPAASDLPVSSMDEP

SEQ ID NO: 81156 - protein, 88 aa, Setaria italica
  Transcript Sequence Number=SeqID_15182
  Gene Ontology: Cellular component=integral to membrane
  Homolog annotation: Hit_ID=B9RF35; Match level="QueryCoverage=98%, HitCoverage=20%, E-value=8e-10, Identity=42%"; Hit description =Cation:cation antiporter, putative
FYMDLGGDEGKAVANSAAELQMANGIGRVAMDLPVTVEDHKQQDSALCTMLKKVTEVWEWPIAFVLKLTIPSTLPSEWNKVYICANIC

SEQ ID NO: 81157 - protein, 72 aa, Setaria italica
  Transcript Sequence Number=SeqID_15183
  Subcellular localization annotation: CTP_CleavageSite=66; ConfidenceScore=5.16e-01
TKFVALFWLHKISDYKMLQSESTTNQSMLISPNTTLKLSSTDQTTGKKECFSRLSNQQCYQLVFVEAWIKSS

SEQ ID NO: 81158 - protein, 90 aa, Setaria italica
  Transcript Sequence Number=SeqID_15184
WSTHKIALLIKLNVNLQFLKKHSHVTLTPRLGIHLRKNSDSSGRYCWQQLTAPWRLAGTEFLTCPLLGINMTAHKKFLMTVQICCTFLAP

SEQ ID NO: 81159 - protein, 51 aa, Setaria italica
  misc_feature (20)..(20): Xaa can be any naturally occurring amino acid
  Transcript Sequence Number=SeqID_15185
  Gene Ontology: Biological process=mRNA processing
  Homolog annotation: Hit_ID=Q10NF9; Match level="QueryCoverage=86%, HitCoverage=5%, E-value=2e-11, Identity=79%"; Hit description =Retrotransposon protein, putative, unclassified, expressed
EERNTGITDSDVDVRKRGSXVGREESDQKKLEIELREKALESLRAKKAINN

SEQ ID NO: 81160 - protein, 841 aa, Setaria italica
  Transcript Sequence Number=SeqID_15186
  Gene Ontology: Mol. function=RNA binding; Cellular component=nucleus; Biological process=mRNA processing
  Homolog annotation: Hit_ID=Q10NF9; Match level="QueryCoverage=100%, HitCoverage=100%, E-value=4e-93, Identity=57%"; Hit description =Retrotransposon protein, putative, unclassified, expressed
  Pfam annotation: Domain name=PWI; Domain location=45-117; Score =141.4; E_value=2.8e-39; Accession=PF01480.9; Description=PWI domain
MSGGFFRGTSADQDTRFSNKQAKLLKTQKFAPELDHLVDMSKVKMDVMKPWIAKRVTELLGFEDEVLINFIYGLLEEKEADGKKIQIQLTGFMEKNTVKFMKELWGLLLSAQQNASGVPQQFLDEKEAEIQQRKAEDDRIAQEIQKKREKEGIDLELEKQKMMDGDTSNSRSYGDPNGSALNKTNIDATEEMELDFKRSSRTKNRGSRRSRSISLSPHGRQRSISPRKRSRSPSRRSRSIDRHRRSSRRSTSPRRSASPRRHSPRSTPSISRRRSPYSRRGSPSLSRYPSPPSRRRSPLRRKSPSSGSRRSPSPRHRRSPARAPRRSPSPARRRSPVRHRFSPGRHRSPSPARRRPRSPSPGRRRPRSPSPGRRRPRSPSPGRRRPRSPSPGSRRPRSPSPGRRRPWSRSPVKRRSPSPKRRRRSPSSPKTRYANRRPSPQRRRSISPYSSKSPNRSRRSLSVEIEKGTNGTPSTKDRVVPERDRERRSGDDSDRDGARTGDHRSPDSERRLSNSLRPPNNEERNSTRDRSSGKQLPSQDSTDTSGDEDEGSRARESARKANSARRKTKDFSADRQLNKVGAGVLSPGEKSPFMLQSGKGVQKKHPDQLSESSEDELVGRRMKRRTDSPDERSPPRIEKDDSHSKDERNSERAVRGSRDDSDNATGAKKYFSKVNEGSQSEDGSPVKKLKKRTDVKSHIDSGSSGSEEPDKHRSHSEKQRNKKAHKHKKQYDDSSESDSEPDGKEAKRRKEEKKLRKEERRRRREERHRRRAERHASKQKSKHSDTVAPSDSEKDRDSDSDVDVRKRGSPVGREESDQKKLEIELREKALESLRAKKAINN

SEQ ID NO: 81161 - protein, 63 aa, Setaria italica
  Transcript Sequence Number=SeqID_15187
MGAEEDAAARRERLRALRAAKELLSTPAPDGEQQNGTHGATEEHVEQPALPGPQDAPDEASKE

SEQ ID NO: 81162 - protein, 189 aa, Setaria italica
  Transcript Sequence Number=SeqID_15188
  Gene Ontology: Cellular component=plasma membrane
  Homolog annotation: Hit_ID=B6T9W1; Match level="QueryCoverage=84%, HitCoverage=83%, E-value=2e-69, Identity=76%"; Hit description =Wound/stress protein
  Pfam annotation: Domain name=PLAT; Domain location=50-174; Score =25.4; E_value=3.5e-05; Accession=PF01477.15; Description=PLATLH2 domain
MAKFAVLLLLAVAASATVLAHGRELPTQIKLVRGAVAAAGGGVSGDSMECVYTVFIRTGSIWKAGTDSNITLELAAADGNGVGITDLPSWGGLMGQGHSYFERGNLDIFSGRGPCMARPPCWMRVASDGTGPHHGWYCNYVEVTVTGPHKGCAQELFTVEQWLATDAPPYKLEAVVDHCARAGAGAAAA

SEQ ID NO: 81163 - protein, 66 aa, Setaria italica
  Transcript Sequence Number=SeqID_15189
RKTKQRYSIPLSQTMTKQKELITKIFHTSKIIQVYFFRKLIRRHLAPREFQDDLHLRLLLQSMSFR

SEQ ID NO: 81164 - protein, 848 aa, Setaria italica
  Transcript Sequence Number=SeqID_15190
  Gene Ontology: Mol. function=microtubule motor activity; Cellular component=microtubule associated complex; Biological process =microtubule-based movement
  Homolog annotation: Hit_ID=Q5VQ09; Match level="QueryCoverage=97%, HitCoverage=93%, E-value=0.0, Identity=93%"; Hit description =Armadillo repeat-containing kinesin-like protein 2
  Pfam annotation: Domain name=Arm; Domain location=579-619; Score =18.8; E_value=0.023; Accession=PF00514.15; Description=Armadillobeta- catenin-like repeat
  Pfam annotation: Domain name=Arm; Domain location=620-661; Score =37.6; E_value=4.9e-08; Accession=PF00514.15; Description =Armadillobeta-catenin-like repeat
  Pfam annotation: Domain name=Arm; Domain location=662-703; Score =19.4; E_value=0.014; Accession=PF00514.15; Description=Armadillobeta- catenin-like repeat
  Pfam annotation: Domain name=Arm; Domain location=704-744; Score =19.1; E_value=0.018; Accession=PF00514.15; Description=Armadillobeta- catenin-like repeat
  Pfam annotation: Domain name=Arm; Domain location=754-794; Score=9.4; E_value=0.79; Accession=PF00514.15; Description=Armadillobeta-catenin- like repeat
  Pfam annotation: Domain name=Atx10homo_assoc; Domain location=605 -696; Score=-27.9; E_value=0.02; Accession=PF09759.1; Description =Spinocerebellar ataxia type 10 protei
  Pfam annotation: Domain name=HEAT; Domain location=585-621; Score =14.4; E_value=0.49; Accession=PF02985.14; Description=HEAT repeat
  Pfam annotation: Domain name=HEAT; Domain location=625-663; Score =3.3; E_value=19; Accession=PF02985.14; Description=HEAT repeat
  Pfam annotation: Domain name=Kinesin; Domain location=17-358; Score =439.2; E_value=6.2e-129; Accession=PF00225.15; Description=Kinesin motor domain
  Pfam module annotation: Pfam domain module=Arm::Arm::Arm::Arm::Arm::At x10homo_assoc::HEAT::HEAT::Kinesin; Domain location=579-619::620 -661::662-703::704-744::754-794::605-696::585-621::625-663::17-358
GRASSDGVSSRVRVAVRLRPRNAEELAADADFGDCVELQPELKRLKLRKNNWESETYEFDELLTEFSSQKRVYEVVAKPVVESVMEGYNGTVMAYGQTGTGKTFTLGRLGEEDTAARGIMVRAMEDILADITPETDSVSVSYLQLYMEMIQDLLDPVNDNIAIVEDPRTGDVSLPGATVVEVRDQKSFVDLLRVGEAHRVAANTKLNTESSRSHAILMVNVRRSVKGRTEMDVSISGENGHSSSMMGSLRPPVIRKSKLVVVDLAGSERIDKSGSEGHTLEEAKSINLSLSALGKCINALAENSPHVPVRDSKLTRLLKDSFGGTARTSLVVTIGPSPRHRGETTSTIMFGQRAMKVENMVKLKEEFDYKSLCRRLDIELDKLIAENERQRKYFDDEVERIRAEAQCRIAEAERECKIMLENEKMKYHQEYLDSIKILEEKWKIHQQSPKKQIKEAESTSSDVGEVQNLLQNEKMLRQSAEDEASDLKNQVSHWKKLEATATAEVVKLRKMLDTEASQKEKLEEEIGVLRSQLLQMSMEADETRRSLDKGDGPGKIFPGLDSLVSQTRGSQPREQSNGPKQPIAKLFEQVGLQKILSLLESEEPDVRVHAVKVVANLAAEEANQEKIVEAGGLTSLLVLLRSSEDETIRRVAAGAIANLAMNETNQDLIMAQGGVTLLSMTASDAEDPQTLRMVAGAIANLCGNDKLQTRLRGEGGIKALLGMVRCGHPDVLAQVARGIANFAKCESRAATQGNKVGKSLLIDDGALPWIVKNANNEAAPIRRHIELALCHLAQHEVNSKDIISEGALWELVRISRDCSREDIRMLAHRTLTSSPTLQAEMRRLGIKM

SEQ ID NO: 81165 - protein, 87 aa, Setaria italica
  misc_feature (25)..(25): Xaa can be any naturally occurring amino acid
  Transcript Sequence Number=SeqID_15191
  Homolog annotation: Hit_ID=B6TSR7; Match level="QueryCoverage=100%, HitCoverage=48%, E-value=5e-26, Identity=72%"; Hit description =Hsp20/alpha crystallin family protein
  Subcellular localization annotation: CTP_CleavageSite=33; ConfidenceScore=5.24e-01
MSTVTSHTLLSRPTISSAGLSFGLXPAVVGLPCASAGKNRPRSICYSVDTKSADHQFNISPVALVHPYMPPTSTHRWEIKDDGKNVK

SEQ ID NO: 81166 - protein, 179 aa, Setaria italica
  misc_feature (39)..(39): Xaa can be any naturally occurring amino acid
  Transcript Sequence Number=SeqID_15192
  Gene Ontology: Mol. function=alpha,alpha-trehalase activity; Cellular component=anchored to membrane; Biological process=trehalose metabolic process
  Homolog annotation: Hit_ID=Q0ZBL5; Match level="QueryCoverage=90%, HitCoverage=58%, E-value=5e-74, Identity=82%"; Hit description =Trehalase (Fragment)
  Pfam annotation: Domain name=Trehalase; Domain location=1-159; Score=- 241.3; E_value=2e-05; Accession=PF01204.10; Description=Trehalase
  Subcellular localization annotation: CTP_CleavageSite=45; ConfidenceScore=5.11e-01
VYQWKSDSQNRNIFASNFIPLWLNAHHSGSVQFDRTTDXKSKRVMASLRTSGLLHAAGIATSLTNTSQQWDFPNGWAPVQHLIVEGLLHSGSEEAVKLAEDISTRWVRTNYAAYKATGAMHEKYDVEACGKSGGGGEYKPQTGFGWSNGVVLSFLEEFGWPEHKEIGCSRRGEVDLAGA

SEQ ID NO: 81167 - protein, 414 aa, Setaria italica
  misc_feature (197)..(197): Xaa can be any naturally occurring amino acid
  Transcript Sequence Number=SeqID_15193
  Gene Ontology: Mol. function=alpha,alpha-trehalase activity; Cellular component=anchored to membrane; Biological process=trehalose metabolic process
  Homolog annotation: Hit_ID=Q9XEY7; Match level="QueryCoverage=97%, HitCoverage=70%, E-value=1e-138, Identity=57%"; Hit description =Trehalase 1 GMTRE1
  Pfam annotation: Domain name=Trehalase; Domain location=1-412; Score =526.5; E_value=3.2e-155; Accession=PF01204.10; Description=Trehalase
GFLPRVGSPEARAWALEVHALWKDLARRVAPDVAARPERHTLLPLPGRVVVPGSRFREVYYWDSYWVVRGLLVSKMFETAKDIALNLVYMVEKYGFVLNGARSYYTNRSQPPLLSSMVLDVYGATGDVDFVRRAFPSLLKEHSFWMSEIHNVAIRDNNGQVRNLSRYQARWNKPRPESATIDEELASKINSIADKEXLYREIASTAESGWDFSSRWMRNSTDMTTLATSYIIPVDLNTFIFKMERDIAAFAKLLGENATSEKFLKASKARHIAIDSILWNSEMEQWLDYWLPTDGDCQKEGVYQWKSDSQNRNIFASNFIPLWLNAHHSGSVQFADAAKSKRVMASLRTSGLLHAAGIATSLTNTSQQWDFPNGWAPVQHLIVEGLLHSGSEEAVKLAEDIKVTIFLTLRLGFS

SEQ ID NO: 81168 - protein, 93 aa, Setaria italica
  Transcript Sequence Number=SeqID_15194
  Subcellular localization annotation: CTP_CleavageSite=57; ConfidenceScore=5.27e-01
MAAAAQQRGRRAVAGWIGFLIQVLLQILRGTPSRAQLMGFVGFRYPSSPGPRPPSPVAALVVQALAGPPCPVAVLSGEALPPPPDPACFPGLL

SEQ ID NO: 81169 - protein, 160 aa, Setaria italica
  Transcript Sequence Number=SeqID_15195
  Gene Ontology: Mol. function=protein binding; Cellular component =plasma membrane
  Homolog annotation: Hit_ID=B9SEG8; Match level="QueryCoverage=79%, HitCoverage=29%, E-value=7e-44, Identity=60%"; Hit description =Serine-threonine protein kinase, plant-type, putative
AGCWRLGLALLVALGACAGQGEEGRRVRLPTAPMEEKERAALYAAIESFVGKGWNGSGIYPDPCGWSPIQGVSCDLFNGLWYPTSISIGPVLDNSLQCAPDAKFSPQLFDLRRLRTLSFYSCFPASNPTAIPAASWEKLSGSLETLEFRTNPGLTGAVPA

SEQ ID NO: 81170 - protein, 71 aa, Setaria italica
  Transcript Sequence Number=SeqID_15196
KTLRLTFTKEQITLLPNSFLCFFPCLCISMRAIVSRARSNTVITHYLPWKTSSIWICESFMNKIFKTGIIY

SEQ ID NO: 81171 - protein, 87 aa, Setaria italica
  Transcript Sequence Number=SeqID_15197
  Homolog annotation: Hit_ID=B6UET0; Match level="QueryCoverage=100%, HitCoverage=14%, E-value=2e-41, Identity=95%"; Hit description =Peptidase, M50 family
CMVQPKAEIDLQLEITRLSTAWGYLSAVALAVTTFGTVALMSGFFLKPGATFDDYVSDVLPLFGGFLTILGVSEIATRLTAAKYGVK

SEQ ID NO: 81172 - protein, 439 aa, Setaria italica
  Transcript Sequence Number=SeqID_15198
  Gene Ontology: Mol. function=electron carrier activity; Cellular component=integral to membrane; Biological process=oxidation reduction
  Homolog annotation: Hit_ID=B9GKS3; Match level="QueryCoverage=98%, HitCoverage=88%, E-value=4e-92, Identity=40%"; Hit description =Cytochrome P450
  Pfam annotation: Domain name=p450; Domain location=1-435; Score =244.5; E_value=2.6e-70; Accession=PF00067.14; Description=Cytochrome P450
MHGPVMSLRLGTTDAIVASSAAAAHDVLQRYDHVLAARSVTDAGRALGNHEHSVIWLPGSSPLWRRLRAVCTNHLFSARGLDATRAAREEKARELVACLGRHAGAGEAVDVGRIVFSCVLNVVSNVLFSEDVADLSSDRAQELEMLVRDTVEEACKPNLSDLFPALAKLDLQGRRRRSAELIGRFYDFFDAIIARRLNGAAGGKEDFLDVLLQLRSEDQLSLQTIKSFLLDLFAAGTDTNAISVEWTMAELLRHPAVMSKVRAELRDALGSKPHPDESDIDRLPYLRAVVMESMRLHPPSPMLMPHLAMADGAEVGSFAVPSGTKVIVNLWAVMRDPALWPEPEAFSPERFVGACDADFRGGKEKDRLEFMPFGAGRRACPGTPMATRVVTLLLASMLHAFEWRLPEGMQPGDVDVRDRFGTSLNMVTSLRAVPVPVHR

SEQ ID NO: 81173 - protein, 213 aa, Setaria italica
  Transcript Sequence Number=SeqID_15199
  Gene Ontology: Mol. function=helicase activity; Cellular component =mitochondrion
  Homolog annotation: Hit_ID=B9RFQ7; Match level="QueryCoverage=93%, HitCoverage=27%, E-value=3e-34, Identity=39%"; Hit description =Pentatricopeptide repeat-containing protein, putative
  Pfam annotation: Domain name=PPR; Domain location=107-141; Score =31.4; E_value=3.6e-06; Accession=PF01535.12; Description=PPR repeat
  Pfam annotation: Domain name=PPR; Domain location=142-176; Score =13.8; E_value=0.21; Accession=PF01535.12; Description=PPR repeat
  Pfam annotation: Domain name=PPR; Domain location=177-211; Score=0.4; E_value=7.9; Accession=PF01535.12; Description=PPR repeat
  Pfam annotation: Domain name=PPR; Domain location=38-71; Score=10.6; E_value=0.5; Accession=PF01535.12; Description=PPR repeat
  Pfam annotation: Domain name=PPR; Domain location=72-106; Score=29.8; E_value=1.1e-05; Accession=PF01535.12; Description=PPR repeat
  Pfam module annotation: Pfam domain module=PPR::PPR::PPR::PPR::PPR; Domain location=107-141::142-176::177-211::38-71::72-106
GHAPMASAYADIVDCYCTSSKFRKALSFLEENDVTDSEPYNVLLRWLCIDGRLQDSVRYLEKLHNRGLVDCESWNIVITHFCNEGNIRRASELIGRMVVSSFTPDESTYSAIISCYCRLGLYIDALGMFRRVSVRNLSLNSESFSQLVEVLCHTERIQEAIEVFKYHSKRGCSLTNKSLHMLIQGSCLSGRIREAVQLRSLAVCTGYFLLVFS

SEQ ID NO: 81174 - protein, 127 aa, Setaria italica
  Transcript Sequence Number=SeqID_15200
  Gene Ontology: Cellular component=nucleolar preribosome, large subunit precursor; Biological process=chromosome organization and biogenesis
  Homolog annotation: Hit_ID=B9SJF2; Match level="QueryCoverage=97%, HitCoverage=30%, E-value=8e-48, Identity=69%"; Hit description=WD -repeat protein, putative
  Pfam annotation: Domain name=NLE; Domain location=1-55; Score=63.3; E_ value=9.4e-16; Accession=PF08154.4; Description=NLE (NUC135) domain
  Pfam annotation: Domain name=WD40; Domain location=76-113; Score =20.7; E_value=0.0061; Accession=PF00400.24; Description=WD domain, G- beta repeat
  Pfam module annotation: Pfam domain module=NLE::WD40; Domain location= 1-55::76-113
TDPTDQYAVPADLSRMGLSEIVNSLLAAAEPDHKAQPFDFLVDGELVRLPLQQFLLAKGISAERVLELEYVKAVAPRKQDEPCPHDDWVSAVDGSNPSFVLTGCYDGLARLWKDAAVCTQILEGHSG

SEQ ID NO: 81175 - protein, 280 aa, Setaria italica
  Transcript Sequence Number=SeqID_15201
  Gene Ontology: Mol. function=protein binding; Cellular component =nucleus; Biological process=Notch signaling pathway
  Homolog annotation: Hit_ID=B9SJF2; Match level="QueryCoverage=81%, HitCoverage=56%, E-value=4e-80, Identity=61%"; Hit description=WD -repeat protein, putative
  Pfam annotation: Domain name=WD40; Domain location=109-146; Score =34.7; E_value=3.8e-07; Accession=PF00400.24; Description=WD domain, G-beta repeat
  Pfam annotation: Domain name=WD40; Domain location=148-188; Score =11.3; E_value=1.8; Accession=PF00400.24; Description=WD domain, G -beta repeat
  Pfam annotation: Domain name=WD40; Domain location=195-234; Score =38.6; E_value=2.5e-08; Accession=PF00400.24; Description=WD domain, G-beta repeat
  Pfam annotation: Domain name=WD40; Domain location=238-275; Score =7.5; E_value=5.1; Accession=PF00400.24; Description=WD domain, G -beta repeat
  Pfam annotation: Domain name=WD40; Domain location=39-77; Score=37.9; E_value=4.1e-08; Accession=PF00400.24; Description=WD domain, G-beta repeat
  Pfam module annotation: Pfam domain module=WD40::WD40::WD40::WD40::WD4 0; Domain location=109-146::148-188::195-234::238-275::39-77
RTTRKKDQVLVHVVTGSKDRSLRLYKCDTSVSMDYPKRVGAYKILRGHTSSVQSIAVDPSRDMLCSGSWDSTIKLWAVEGSEEDGDAVSLKKRRTNSDSSGPEESQLEGSAISTLLGHTQCVTAVTWPEQQTIYSASWDHSVRQWDVQAVKETWNMFSEKALNCLDCGGEGSSLIAAGGSDPILRVWDPRKPGSLAPVFQFSSHSSWITACKWHPSSWFHLVSSSFDGKVMLWDLRTAWPLASVDSHKDKVLCADWWKGDSVISGGADSKLCIASGIEIV

SEQ ID NO: 81176 - protein, 61 aa, Setaria italica
  Transcript Sequence Number=SeqID_15202
  Gene Ontology: Mol. function=ATP-dependent DNA helicase activity; Cellular component=nucleus; Biological process=nucleotide-excision repair
  Homolog annotation: Hit_ID=B9RCF1; Match level="QueryCoverage=88%, HitCoverage=7%, E-value=1e-20, Identity=87%"; Hit description =Rad25/xp-B DNA repair helicase, putative
EFPSSKKKQVLYVMNPNKFRACEFLIRFHEQQRGDKIIVFADNLFALTAYAIILSSPHGLW

SEQ ID NO: 81177 - protein, 145 aa, Setaria italica
  Transcript Sequence Number=SeqID_15203
  Gene Ontology: Mol. function=ATP-dependent DNA helicase activity; Cellular component=nucleus; Biological process=nucleotide-excision repair
  Homolog annotation: Hit_ID=Q38861; Match level="QueryCoverage=77%, HitCoverage=14%, E-value=5e-58, Identity=92%"; Hit description=DNA repair helicase XPB1
KSSAPSKAALVDESAEFDYADDFDDDALDANTEVKKRDFTKLELKPDHANRPLWACADGRIFLETFSPLYKQAYDFLIAIAEPVCRPESMHEYNLTPHSLYAAVSVGLETSTIISVLSKLSKTKLPREIIDFIHGSTANYGKVKL

SEQ ID NO: 81178 - protein, 133 aa, Setaria italica
  misc_feature (60)..(60): Xaa can be any naturally occurring amino acid
  misc_feature (84)..(84): Xaa can be any naturally occurring amino acid
  Transcript Sequence Number=SeqID_15204
  Gene Ontology: Mol. function=ATP-dependent DNA helicase activity; Cellular component=nucleus; Biological process=regulation of transcription, DNA-dependent
  Homolog annotation: Hit_ID=B9RCF1; Match level="QueryCoverage=87%, HitCoverage=14%, E-value=3e-52, Identity=89%"; Hit description =Rad25/xp-B DNA repair helicase, putative
  Pfam annotation: Domain name=Helicase_C; Domain location=1-67; Score =8.4; E_value=0.0089; Accession=PF00271.23; Description=Helicase conserved C-terminal domain
ITFSHAERTRILYQFKNSPEVHTIFLSKVGDNSIDIPEANVIIQISSHAGSRRQEAQRLXGRILRAKGKHQDRMAGGKEEYNAXFFYSLVSTDTQEMYYSTKRQQFLIDQGYSFKVNTTKFRPTNLERKEPKY

SEQ ID NO: 81179 - protein, 62 aa, Setaria italica
  Transcript Sequence Number=SeqID_15205
HLVLSKVTELLYRGQFWSLAYACCFLFANEDIYLLEKCKYCVRLVCILSYKHAKAATTWHWP

SEQ ID NO: 81180 - protein, 101 aa, Setaria italica
  Transcript Sequence Number=SeqID_15206
  Gene Ontology: Mol. function=ATP-dependent DNA helicase activity; Cellular component=nucleus; Biological process=nucleotide-excision repair
  Homolog annotation: Hit_ID=Q38861; Match level="QueryCoverage=40%, HitCoverage=5%, E-value=1e-16, Identity=95%"; Hit description=DNA repair helicase XPB1
MAGGDGDRHRAPKRHKSSAPSKAAPVDESAEFDYADDFDDDALDADTEVKKRDFTKLELKPDHANRPLWACADGRIFLETFSPLYKQARIYVYCSYLISLT

SEQ ID NO: 81181 - protein, 216 aa, Setaria italica
  misc_feature (36)..(36): Xaa can be any naturally occurring amino acid
  misc_feature (186)..(186): Xaa can be any naturally occurring amino acid
  Transcript Sequence Number=SeqID_15207
  Gene Ontology: Mol. function=ATP-dependent DNA helicase activity; Cellular component=nucleus; Biological process=regulation of transcription, DNA-dependent
  Homolog annotation: Hit_ID=B9RCF1; Match level="QueryCoverage=93%, HitCoverage=25%, E-value=2e-92, Identity=84%"; Hit description =Rad25/xp-B DNA repair helicase, putative
  Pfam annotation: Domain name=Helicase_C; Domain location=29-103; Score=45.3; E_value=2.4e-10; Accession=PF00271.23; Description =Helicase conserved C-terminal domain
NYEFHEQQRGDKIIVFADNLFALTAYAMKLRKPMIXYGATSHAERTRILYQFKNSPEVHTIFLSKVGDNSIDIPEANVIIQISSHAGSRRQEAQRLGRILRAKGKHQDRMAGGKEEYNAFFYSLVSTDTQEMYYSTKSQQFLIDQGYSFKVITSLTPPEEGPNLSYYTLDEQLELLGKMPHSPLPXVLNAGDDMIGVEHLEEDSDGKDYLTKKKKQ

SEQ ID NO: 81182 - protein, 62 aa, Setaria italica
  Transcript Sequence Number=SeqID_15208
  Gene Ontology: Mol. function=metal ion binding; Cellular component =chromosome
  Homolog annotation: Hit_ID=Q336R3; Match level="QueryCoverage=100%, HitCoverage=7%, E-value=1e-23, Identity=87%"; Hit description=E3 ubiquitin-protein ligase BRE1-like 2
MDSAALQYENQKLLQQLEAQKSEMHALEVKFKELKDEQCSYDKTLISLNKMWNQLIDDLVLL

SEQ ID NO: 81183 - protein, 215 aa, Setaria italica
  Transcript Sequence Number=SeqID_15209
  Pfam annotation: Domain name=DUF581; Domain location=128-185; Score =81.5; E_value=2.9e-21; Accession=PF04570.6; Description=Protein of unknown function (DUF581)
  Subcellular localization annotation: CTP_CleavageSite=63; ConfidenceScore=5.29e-01
MMWSHEPATEEPKVSPARRSSVAKLTTASSSLANLLSVFLGATSPEPRPRRSFDAGGVGLGIVADMSRPCLAGAEPIAIGPAARRRAREEDELSESYTCVITHVAGAGGGSVRKRVYFGFGDSGGGGWLVKADDEVPAERADFLSRCYLCDKRLDGLDIYMYRGENAFCSSECRCHQMLMDDRPENCRSEVHRASDCSVSPHTAPMAYSPSVAAA

SEQ ID NO: 81184 - protein, 369 aa, Setaria italica
  Transcript Sequence Number=SeqID_15210
  Gene Ontology: Mol. function=hydrolase activity, acting on ester bonds; Biological process=lipid metabolic process
  Homolog annotation: Hit_ID=B6T560; Match level="QueryCoverage=91%, HitCoverage=91%, E-value=1e-173, Identity=86%"; Hit description=GSDL- motif lipase
  Pfam annotation: Domain name=Lipase_GDSL; Domain location=36-348; Score=153.2; E_value=8.1e-43; Accession=PF00657.14; Description=GDSL- like LipaseAcylhydrolase
MATVPQVRVLLLRALLAAATFACAAAAAGSNKVPAIYVFGDSTADVGNNNYLPGSAVPRANFPHNGVDFPTSRPTGRFSNGYNGVDFLAMNMGFKRSPPPFLAVANKTNKQVFRGLLGVNFASAGSGILDTTGSSIIPLSQQVEQFDALQRNISARITQGAADAVLSRSVFLVSTGGNDLFAFFSRNSTPSDADKQRFVGNLVSLYQNHVKALYVLGARKFAVIDVPPIGCCPYPRSLHPLGACIDVLNELARGFNKGVRDAMHGLGASFQGLKYSVGSSHAVVQSIMKHPQRLGFKDVTNACCGSGRFNGKSGCTPNATLCDNRHEYLFWDLLHPTHAASKIAAAAIYDGSLHFAAPINFRQLVEDQC

SEQ ID NO: 81185 - protein, 142 aa, Setaria italica
  Transcript Sequence Number=SeqID_15211
  Subcellular localization annotation: CTP_CleavageSite=57; ConfidenceScore=5.60e-01
CPHLARHHLVAASSPSPPRAVAGLLRANVPPHLTNRGPLAALCWIRRRQLQLRSFCRQQPRWCGRRARLVRAALVVASEARAMLVVQSVGIDGMPRPVCWWCERHIQQDRPVGPWSSGAATISDDEVKRALAGGSHRHLCHA

SEQ ID NO: 81186 - protein, 128 aa, Setaria italica
  misc_feature (92)..(92): Xaa can be any naturally occurring amino acid
  Transcript Sequence Number=SeqID_15212
  Homolog annotation: Hit_ID=B6UAR9; Match level="QueryCoverage=82%, HitCoverage=22%, E-value=2e-46, Identity=85%"; Hit description=Ran -binding protein 9
  Pfam annotation: Domain name=RanBPM_CRA; Domain location=70-128; Score=-0.6; E_value=0.0067; Accession=PF10607.1; Description=Ran binding protein in the microtubule
YIALLFLSLLWLLLSENSLFDLVKLIMSGDIDTTFKRLGEWYPQVIKDEKSVICFLLHSQRFIEYIRAEQLEDAVKYARANLASFLTHKVFXEGLLKESVGLLAYEKPAESCIGYLLDAPQREFVADA

SEQ ID NO: 81187 - protein, 107 aa, Setaria italica
  misc_feature (41)..(41): Xaa can be any naturally occurring amino acid
  Transcript Sequence Number=SeqID_15213
  Homolog annotation: Hit_ID=B6UAR9; Match level="QueryCoverage=74%, HitCoverage=16%, E-value=9e-32, Identity=80%"; Hit description=Ran -binding protein 9
LILICNWYIQDGALLPTELEDLFSTPCDKLTVNFGKEPFCXDIVGYILEEKMRQQSVTDKVKLEEPNISHWIVRSYLLHYGYQDTLNSFDLANATDPPASRQNGHRE

SEQ ID NO: 81188 - protein, 134 aa, Setaria italica
  misc_feature (59)..(59): Xaa can be any naturally occurring amino acid
  Transcript Sequence Number=SeqID_15214
  Subcellular localization annotation: CTP_CleavageSite=23; ConfidenceScore=5.24e-01
TGALPPVVPGLLLLMLLAVAPPPAASAVGLNWGSASSHPLPAARVVQGLLLPNSASPPXLRRARGHGVAVTVGVPTRCSSSVRRPTRVRHASSVRRHASSVRGRAGRRRPLATAVPAAQLPSSPLRRRRAYRKR

SEQ ID NO: 81189 - protein, 47 aa, Setaria italica
  Transcript Sequence Number=SeqID_15215
HETEVLKEKALTPYLILSKMNLHVAGCYEEDAEEIMNLYSDSSTNQV

SEQ ID NO: 81190 - protein, 464 aa, Setaria italica
  Transcript Sequence Number=SeqID_15216
  Gene Ontology: Mol. function=Ran GTPase binding; Cellular component =microtubule associated complex; Biological process=protein complex assembly
  Homolog annotation: Hit_ID=B6UAR9; Match level="QueryCoverage=96%, HitCoverage=95%, E-value=0.0, Identity=87%"; Hit description=Ran -binding protein 9
  Pfam annotation: Domain name=RanBPM_CRA; Domain location=345-457; Score=88.4; E_value=2.5e-23; Accession=PF10607.1; Description=Ran binding protein in the microtubule
  Pfam annotation: Domain name=SPRY; Domain location=93-214; Score =96.1; E_value=1.2e-25; Accession=PF00622.20; Description=SPRY domain
  Pfam module annotation: Pfam domain module=RanBPM_CRA::SPRY; Domain location=345-457::93-214
MVANQEAEAGSPGAGTTVDPMRLASRWRCPTEWDRAAAELDAEPLPSELNTVNSSGLFAVVSTDKLSVRYLGSHNHGHDVGVVQANRPAPTRRPVYYFEMGVKNAGYKGQTSIGFTTDSFKMRRQPGWESNSCGYHGDDGHLYRGQGKGESFGPKFTSGDTIGAGINYLSQELFFTKNGSLVGAVPKDLKGPLYPTVAVHSQGEELTVNFGKEPFCFDIEGYILEEKMRQQSVTDKVKLEEPNISHWIVRSYLLHYGYQDTLNSFDLANATDPPASRQNGHREPPPEIYGLSHRKLLRQLIMSGDIDTTFKRLGEWYPQVIKDEKSVICFLLHSQRFIEYIRAEQLEDAVKYARANLASFLTHKAFEGLLKESVALLAYEKPAESCIGYLLDAPQREFVADAVNAAVLSTNPAMKDPESCLYSCLERLLRQLTVCSFERRTFNNDQGDAFLLHKEVRSCERSRR

SEQ ID NO: 81191 - protein, 150 aa, Setaria italica
  Transcript Sequence Number=SeqID_15217
  Gene Ontology: Mol. function=protein serine/threonine kinase activity; Cellular component=plasma membrane; Biological process =protein amino acid phosphorylation
  Homolog annotation: Hit_ID=B9T3S1; Match level="QueryCoverage=99%, HitCoverage=20%, E-value=1e-31, Identity=53%"; Hit description =BRASSINOSTEROID INSENSITIVE 1-associated receptor kinase 1, putative
RVTSARFELGKGSGAMHNHKGGVMLDWVRKVHQEKMLDLLVDQDLGPHYDRIEVAEMVHVALLCTQFQPSHRPKMSEVVRMLEGDGLAEKWEATNRPAAAVCHDALGYDHRNDSNGSVFFNDFHDIDSSLSSDEARSIDMVEEMELSGPR

SEQ ID NO: 81192 - protein, 67 aa, Setaria italica
  Transcript Sequence Number=SeqID_15218
GLVRGVSTRDELCVLEFPRHGPVTVLSCSRQRFAVDRNRYRALFGSTSVCSCSPAFIYLLLFCYKQR

SEQ ID NO: 81193 - protein, 273 aa, Setaria italica
  Transcript Sequence Number=SeqID_15219
  Gene Ontology: Mol. function=binding; Cellular component=nuclear pore; Biological process=protein import into nucleus, docking
  Homolog annotation: Hit_ID=Q84NP8; Match level="QueryCoverage=100%, HitCoverage=29%, E-value=1e-104, Identity=68%"; Hit description =Putative Ran binding protein 11-like
EDYTIFGGSEFLKSHGASLATIVDAIVGNVNDKGLLTALPVVDLLIQIFPLEAPPLISSALQKLIFISLSQDDGQNPSRTTVRASSGAILARLLVMNTNFSAQLLSESALLASIQQAGIAVNNNLLISLVDMWIDKVDDANAVQQKEYAMALSVVLTLHVPQVIDKLDDILSVCTTVIIGSREVKTDDDTSGDITSSSWIGNDGSGYSNTSSKELRKRQVKDSDPIKQASLENVLRENLKACAALHGDAAFNAAISRIHPSAFAQLQQALNTA

SEQ ID NO: 81194 - protein, 159 aa, Setaria italica
  misc_feature (9)..(9): Xaa can be any naturally occurring amino acid
  misc_feature (23)..(23): Xaa can be any naturally occurring amino acid
  misc_feature (68)..(68): Xaa can be any naturally occurring amino acid
  misc_feature (152)..(152): Xaa can be any naturally occurring amino acid
  Transcript Sequence Number=SeqID_15220
  Homolog annotation: Hit_ID=Q108V8; Match level="QueryCoverage=99%, HitCoverage=5%, E-value=2e-59, Identity=82%"; Hit description=DNAJ heat shock N-terminal domain-containing protein, putative, expressed
SIHVYASTXRDNLLATVLDVLQXQRQCAIPVLPRLTMPGHRIDPPCGVAHHQMPHHGSVDMEAATMHXKHLAAVAKEAVASSDAVPGAKIRLWRRIREFNACVPYTGVPVNIEVPEMVLVALMSLLPNHPQNSAPIDAYPLPPPSPKAAATXMGFVACL

SEQ ID NO: 81195 - protein, 1052 aa, Setaria italica
  misc_feature (242)..(242): Xaa can be any naturally occurring amino acid
  Transcript Sequence Number=SeqID_15221
  Gene Ontology: Mol. function=ATP-dependent helicase activity; Cellular component=nucleus; Biological process=mRNA processing
  Homolog annotation: Hit_ID=Q6YUI7; Match level="QueryCoverage=100%, HitCoverage=100%, E-value=0.0, Identity=85%"; Hit description=RNA helicase-like
  Pfam annotation: Domain name=DEAD; Domain location=415-572; Score= -25.8; E_value=0.003; Accession=PF00270.21; Description=DEADDEAH box helicase
  Pfam annotation: Domain name=DUF1605; Domain location=929-1029; Score= 132.3; E_value=1.5e-36; Accession=PF07717.8; Description=Domain of unknown function (DUF1605)
  Pfam annotation: Domain name=HA2; Domain location=803-895; Score =105.7; E_value=1.6e-28; Accession=PF04408.15; Description=Helicase associated domain (HA2)
  Pfam annotation: Domain name=Helicase_C; Domain location=648-742; Score=54.9; E_value=3.1e-13; Accession=PF00271.23; Description =Helicase conserved C-terminal domain
  Pfam annotation: Domain name=PWI; Domain location=6-73; Score=-6.8; E_ value=0.047; Accession=PF01480.9; Description=PWI domain
  Pfam module annotation: Pfam domain module=DEAD::DUF1605::HA2::Helicas e_C::PWI; Domain location=415-572::929-1029::803-895::648-742::6-73
MASDGQLREWISDKLMSLLGYSKSVIVQYVIRLAKECSSTSDLVGKLVEFGFTSSAETRTFAADIYAKVPRRASGISNYQKQEREAAKLVQKQSTYKLLADEDDNDADNQTSTSRKSSTTQSSKSRKQFRRKADQDGGDDDDEDEKVAKDSGRKVRRRTEEEDEEDGNNSSDEEKERIRDQEARAQLEKNMKERDAANTRKLMERQLSKEEQEELNRKSQAMDKNDTSDLRKFSRQAYLQKXRRDKKMEEIRDEIVDHEYIFSDVKLTEAEEKEFRYKKRLYDLVKEHVESADDVGEYKMPEAYDMGENVNQEKRFSVAIQRYKDPEAKDKMNPFAEQEAWEEHQIGKSKLQFGSKDRKRSSDDYQYVFEDSIDFVKSSVIEGTQPEYNSDQEDIDAKDILKRELQDERKTLPIYKFRDELLKAVEEYQVIVIVGETGSGKTTQIPQYLHEAGYTAKGKVACTQPRRVAAMSVSARVSQEMGVKLGHEVGYSIRFEDCTSEKTIIKYMTDGMLLREFLGEPDLASYSVVMVDEAHERTLSTDILFGLVKDISRFRPDLKLLISSATLDAEKFSDYFDSAPIFKIPGRRYPVEIHYTKAPEADYIDAAIVTVLQIHVTQPPGDILVFLTGQEEIETVDEILKHRTRGLGTKISELIICPIYANLPTELQAKIFEPTPEGARKVVLATNIAETSLTIDGIKYVIDPGFCKIKSYNPRTGMESLLINPISKASANQRAGRSGRTGPGKCFRLYTSYNYMHDLEDNTVPEIQRTNLANVVLTLKSLGIHDLVNFDFMDPPPSEALLKALEQLFALSALNSRGELTKTGRRMAEFPLDPMLSKMIVASEKYKCSDEVISIASMLSIGNSIFYRPKDKQVHADNARLNFHTGNVGDHIALLNVYSSWKETDYSTQWCYENYIQVRSMKRARDIRDQLEGLMERVEIEICSNASDLDAIKKAITSGFFHHSARLQRDGTYKTVKNPQTVHIHPSSGLAEIRPRWVVYHELVLTTKEFMRQVTELKPEWLVEIAPHYYQLKDVDDSGTKKLPKGQGRAAL

SEQ ID NO: 81196 - protein, 126 aa, Setaria italica
  misc_feature (66)..(66): Xaa can be any naturally occurring amino acid
  Transcript Sequence Number=SeqID_15222
  Gene Ontology: Mol. function=kinase activity; Biological process =protein amino acid phosphorylation
  Homolog annotation: Hit_ID=Q6EQG8; Match level="QueryCoverage=94%, HitCoverage=16%, E-value=1e-30, Identity=60%"; Hit description =Leucine-rich repeat family protein /protein kinase family protein -like
KIQRVHTGKLDFSCFLFIITFSFVSGDTTIGFEPQGRMVLENFNIEQSAGADGKPVIKTFQTHVTXNHTLEIQFYWAGRGTRSIPYRGSYGPLISAISVTPNFKPPLAVEPPKTGSSKKAARASMS

SEQ ID NO: 81197 - protein, 170 aa, Setaria italica
  misc_feature (92)..(92): Xaa can be any naturally occurring amino acid
  Transcript Sequence Number=SeqID_15223
  Gene Ontology: Mol. function=kinase activity; Biological process =protein amino acid phosphorylation
  Homolog annotation: Hit_ID=Q6EQG8; Match level="QueryCoverage=86%, HitCoverage=20%, E-value=3e-51, Identity=66%"; Hit description =Leucine-rich repeat family protein /protein kinase family protein -like
  Pfam annotation: Domain name=SKG6; Domain location=92-129; Score =16.8; E_value=0.0088; Accession=PF08693.2; Description=Transmembrane alpha-helix domain
LWCGWKARGLFNIEILEHHSSLYEQPSGADGKPVIKTSKHTSLNHTLEIQFYWAGRGTTGIPYRGSYGPLISAITVTPNFQIPFGLEPPKTXHSKRSSRVSIALVIGIPVIAIFTALIVGIYCIKKRRKSLMHKELRALDLQIGSFTLRQIKAATRNFDAANKIGEGGFG

SEQ ID NO: 81198 - protein, 497 aa, Setaria italica
  Transcript Sequence Number=SeqID_15224
  Gene Ontology: Mol. function=protein serine/threonine kinase activity; Biological process=protein amino acid phosphorylation
  Homolog annotation: Hit_ID=Q9LQN8; Match level="QueryCoverage=94%, HitCoverage=94%, E-value=0.0, Identity=62%"; Hit description =F24B9.29 protein
  Pfam annotation: Domain name=Pkinase; Domain location=160-394; Score =145.2; E_value=2e-40; Accession=PF00069.17; Description=Protein kinase domain
  Pfam annotation: Domain name=Pkinase_Tyr; Domain location=160-430; Score=115.7; E_value=1.5e-31; Accession=PF07714.9; Description =Protein tyrosine kinase
  Pfam module annotation: Pfam domain module=Pkinase::Pkinase_Tyr; Domain location=160-394::160-430
DNFIATSISKLVMPNSELYTKARLSPLSLTYYGLCMFSGSYTVNLHFAEIVFTNDSTYCSLGKRRFNVFIQGRMVLENFNIEQPSGADGKPVIKTFQTYVTNHTLEIQFYWAGRGTTGIPYRGSYGPLISAITVTPKLRALDLQIGSFTLRQIKAATRNFDAANKIGEGGFGSVYKGLLSDGTIIAVKQLSSRSKQGNREFVNEIGMISALQHPNLVKLYGCCTEGNQLSLVYEYMENNCLARALFVEQYRLRLDWPTRHKICLGIARGLAYLHEESAIRIVHRDIKASNILLDKDLNAKISDFGLAKLNEDDHTHISTKVAGTIGYMAPEYAMRGYLTDKADVYSFGVVALEVVSGKSNTNYRPKEDFVYLLDWACVLHERGALLELVDSDLGSNYSTEEALLMLNVALLCTTAAPTLRPKMSKVVSLLEGHTPLQPLLSDLSLAASSLSSSGVRRNFWQNLSESQSLTAEASCNDTNESSAIDTDGSLRPLVSQM

SEQ ID NO: 81199 - protein, 70 aa, Setaria italica
  Transcript Sequence Number=SeqID_15225
MREFRIATRKTNPIHNDVPENTTFLLFDQPSGEANTRGTLITKTEEVAINAKTANWKAIVIFKILQTTFK

SEQ ID NO: 81200 - protein, 107 aa, Setaria italica
  Transcript Sequence Number=SeqID_15226
MNSRPIVLIFLLLVLIITSQFEWKQQIGEAEANPTTNRRRQQALEREDAVKEKIILAQEKNIQQLNELIQSLQLQLLHCRGSNSTAHITSSQSTGDNEAEGQEMISD

SEQ ID NO: 81201 - protein, 78 aa, Setaria italica
  Transcript Sequence Number=SeqID_15227
MNSRPIVLIFLLLVLIITSQFEWKQQIGEAEANPTTNRRRQQALEREDAVKEKIILAQEKNIPLLVNFWHFQFHAGNE

SEQ ID NO: 81202 - protein, 86 aa, Setaria italica
  Transcript Sequence Number=SeqID_15228
  Gene Ontology: Cellular component=exocyst; Biological process =exocytosis
  Homolog annotation: Hit_ID=B9T3B0; Match level="QueryCoverage=60%, HitCoverage=8%, E-value=6e-14, Identity=67%"; Hit description =Protein binding protein, putative
SNSASSADLPAADEDDSVSASIGRRSSAYRSLRSIREIDLLPDDAVADLRAIASRMAAAGYGRECAQVYASVRKPAVDASLRRLGV

SEQ ID NO: 81203 - protein, 136 aa, Setaria italica
  misc_feature (29)..(29): Xaa can be any naturally occurring amino acid
  misc_feature (41)..(41): Xaa can be any naturally occurring amino acid
  misc_feature (73)..(73): Xaa can be any naturally occurring amino acid
  Transcript Sequence Number=SeqID_15229
  Gene Ontology: Mol. function=RNA polymerase II transcription factor activity; Cellular component=transcription factor TFIIA complex; Biological process=transcription initiation from RNA polymerase II promoter
  Homolog annotation: Hit_ID=Q0DLD3; Match level="QueryCoverage=100%, HitCoverage=100%, E-value=2e-43, Identity=68%"; Hit description =Transcription initiation factor IIA subunit 2
  Pfam annotation: Domain name=TFIIA_gamma_C; Domain location=82-131; Score=118.3; E_value=2.6e-32; Accession=PF02751.6; Description =Transcription initiation factor IIA, gamma subunit, beta-barrel domain
  Pfam annotation: Domain name=TFIIA_gamma_N; Domain location=2-48; Score=73.8; E_value=6.3e-19; Accession=PF02268.8; Description =Transcription initiation factor IIA, ga
  Pfam module annotation: Pfam domain module=TFIIA_gamma_C::TFIIA_gamma_ N; Domain location=82-131::2-48
MATFELYRRSTIGMCLTETLDEMVSSGTXPELAIQVLEQWXKATRTPPCLWIMLFLSSLLRETYDLCFSVPLXSMTDALENQVKSKVNIKGHLHTYRFCDNVWTFILTDAQFKNDDNTEQVGKVKIVACDSKLLSQ

SEQ ID NO: 81204 - protein, 106 aa, Setaria italica
  Transcript Sequence Number=SeqID_15230
  Gene Ontology: Mol. function=RNA polymerase II transcription factor activity; Cellular component=transcription factor TFIIA complex; Biological process=transcription initiation from RNA polymerase II promoter
  Homolog annotation: Hit_ID=Q0DLD3; Match level="QueryCoverage=100%, HitCoverage=100%, E-value=3e-53, Identity=93%"; Hit description =Transcription initiation factor IIA subunit 2
  Pfam annotation: Domain name=TFIIA_gamma_C; Domain location=52-101; Score=118.3; E_value=2.6e-32; Accession=PF02751.6; Description =Transcription initiation factor IIA, gamma subunit, beta-barrel domain
  Pfam annotation: Domain name=TFIIA_gamma_N; Domain location=2-50; Score=127.8; E_value=3.6e-35; Accession=PF02268.8; Description =Transcription initiation factor IIA, ga
  Pfam module annotation: Pfam domain module=TFIIA_gamma_C::TFIIA_gamma_ N; Domain location=52-101::2-50
MATFELYRRSTIGMCLTETLDEMVSSGTLSPELAIQVLVQFDKSMTDALENQVKSKVNIKGHLHTYRFCDNVWTFILTDAQFKNDDNTEQVGKVKIVACDSKLLSQ

SEQ ID NO: 81205 - protein, 248 aa, Setaria italica
  misc_feature (165)..(165): Xaa can be any naturally occurring amino acid
  misc_feature (186)..(186): Xaa can be any naturally occurring amino acid
  Transcript Sequence Number=SeqID_15231
  Gene Ontology: Mol. function=metal ion binding; Biological process =RNA-dependent DNA replication
  Pfam annotation: Domain name=DUF594; Domain location=200-247; Score =57.1; E_value=6.6e-14; Accession=PF04578.5; Description=Protein of unknown function, DUF594
LLTLPTFISSKAIAYLGRSLGNLFSRKGLYFVKLPDKLKPQIVCMLKSSSDGHLTNGKASLQRNGVLQQFSWTLQNESQTESMLIWHIATDYCRISLYDDTEKCMGSPQVRSRQLPSYDNREVATKLSCYCAYLMSNAPELLPGNSIDTRFVFDETMYKAREALXSRLETETWTLSSRGPCPSPEXDNSIFTKGLKLGTELESIEDRSLCWKVMAEFWVENILYIAPSDNAKAHIERLAQGGEFLTHP

SEQ ID NO: 81206 - protein, 112 aa, Setaria italica
  Transcript Sequence Number=SeqID_15232
TLPPSPANRRRRFLADAGVSVLFSRAEPQAPQYSGEDPSVEPAAPAARRAAESGWGLHETCEPAVAATALLVMLLSSVLRGRVRNFRRPRPLTMPTPLFLSRNPNPSPGRDL

SEQ ID NO: 81207 - protein, 185 aa, Setaria italica
  Transcript Sequence Number=SeqID_15233
  Gene Ontology: Mol. function=nucleotidyltransferase activity; Cellular component=membrane; Biological process=metabolic process
  Homolog annotation: Hit_ID=B6T4C2; Match level="QueryCoverage=87%, HitCoverage=72%, E-value=2e-38, Identity=53%"; Hit description=CBS domain containing protein
  Pfam annotation: Domain name=CBS; Domain location=65-180; Score =118.6; E_value=2e-32; Accession=PF00571.20; Description=CBS domain
RAAGGKARRGAALVAAAAMDDLRPAIVSGEWPENFSHLSYADLRAYLESQITTAGEMSPEARLVDVMSRPVQVATPGQRLAEVDAFFATQQFSGLPVVDDEEGRCVGVVSKKDKAKAPNGMESTVGEVMSSPAITLTLERTVLEAAALMLKEKVHRIPVVNEQQHVIGIVTRTDVFQALEANNGA

SEQ ID NO: 81208 - protein, 64 aa, Setaria italica
  Transcript Sequence Number=SeqID_15234
  Subcellular localization annotation: CTP_CleavageSite=30; ConfidenceScore=5.24e-01
FSSAPFVQIASIDYHKPTKPRVRHTRPWSSCAKSSNRGNFHPTSKLRAVIINHYRWFRKHYVVD

SEQ ID NO: 81209 - protein, 222 aa, Setaria italica
  Transcript Sequence Number=SeqID_15235
MMMGTQLCPSSVLSLPRDESGDEELSVLPRHTKVIVTGNNRTKSVLVGLQGVVKKAVGLGGWHWLVLKNGVEVKLQRNALSILEAPTGNEDDNDINGNNSLCSSSDMGEKDMDYSSIDYHKPTKPRVRHTRPWSSCAKSSNRGNFHPTSKLRAKVNLTKLGTPSLWRYWKHFNLASMNPSPSKEELFHGAQQHFQSQQLDELQVILGFIHTAKRLKSLYNSS

SEQ ID NO: 81210 - protein, 335 aa, Setaria italica
  Transcript Sequence Number=SeqID_15236
  Gene Ontology: Mol. function=acyltransferase activity; Cellular component=endoplasmic reticulum membrane; Biological process =metabolic process
  Homolog annotation: Hit_ID=B6TLY9; Match level="QueryCoverage=100%, HitCoverage=100%, E-value=1e-178, Identity=92%"; Hit description =Diacylglycerol O-acyltransferase 1
  Pfam annotation: Domain name=DAGAT; Domain location=59-335; Score =293.6; E_value=4.4e-85; Accession=PF03982.5; Description =Diacylglycerol acyltransferase
MGAGTTTNGLPNGAAAKGERAGDGTAVFRGTAYAPLRTTVALALWLGAIHFNVFLVLASLFLFPRRVAALVLATQLFFMFVPVNDKSRLGRKIARFISRYVIGYFPVTLHLEDYDAFDPSRAYVFGYEPHSVLPIAVGILGDLVGFMPLPKMKILASSAVFYTPFLRQIWTWLGLAPASRKSFYSCLGAGYSCIIVPGGVQEILHMDHDSEVAFLKSRKGFVKIAIEMGCPVVPVFAFGQSYVYKWWRPSGKLIVKIARAIKFSPIIFWGKLGTPIPFATPMHVVVGRPIEVVKNPQPTTDEINEVHKQFVAAMQELFEKYKARTGYPDLQLRVL

SEQ ID NO: 81211 - protein, 158 aa, Setaria italica
  Transcript Sequence Number=SeqID_15237
  Subcellular localization annotation: CTP_CleavageSite=22; ConfidenceScore=5.39e-01
IYFFWCVAAFALFRLNGSGRVVSSRLSGRALSCPAASIPSSFGQPPIPAPLPGPRAGLYLYIYIQLPQRNSLEISSVVVQHRQTFRGAAGEARSRTNSKKNAGEQDLRGRSGRAVPPRHRQGRRRRVHLHAHLRIRRLRLRHGLQQAHRWRRHHSFWP

SEQ ID NO: 81212 - protein, 86 aa, Setaria italica
  Transcript Sequence Number=SeqID_15238
  Gene Ontology: Mol. function=substrate-specific transmembrane transporter activity; Cellular component=integral to membrane; Biological process=transmembrane transport
  Homolog annotation: Hit_ID=B6SZ76; Match level="QueryCoverage=100%, HitCoverage=23%, E-value=5e-39, Identity=97%"; Hit description =Hexose carrier protein HEX6
ASMLAVDRFGRRTLFLAGGAQMLASQVLIGAIMAAELRDAGGVGKGWAGVLILLIAVYVAGFGWSWGPLGWLVPSEIFPLEVRAAG

SEQ ID NO: 81213 - protein, 237 aa, Setaria italica
  misc_feature (73)..(73): Xaa can be any naturally occurring amino acid
  misc_feature (187)..(187): Xaa can be any naturally occurring amino acid
  Transcript Sequence Number=SeqID_15239
  Gene Ontology: Mol. function=transferase activity, transferring glycosyl groups; Biological process=metabolic process
  Homolog annotation: Hit_ID=B9SIN1; Match level="QueryCoverage=85%, HitCoverage=35%, E-value=5e-21, Identity=33%"; Hit description=UDP -glucuronosyltransferase, putative
MSATAPPDAASVEKRKPAAHAVFFPVPAQGHVKAALHLAKLVHERGGVRVTFVHSDRNRRRVLRSRGPDALAXAPGFAFASVPDGLPPPSGEGGDDGDTPQYMVALHSSLETSAGSHLKKLLDDAAAAGAPATCVVSDVESVLRAAGEVGVPAVAFWTPSACGLMASQQCQQLIDKGFVPLKGMIKXCYFQSIQMSINRLSVIINLLYADAAQLSNGYLDSTVIDWVPGMPADMRLP

SEQ ID NO: 81214 - protein, 268 aa, Setaria italica
  Transcript Sequence Number=SeqID_15240
  Gene Ontology: Mol. function=transferase activity, transferring glycosyl groups; Biological process=metabolic process
  Homolog annotation: Hit_ID=B6SXW3; Match level="QueryCoverage=100%, HitCoverage=53%, E-value=1e-71, Identity=50%"; Hit description =Cytokinin-O-glucosyltransferase 2
DKGFVPLKDAAQLSNGYLDSTVIDWVPGMPADMRLRDFPSFFRTTDADDAMLRRVLDLADCVRTVASAVVLNTFDELEGEVVEAMSAFLPPIYAVGPVPLLAQQVVVAGGGAPPLDAPPAASLTKEDDGCLAWLGTKRLRSVVYANFGSIAVLTTQQIEEFAWGLANSGYEFLMVIRDDQANGASGGGITPKFVEETKGRCYVTRWCPQAAVLRHEAVGAFLTHCGWNSMLESICSGVPMLCWPFGADQQTNCRFACMEWRVGVEVGS

SEQ ID NO: 81215 - protein, 67 aa, Setaria italica
  Transcript Sequence Number=SeqID_15241
MDDAAGEEEASMFETSHVLGALLASSPLLARAWDRCAAATAAASGLVHGEDGGTVYVGFSGVQAALS

SEQ ID NO: 81216 - protein, 94 aa, Setaria italica
  Transcript Sequence Number=SeqID_15242
FFFFFLLTNHSARPPFPILSAKNGHIMLDDIVQYTVKDYDYRLFIHTWYNLLTDQKNHLSLLQDLLLNKCVVLISVTRLPQQSSGVVCCATCHT

SEQ ID NO: 81217 - protein, 198 aa, Setaria italica
  Transcript Sequence Number=SeqID_15243
  Pfam annotation: Domain name=Tim17; Domain location=5-154; Score= -23.8; E_value=0.028; Accession=PF02466.11; Description =Tim17Tim22Tim23 family
  Subcellular localization annotation: CTP_CleavageSite=37; ConfidenceScore=5.07e-01
SGGSTSKPSAVGTVNWGTATLVGVFAGLLYGGSKEASASVSKDAEVMLKMGSTPDKREQYRLMRDAMEKRFIRVAKGSLVGGARLGMFTATFFGIQNLLIDTRGVHDVFNIAGAGSATAAAFGLILPGSVMWRARNVLVGSALGAGICFPLGWIQLKLAEKANLEIANSKPSSDLAEGKGNQSRVGAAIERLEGSLKK

SEQ ID NO: 81218 - protein, 417 aa, Setaria italica
  Transcript Sequence Number=SeqID_15244
  Gene Ontology: Cellular component=plasma membrane
QETLAAGDEFSSNIAPATTVATGDEPPPEEAPPVEKDPFAASDLINNKPEEALVGGFKKNKETALVVADPAAALAGLEVTTLPPAEATKPTFIGVEGFEGDYGGIEFGNEEASLAEAFEGFNAPFGGGLDASEFVTTTKKDHKDRAVTGLELLATSGQPPNAAGGTPLENLLVTKRTEMTAPELFIAEEINAEFKESILVRVGLKGTIFLRTLPLNKAAGKETEFSFRLEGTSGMKRAALQSNVLSNLQNGLFHVRTVSKEEPIPLLKYSFLPKHSPLPLRMRLVKRHSGTLLSVMIQYASNPMLPQPLSNVTFIVKLPVDPTLLNVSPKAVLNRAERELRWHISDIPLKGPAGRLRARMPVDQDSKDGELEVLGMVKFAYQGPFTLSGIKLRPATDGIAQFNEVGHTFSSGSYLCI

SEQ ID NO: 81219 - protein, 99 aa, Setaria italica
  misc_feature (12)..(12): Xaa can be any naturally occurring amino acid
  Transcript Sequence Number=SeqID_15245
  Gene Ontology: Mol. function=electron carrier activity; Cellular component=endoplasmic reticulum membrane; Biological process =oxidation reduction
  Homolog annotation: Hit_ID=Q2MJ03; Match level="QueryCoverage=83%, HitCoverage=16%, E-value=8e-33, Identity=68%"; Hit description =Cytochrome P450 monooxygenase CYP94C9
PGRGARVGGDDXRLTASTFSKLKDMHYVHAALYESMRLFPPVQFDSKFAAGDDKLPDGTAVAKGTRVTYHAYAMGRMESVWGPDCGEFRPERWLRNGRF

SEQ ID NO: 81220 - protein, 139 aa, Setaria italica
  misc_feature (115)..(115): Xaa can be any naturally occurring amino acid
  Transcript Sequence Number=SeqID_15246
  Gene Ontology: Mol. function=electron carrier activity; Cellular component=integral to membrane; Biological process=oxidation reduction
  Homolog annotation: Hit_ID=B2D0N7; Match level="QueryCoverage=99%, HitCoverage=14%, E-value=1e-69, Identity=86%"; Hit description =Respiratory burst oxidase-like protein E
  Pfam annotation: Domain name=FAD_binding_8; Domain location=18-129; Score=159.2; E_value=1.2e-44; Accession=PF08022.4; Description=FAD -binding domain
QLVLYVGERMLRALRSNAYTVKILKVCLLPGNVLTITMSKPYGFRYRSGQYIFLQCPMISPFEWHPFSITSAPGDDYLSVHIRTNGDWTQELKRMFVENYFPPHLNRRASFSELXLPKLLVDGPYGAPAQDFRNYDVLL

SEQ ID NO: 81221 - protein, 203 aa, Setaria italica
  Transcript Sequence Number=SeqID_15247
  Gene Ontology: Mol. function=iron ion binding; Cellular component =integral to membrane; Biological process=transport
  Homolog annotation: Hit_ID=Q6ZGM7; Match level="QueryCoverage=99%, HitCoverage=28%, E-value=2e-65, Identity=59%"; Hit description =Probable metal-nicotianamine transporter YSL7
AFPTFGLEAYKRGFYFDFCMTNVAIGMLCPYMITASLFIGSAVSWGIVTPYLATKAGVWYSADLSPGSLRGIRGYKIFIGVSMILADGLFNFLSIMFCTLCAMYNRRSQPMQGGGVDDDGDTQLPFHNLNAAEQQKAMQSFDDRRRAQVFVRDHIPNSVSILCYILLAVVSTITIPYLYPQIKPHHVTLIYLAAPVFAFCDAY

SEQ ID NO: 81222 - protein, 52 aa, Setaria italica
  misc_feature (49)..(49): Xaa can be any naturally occurring amino acid
  Transcript Sequence Number=SeqID_15248
FINCNYTGQCQILRFVMTCALMLCLNRNEDLLSQGLSLNDDMQRVLAKXDAI

SEQ ID NO: 81223 - protein, 475 aa, Setaria italica
  Transcript Sequence Number=SeqID_15249
  Gene Ontology: Cellular component=intracellular; Biological process =intracellular protein transport
  Homolog annotation: Hit_ID=B6SSW4; Match level="QueryCoverage=100%, HitCoverage=74%, E-value=0.0, Identity=69%"; Hit description=VHS and GAT domain protein
  Pfam annotation: Domain name=GAT; Domain location=161-259; Score =98.0; E_value=3.3e-26; Accession=PF03127.6; Description=GAT domain
  Pfam annotation: Domain name=VHS; Domain location=1-119; Score=78.0; E_value=3.4e-20; Accession=PF00790.11; Description=VHS domain
  Pfam module annotation: Pfam domain module=GAT::VHS; Domain location =161-259::1-119
GPDWAMNLEICDILNRDPGQAKDVVKSLQKRIIHKNPKVQLLALTLLETMIKNCGDIVHMHVAERDILHEMVKIVKKRHDYHVKEKILTLIDNWQEVFGGARARYPQYFAAYQELLRTGAVFPQRSNGSVPIITPPQTQPLQNYPPPLSISQQEEPELSIPDFPALSLTEIQNARGIMDILSEMLDALDPCNREGLRQDVIVDLVDQCRSYKQRVVQLVNTTSNEDLLSQGLSLNDDMQRVLAKHDAIAAGIAIQVEKPKYLQSQIESSATRKPDTAKEPVQRSSASTSSTNQSPFEILALPAPPSSSSSKAPVAPAAKIDLLSGDDYFKPEPANSLALVPVTEYSASDQNVLAFADMFEQNTTNKSNHNLPNSFNSSTPNSTSNAIVPYDQQPELNSTGSWNGQPAYGTGHQKQALYYGTDNRNGGIPPAPSEIKRSTNPFDDDRPVGPALQPGQSASIHPQPVHVSQQGNGFM

SEQ ID NO: 81224 - protein, 112 aa, Setaria italica
  Transcript Sequence Number=SeqID_15250
  Gene Ontology: Mol. function=fructose-bisphosphate aldolase activity; Cellular component=chloroplast; Biological process=metabolic process
  Homolog annotation: Hit_ID=Q40677; Match level="QueryCoverage=97%, HitCoverage=28%, E-value=8e-52, Identity=92%"; Hit description =Fructose-bisphosphate aldolase, chloroplastic
  Subcellular localization annotation: CTP_CleavageSite=38; ConfidenceScore=5.24e-01
MALSATLLKSSFLPKTAEWGTTRQAAAPKPVTVSMVVRASAYADELVQTAKTIASPGRGILAMDESNATCGKRLDSIGLENTEANRQAYRTLLVSAPGLGQYISGAILFEET

SEQ ID NO: 81225 - protein, 257 aa, Setaria italica
  misc_feature (41)..(41): Xaa can be any naturally occurring amino acid
  misc_feature (145)..(145): Xaa can be any naturally occurring amino acid
  misc_feature (248)..(248): Xaa can be any naturally occurring amino acid
  Transcript Sequence Number=SeqID_15251
  Gene Ontology: Mol. function=fructose-bisphosphate aldolase activity; Cellular component=chloroplast; Biological process=metabolic process
  Homolog annotation: Hit_ID=Q40677; Match level="QueryCoverage=100%, HitCoverage=65%, E-value=1e-133, Identity=91%"; Hit description =Fructose-bisphosphate aldolase, chloroplastic
  Pfam annotation: Domain name=Glycolytic; Domain location=1-257; Score= 443.2; E_value=3.9e-130; Accession=PF00274.11; Description=Fructose -bisphosphate aldolase class-I
KVDKGLVPLAGSNNESWCQGLDGLASREAAYYQAGARFAKXRQLLSASPTGPSELAVKEAAWGLARYAAISQDNGLVPIVEPEILLDGEHGIERTFEVAQKVWAETFYYLAENNVIFEGILLKPSMVTPGAECKDRATPQQVADXYTLLSLPSVRRIPPAVPGIMFLSGGQSEVEATQNLNAMNQSPNPWHVSFSYARALQNTCLKTWGGRPENVKAAQDALLLRAKANSLAQLGKYTSDGEAAEAKXGMFVKNYVY

SEQ ID NO: 81226 - protein, 1190 aa, Setaria italica
  misc_feature (47)..(47): Xaa can be any naturally occurring amino acid
  Transcript Sequence Number=SeqID_15252
  Gene Ontology: Mol. function=nucleotide binding; Cellular component =nucleus; Biological process=ribosome biogenesis
  Homolog annotation: Hit_ID=Q9M9Y0; Match level="QueryCoverage=89%, HitCoverage=89%, E-value=1e-179, Identity=60%"; Hit description =F4H5.19 protein
  Pfam annotation: Domain name=AARP2CN; Domain location=235-321; Score =146.8; E_value=6.8e-41; Accession=PF08142.4; Description=AARP2CN (NUC121) domain
  Pfam annotation: Domain name=DUF663; Domain location=707-1026; Score =320.8; E_value=2.9e-93; Accession=PF04950.4; Description=Protein of unknown function (DUF663)
  Pfam annotation: Domain name=GTP_EFTU; Domain location=84-654; Score=- 67.0; E_value=0.00036; Accession=PF00009.19; Description=Elongation factor Tu GTP binding domain
  Pfam annotation: Domain name=MMR_HSR1; Domain location=87-191; Score=- 14.6; E_value=0.022; Accession=PF01926.15; Description=GTPase of unknown function
  Pfam module annotation: Pfam domain module=AARP2CN::DUF663::GTP _EFTU::MMR_HSR1; Domain location=235-321::707-1026::84-654::87-191
MAPADGGGEQPHKAHRQHKSGAKARKKKGKGKGAAGDDAGGEQKNPXALHFSQQQRPKRLQARSAEIEQRRLHVPVMDRSIGEPPPFVVVVQGPPQVGKSLLIKCLVKHYTKQNLSEVHGPITVVSGKSRRVQFLECPNDINGMIDAAKIADLALLLIDGSYGFEMDTFEFLNIMQVHGFPKVMGVLTHLDKFKDVKKLRKTKQRLKHRFWAEIKEGAKLFYLSGLIHGKYTKREVHNLARFISVIKPVPLSWRMAHPYLLVDRFEDVTPPEIVRLDKKCDRKITLYGYLRGCNMKRGTKVHITGAGDFSLSGVTGLADPCPLPSAAKKRGLRDKEKLFYAPMSGLGDLLYDKDAVYININDHFVQFSKNDDNDIPKKQGKGKDIGADLVRSLQETRYSLNEKLEKGSINLFGRGPSAQFKDSDVDGNAISASQDDQGDAKQVDGVNIANADTMDSNGHSECSSDSEGDDDDDDKLRDRDVELREKLEICNGRLRRKAVSSNFQDDIDDEGTDEDDSDNEDSGDDELSEGSAASDDSGEASASDDETGNNSKWKESLLARTLSRRSASLMQRVYEQPSTKLDGVLSEENNDSEANSSDEEFFVPKGQNKVQQTNNDLPTFDDIDAEDCSKFFKAELRDWSNEDLINAIRDRFVTGNWSKAALRGQELNENGEDDEEIYGDFEDLETGQVHRIQASENSEGNSGGHKEDDLEVEERKLKKLALRAKFDAQYNGSELSGDEADDDKKNSKREQSNAGGYFDKLKEEMEIRKQMNISELNDLDEDTRVEIEGFRTGTYVRLEVHGVPFELVEHFDPCHPILVGGIGLGEENTGYMQASLKRHRWHRKVLKTKDPIIVSIGWRRFQTTPIYAIEDRNGRHRMLKYTPEHMHCFAMFWGPLAPPKSGVLAVQNLSNNQVPFRITATGWVQEFNNTARIVKKIKLTGTPCKIFKKTALIKGMFTSDLEVARFEGAAIRTVSGIRGQVKKAAKIEPGDVLKRKGENTEGIARCTFEDRILMSDIVFLRAWVNVEVPTYCNLVTTALQPRKETWQGMRTTAELRRAHNIPIPHNKDSVYKPIERKPRKFNPVEIPAKLQQLLPFKSKPKDRPKQKQPTVEKRVPIILEPSARKTQEAIRQLMLLKQEKAKKKKIKEQQKKKAYEKEKAKTEQLTKKRQREERRERYREEDKQKKRARR

SEQ ID NO: 81227 - protein, 366 aa, Setaria italica
  misc_feature (239)..(239): Xaa can be any naturally occurring amino acid
  misc_feature (252)..(252): Xaa can be any naturally occurring amino acid
  misc_feature (320)..(320): Xaa can be any naturally occurring amino acid
  Transcript Sequence Number=SeqID_15253
  Gene Ontology: Mol. function=fructose-bisphosphate aldolase activity; Cellular component=chloroplast; Biological process=metabolic process
  Homolog annotation: Hit_ID=Q53P96; Match level="QueryCoverage=99%, HitCoverage=99%, E-value=0.0, Identity=92%"; Hit description =Fructose-bisphosphate aldolase
  Pfam annotation: Domain name=Glycolytic; Domain location=45-366; Score=722.3; E_value=3.7e-214; Accession=PF00274.11; Description =Fructose-bisphosphate aldolase class-I
  Subcellular localization annotation: CTP_CleavageSite=38; ConfidenceScore=5.19e-01
MALSATLLKSSFLPKTAEWGTTRQAAAPKPVTVSMVVRASAYADELVQTAKKPIASPGRGILAMDESNATCGKRLDSIGLENTEANRQAYRTLLVSAPGLGQYISGAILFEETLYQSTVDGKKITDVLVEQNIVPGIKVDKGLVPLAGSNNESWCQGLDGLASREAAYYQAGARFAKWRTVISIPNGPSELAPEILLDGEHGIERTFEVAQKVWAETFYYLAENNVIFEGILLKPSMVXTPGAECKDRATPXQVADYTLKLLRRRIPPAVPGIMFLSGGQSEVEATQNLNAMNQSPNPWHVSFSYARALQNTCLKTWGGXPENVKAAQDALLLRAKANSLAQLGKYTSDGEAAEAKEGMFVKNYVY

SEQ ID NO: 81228 - protein, 96 aa, Setaria italica
  Transcript Sequence Number=SeqID_15254
SGNNNSDDSHLGNHFLNNNLRQGVQASLPQCLFAAGDPSVETYELCGNNSCELIKVELLKTFGECTFHYDVSTKDQDGNLVSSTSMSICLAPLVLW

SEQ ID NO: 81229 - protein, 94 aa, Setaria italica
  Transcript Sequence Number=SeqID_15255
PEIQQMVRSLSVENESLREEMRALQRACRVLSKENDKLETRLGQSDLQNEIISKDPKGKEQIDRHSVMQSTRDIFVLPDLNLPPQDNANVSTVH

SEQ ID NO: 81230 - protein, 343 aa, Setaria italica
  Transcript Sequence Number=SeqID_15256
  Gene Ontology: Mol. function=acyltransferase activity; Cellular component=chloroplast envelope; Biological process=metabolic process
  Homolog annotation: Hit_ID=B6U9U3; Match level="QueryCoverage=94%, HitCoverage=71%, E-value=1e-134, Identity=73%"; Hit description =Dihydrolipoyllysine-residue acetyltransferase component of pyruvatedehydrogenase complex
  Pfam annotation: Domain name=2-oxoacid_dh; Domain location=119-343; Score=272.6; E_value=9e-79; Accession=PF00198.15; Description=2 -oxoacid dehydrogenases acyltransferase (catalytic domain)
  Pfam annotation: Domain name=E3_binding; Domain location=48-86; Score= 60.1; E_value=8.3e-15; Accession=PF02817.9; Description=e3 binding domain
  Pfam module annotation: Pfam domain module=2-oxoacid_dh::E3_binding; Domain location=119-343::48-86
PKEGRLRRIKTQARAQALSQGQSHEPPPPHAAAAPPPPPPAPVVAPATKGVASPYAKKIAKQHRVDIAGVVGTGPHGRVTAADVEAATGIKPKPKVAPPPPPRPAAVRPAPPGAVLPPVPGGKVVPFTTMQAAVSRNMVDSMSVPTFRVGYSMITNKLDALYEKVKSKGVTKTVLLVKAAAMALTQHPVVNASCRDGKSFSYNSNINIGVAVAIEGGLLTPVLEDVDKLDIYLLAQKWRVLLKKARTKQLQPNEYNSGTFTLSNLGMFGVDRFDAILPAGQGAIMAVGASKPTVVVDKDGFFSIKNEMLVNVTADHRIIYGADLASFLQTFAKIVEDPESLTL

SEQ ID NO: 81231 - protein, 45 aa, Setaria italica
  Transcript Sequence Number=SeqID_15257
  Gene Ontology: Mol. function=ATP-dependent helicase activity; Cellular component=intracellular; Biological process=RNA processing
  Homolog annotation: Hit_ID=Q10HL3; Match level="QueryCoverage=100%, HitCoverage=3%, E-value=1e-11, Identity=64%"; Hit description =Endoribonuclease Dicer homolog 2a
IDWCGIKFSTSSVYDATTDKDMRHCHSCKDVDLLQMMDGPCCSCI

SEQ ID NO: 81232 - protein, 168 aa, Setaria italica
  Transcript Sequence Number=SeqID_15258
  Gene Ontology: Mol. function=ATP-dependent helicase activity; Cellular component=intracellular; Biological process=RNA processing
  Homolog annotation: Hit_ID=Q10HL3; Match level="QueryCoverage=100%, HitCoverage=14%, E-value=5e-45, Identity=49%"; Hit description =Endoribonuclease Dicer homolog 2a
FSTSSVYDATTDNDMRHCHSCFPDINVNDQLHLRDRSVASSKRYGLCLTSESNPLLFASGMFTVQNFLHKCYGKWKEPSGRNAVKLPPELCRVVMAPVSTNTLCSFSSVPSIMHRIQCLLLSVKLKIQLGPRMQQFNITAMKILEALTTKECQEEFSLESLETLGDSF

SEQ ID NO: 81233 - protein, 87 aa, Setaria italica
  Transcript Sequence Number=SeqID_15259
  Gene Ontology: Mol. function=ATP-dependent helicase activity; Cellular component=intracellular; Biological process=RNA processing
  Homolog annotation: Hit_ID=Q69LX2; Match level="QueryCoverage=78%, HitCoverage=4%, E-value=3e-19, Identity=64%"; Hit description =Endoribonuclease Dicer homolog 2b
  Subcellular localization annotation: CTP_CleavageSite=71; ConfidenceScore=5.15e-01
LDHPFLASEPSGRNAVKLPPELCRVVMAPVSTNTLCSFSSVPSIMHRIQCLLLSVKLKIQLGPRMQQFNITAMKVLFPQQSSILLHY

SEQ ID NO: 81234 - protein, 164 aa, Setaria italica
  Transcript Sequence Number=SeqID_15260
  Gene Ontology: Mol. function=amino acid transmembrane transporter activity; Cellular component=integral to membrane; Biological process=amino acid transport
  Homolog annotation: Hit_ID=B6TZ59; Match level="QueryCoverage=100%, HitCoverage=32%, E-value=1e-45, Identity=61%"; Hit description =Cationic amino acid transporter
  Subcellular localization annotation: CTP_CleavageSite=16; ConfidenceScore=5.15e-01
GAYQLLGMADLGLLPSAFARRAALFRTPWVAIAASSAVTLGVSFLGFDDVVATANFLYSLGTLLEFAAFLWLRARLPELKRPYRVPLPLPALAAMCAVPSAFLVYVCVVAGWRVFSLAGALTALGVGLHGAMILCKSKKWLRFHTAAVAADEDPQGDPAAGHTV

SEQ ID NO: 81235 - protein, 364 aa, Setaria italica
  Transcript Sequence Number=SeqID_15261
  Gene Ontology: Mol. function=binding; Cellular component=condensed chromosome kinetochore; Biological process=cell division
  Homolog annotation: Hit_ID=Q6K6B1; Match level="QueryCoverage=99%, HitCoverage=30%, E-value=1e-117, Identity=61%"; Hit description=CLIP- associating protein-like
  Pfam annotation: Domain name=HEAT; Domain location=174-210; Score =18.1; E_value=0.038; Accession=PF02985.14; Description=HEAT repeat
  Pfam annotation: Domain name=HEAT; Domain location=215-251; Score =7.4; E_value=6.1; Accession=PF02985.14; Description=HEAT repeat
  Pfam annotation: Domain name=HEAT; Domain location=292-328; Score =15.2; E_value=0.27; Accession=PF02985.14; Description=HEAT repeat
  Pfam module annotation: Pfam domain module=HEAT::HEAT::HEAT; Domain location=174-210::215-251::292-328
  Subcellular localization annotation: CTP_CleavageSite=76; ConfidenceScore=5.16e-01
SPLHPAYRSAKSPLRHTYQYAKSPIHPTYRSAKSPMHPAHQSNSVKTDDCFSSALQCLPNISLEAQECCTERIEFESSNESYDHKAEMMDKKSSTMRPRNSLPRRIDFSVISDNIVQSARRDSQTMKMFDEPNASELSINIRNHEVTGNGCQDHKDTVRQPEEVSEMNGHCVPTKNLHQMSSSLLEMLDDPDVPTRELALSLLVEILEKHRKAMESCVEILIVKLLHATKDAALKVVNQAHICLTTVVTQFDPLRCLGAISSQLACQDEKILIISINSLSKLVIRLSQENLMAHLSTFLPALLDAFENHSPYVRKAVMVCVVDTYLKLGPSLLPYLEGLDSAQLQLVTTYASRLSQPRFIAADG

SEQ ID NO: 81236 - protein, 70 aa, Setaria italica
  Transcript Sequence Number=SeqID_15262
LCHASEQQQAPPSSDLAWVSLDLELSVASLSFLVTNLLPTLGGQEEGERGQGTNNGAAGKVAVVSSWGLR

SEQ ID NO: 81237 - protein, 69 aa, Setaria italica
  Transcript Sequence Number=SeqID_15263
  Subcellular localization annotation: CTP_CleavageSite=58; ConfidenceScore=5.04e-01
RGAKCSIRSWLSGLCSLLPTSIQQSQFPDNGGTSQNGMPKTHKFVSNSILVHNYFQMRKNQKSAYSFFL

SEQ ID NO: 81238 - protein, 186 aa, Setaria italica
  Transcript Sequence Number=SeqID_15264
  Gene Ontology: Mol. function=zinc ion binding; Cellular component =intracellular
  Homolog annotation: Hit_ID=B0ZYZ0; Match level="QueryCoverage=58%, HitCoverage=56%, E-value=2e-34, Identity=68%"; Hit description=C2H2 zinc finger protein
  Pfam annotation: Domain name=zf-C2H2; Domain location=121-143; Score =18.6; E_value=0.025; Accession=PF00096.18; Description=Zinc finger, C2H2 type
  Pfam annotation: Domain name=zf-C2H2; Domain location=60-82; Score =20.5; E_value=0.0068; Accession=PF00096.18; Description=Zinc finger, C2H2 type
  Pfam module annotation: Pfam domain module=zf-C2H2::zf-C2H2; Domain location=121-143::60-82
  Subcellular localization annotation: CTP_CleavageSite=52; ConfidenceScore=5.30e-01
MKHPRDQQEEVSLALSLSTTDSSTTTSDSATAGSPASAAASNKRARRRGPVVATSGEGEFVCKTCGRAFTSFQALGGHRTSHLRGRHGLELGVGAKALKQHKAADAAGKGAGDKQEQRPQHECHICGLGFEMGQALGGHMRRHREEMGAAEAADAWVWRSVERLPEELELRRAAAAEPPVLLELFA

SEQ ID NO: 81239 - protein, 49 aa, Setaria italica
  Transcript Sequence Number=SeqID_15265
LLSSIQQSVPFSLVPYFILKGALGPKWPMYCIVHTDNGVYNINTSKIRP

SEQ ID NO: 81240 - protein, 251 aa, Setaria italica
  Transcript Sequence Number=SeqID_15266
  Gene Ontology: Mol. function=zinc ion binding; Cellular component =intracellular; Biological process=regulation of transcription, DNA -dependent
  Homolog annotation: Hit_ID=Q94F81; Match level="QueryCoverage=35%, HitCoverage=30%, E-value=2e-19, Identity=52%"; Hit description =Histone deacetylase 2b
  Pfam annotation: Domain name=zf-C2H2; Domain location=226-249; Score =18.4; E_value=0.03; Accession=PF00096.18; Description=Zinc finger, C2H2 type
VAIQVDDKKLVLGTLSVDKHPQIMCDLIFEDDFEISHSSKTASVFLCGYKSPIPIFEPDSGDDEISSDEELETEDIPIKNDEIKKSGANVPVKNVKNVKQDDDEETSSGDDGFTDDSDDSEMSEDSDEETSSGADLTGDSEDETDDSEEQTPTPKKPEVVGKKRATEAVASSGKKAKVEPSGDKKGVHVSTPHPAKQASKTPAEKSGKTPATDKKSKDKSPKSGSHACKSCSKTFGSDKALESHKKAKHEA

SEQ ID NO: 81241 - protein, 61 aa, Setaria italica
  Transcript Sequence Number=SeqID_15267
  Gene Ontology: Cellular component=membrane
  Homolog annotation: Hit_ID=B6TVP8; Match level="QueryCoverage=93%, HitCoverage=26%, E-value=4e-25, Identity=94%"; Hit description =Stromal cell-derived factor 2
KREYKKIRLRHVDTGGYLHSHNKKYNRLGGGQQEVCGVREKRAENIWLAAEGVYLPVNGSK

SEQ ID NO: 81242 - protein, 56 aa, Setaria italica
  Transcript Sequence Number=SeqID_15268
LLPERAWPARVRSRSCLPHASCPISRIQFAARIAPCASWSIAVGLVSYACSLHITT

SEQ ID NO: 81243 - protein, 115 aa, Setaria italica
  Transcript Sequence Number=SeqID_15269
  Gene Ontology: Mol. function=transferase activity, transferring groups other than amino-acyl groups
  Homolog annotation: Hit_ID=B6SSX1; Match level="QueryCoverage=74%, HitCoverage=18%, E-value=2e-28, Identity=80%"; Hit description =Anthocyanin 5-aromatic acyltransferase
VLSRSFRRIRSSFRSRALDDGVLAGAGGWFHKILSLVPERPMSVGGSPRYGVYETDFGLGRPIKVELVSIDKTPGTVSLAEGRDKLAGIEIGVVLPEADMARFSSCFADGLEQLL

SEQ ID NO: 81244 - protein, 248 aa, Setaria italica
  Transcript Sequence Number=SeqID_15270
  Gene Ontology: Mol. function=DNA-directed RNA polymerase activity; Cellular component=chloroplast; Biological process=transcription, DNA-dependent
  Homolog annotation: Hit_ID=A1E9R5; Match level="QueryCoverage=97%, HitCoverage=35%, E-value=1e-129, Identity=92%"; Hit description=DNA -directed RNA polymerase subunit beta'
  Pfam annotation: Domain name=RNA_pol_Rpb1_1; Domain location=1-248; Score=-77.9; E_value=3.4e-07; Accession=PF04997.4; Description=RNA polymerase Rpb1, domain 1
RKFSACGNSRASVAENEDERFCQKCGVEFVDSRIRRYQMGYIKLACPVTHVWYLKGLPSYIANLLDKPLKKLEGLVYGDFSFARPSAKKPTFLRLRGLFEDEISSCNHSISPFFSTPGFATFRNREIATGAGAIREQLADLDLRIIIENSLVEWKELEDEGYSGDEWEDRKRRIRKVFLIRRMQLAKHFIQTNVEPEWMVLCLLPVLPPELRPIVYRSGDKVVTSDINELYKRVIRRNNNLAYLIKKK

SEQ ID NO: 81245 - protein, 203 aa, Setaria italica
  misc_feature (183)..(183): Xaa can be any naturally occurring amino acid
  Transcript Sequence Number=SeqID_15271
  Gene Ontology: Mol. function=translation initiation factor activity
DFGSSEGEESAPAVGAREEAAAAARVSRDPEPERRRSSSGKEAVRSGNGYAEHGKKRKERVEEAVVDVVSDRWNSGVCDDHLVDKRSKSETFGHADTEKLPDKSRGSGDESKRSSRRAVVVDDRAEEVVSKSDSGKRRSEKEKDLGRRESTGHYKDDRYRDRERDREREKEWERQKERDREKXRRDREREKEREREKERERER

SEQ ID NO: 81246 - protein, 55 aa, Setaria italica
  misc_feature (38)..(38): Xaa can be any naturally occurring amino acid
  Transcript Sequence Number=SeqID_15272
MASASALFATALVMALMLAGSSTSHAARHLADTTPAAXPPPWPGIPAIPKPPVPT

SEQ ID NO: 81247 - protein, 64 aa, Setaria italica
  Transcript Sequence Number=SeqID_15273
  Gene Ontology: Mol. function=DNA photolyase activity; Biological process=DNA repair
  Homolog annotation: Hit_ID=B6ST57; Match level="QueryCoverage=90%, HitCoverage=8%, E-value=2e-28, Identity=98%"; Hit description =Deoxyribodipyrimidine photolyase family protein
DWINFLFDSFGGKILVIQGMKDPLTKSEAFVTMLREHCSKVQIRELNAGHAPHDEVPDEVILTV

SEQ ID NO: 81248 - protein, 118 aa, Setaria italica
  Transcript Sequence Number=SeqID_15274
  Gene Ontology: Mol. function=DNA photolyase activity; Biological process=DNA repair
  Homolog annotation: Hit_ID=B6ST57; Match level="QueryCoverage=91%, HitCoverage=15%, E-value=1e-41, Identity=75%"; Hit description =Deoxyribodipyrimidine photolyase family protein
FFLNTAGSVVPNYSFVPLSEEKQTSWLSKLQAQLLLLFLRSRVEGILKEYYPTRTERVDKPLVDQIIRASYDPGAATVLESVFNFNLSIPLNFLFDSFGGKILVIQGMNCKVFPLFTL

SEQ ID NO: 81249 - protein, 707 aa, Setaria italica
  misc_feature (18)..(18): Xaa can be any naturally occurring amino acid
  misc_feature (44)..(44): Xaa can be any naturally occurring amino acid
  Transcript Sequence Number=SeqID_15275
  Gene Ontology: Mol. function=DNA photolyase activity; Biological process=DNA repair
  Homolog annotation: Hit_ID=B6ST57; Match level="QueryCoverage=96%, HitCoverage=96%, E-value=0.0, Identity=77%"; Hit description =Deoxyribodipyrimidine photolyase family protein
  Pfam annotation: Domain name=Abhydrolase_1; Domain location=469-690; Score=66.1; E_value=1.3e-16; Accession=PF00561.12; Description =alphabeta hydrolase fold
  Pfam annotation: Domain name=DNA_photolyase; Domain location=45-215; Score=23.3; E_value=9.5e-08; Accession=PF00875.10; Description=DNA photolyase
  Pfam module annotation: Pfam domain module=Abhydrolase_1::DNA _photolyase; Domain location=469-690::45-215
MALLALRLGPLLPAPPHXRRGLRNRCQGRIVASNATTPVRDGGXAAAVVWFKHDLRIDDHPGLTAAVAEPRRPVVPLYVFDRRILAGYSDKMLELLLFALKDLKMALKSQESDLLIGLGNAEDVVLKLVNEVQAGLIFTEEEVEYRVRSVLVNVESSLSNGSFSWGSPPKIVAWSAPLYGYKNLKEVSTSHDQFLKTKLPVATPLAAATLPALNLELDTGFLPTLEELKGFLKDSRTPKDNWVPLKNTSARSILKKTLSQRKIKSNTTLSTSNGEDIEDFTMDSGTSGRRIMNSMFASENSLEVRGGTDITLDALAAYLRYLEGTGNASWQELHDKLRLAETRDGASFYTLFGPAIQLGVISRRKAYNDTIQYEKDRNAGFLSPFGYSTPTVKAAVDAICSMEWYWLLASKSQVSVGGNYPIRIWRWKGYLVQYTFVGNEGPAALLVHGFGAFLEHFRDNIDNIADMGQRVWAITLVGFGKSEKPNVNYSELFWSELLRDFIIDVVREPVHLVGNSIGGYICAIAAGLWPSLAKSLVLLNTAGSVVPNYSFVPLSEEKQTSWLSKLQAQLLLLFLRSRVEGILKEYYPTRTERVDKPLVDQIIRASYDPGAATVLESVFNFNLSIPLNFLFDSFGGKILVIQGMKDPLTKSEAFVTMLREHCSKVQIRELNAGHAPHDEVPDEVNTLLFEWMKQIEVKPALEKTKAI

SEQ ID NO: 81250 - protein, 62 aa, Setaria italica
  Transcript Sequence Number=SeqID_15276
FFSFFPVLLFAGFNNEILDIHSQKIAIYATFYLLTLQIVSSASHLGYACHTLNRSDEDWSTS

SEQ ID NO: 81251 - protein, 34 aa, Setaria italica
  Transcript Sequence Number=SeqID_15277
SINIITDKDYLKKIRDTKPHATEKNLRTKLINKN

SEQ ID NO: 81252 - protein, 107 aa, Setaria italica
  Transcript Sequence Number=SeqID_15278
  Gene Ontology: Mol. function=phosphoribosylaminoimidazole carboxylase activity; Cellular component=phosphoribosylaminoimidazole carboxylase complex; Biological process='de novo' IMP biosynthetic process
  Homolog annotation: Hit_ID=Q9AXD0; Match level="QueryCoverage=70%, HitCoverage=12%, E-value=2e-19, Identity=56%"; Hit description =Phosphoribosylaminoimidazole carboxylase (Fragment)
  Subcellular localization annotation: CTP_CleavageSite=15; ConfidenceScore=5.29e-01
PRGSASAPPLSLRARASMQAAAPLPQGQGGPPVHGVSNTVVGVLGGGQLGKMLCQAASQMGIKIVILDPLQDCPASSVCHEHVVGSFNDGDTVREFAKRCGVLTVEI

SEQ ID NO: 81253 - protein, 230 aa, Setaria italica
  Transcript Sequence Number=SeqID_15279
  Gene Ontology: Mol. function=kinase activity; Cellular component =chloroplast; Biological process=coenzyme A biosynthetic process
  Homolog annotation: Hit_ID=B6T8Y9; Match level="QueryCoverage=100%, HitCoverage=100%, E-value=1e-102, Identity=81%"; Hit description =Dephospho-CoA kinase
  Pfam annotation: Domain name=CoaE; Domain location=2-183; Score =301.4; E_value=1.9e-87; Accession=PF01121.12; Description=Dephospho -CoA kinase
MRLVGLTGGIASGKSTVSNLFKDASVPVVDADVVARNVVQKGTGGWKKIVKAFGEEILLDNGEIDRARLGQIVFSDPSKRQLLNRLLAPHISSGIFWEMAKLWMKGCKVVVLDIPLLFETKMDRWTNPVIVVWVNPETQIERLMSRDGCSEEQAQNRINAQLALDWKKSEADIVIDNSGSLDDTKQQFQEVLRKVSEPLTWKERLRSRDGLISVVMCTAVGVLLAQKNLL

SEQ ID NO: 81254 - protein, 816 aa, Setaria italica
  Transcript Sequence Number=SeqID_15280
  Gene Ontology: Mol. function=zinc ion binding; Cellular component =nucleus; Biological process=regulation of transcription, DNA -dependent
  Homolog annotation: Hit_ID=Q7XTS2; Match level="QueryCoverage=66%, HitCoverage=54%, E-value=6e-82, Identity=33%"; Hit description =OSJNBa0008M17.13 protein
  Pfam annotation: Domain name=FAR1; Domain location=95-183; Score =135.8; E_value=1.3e-37; Accession=PF03101.7; Description=FAR1 family
  Pfam annotation: Domain name=MULE; Domain location=294-390; Score =108.6; E_value=2.2e-29; Accession=PF10551.1; Description=MULE transposase domain
  Pfam annotation: Domain name=SWIM; Domain location=576-612; Score =27.4; E_value=5.9e-05; Accession=PF04434.9; Description=SWIM zinc finger
  Pfam module annotation: Pfam domain module=FAR1::MULE::SWIM; Domain location=95-183::294-390::576-612
MQGTSIAIEIDGEAICLDSVGDDEQEAQENGEMQQIIYGAENGEQVAFDNQEQGREEDPAGNEEDREHTSIIPSCEELTEELRNKVAYSEEEAYRLYCDYGHRMGFSVRKGKQYYFTGTKTIRTKDYYCSKEGLKDDEQLTEANFNKPETRTNCKAMVRFRVDSEGQWRVIQIIPEHNHELVRPEEIHLLRSVRTLSVPKPGVLNAMVNAEIQAMHDSLHINEDGTECHSQLSIRSYTLLEPEDCEALVGYFKRRTNGQGMFYWDVEVDQEGRMTNFFWRDGRSRVDYDSFGDVVMFDASHRTNKYNMICATFIGVNHHRQNVMFGCAFLSDESPTSYEWLFKSFLLSMGGRPPKTIFTGQNESISKAIEDVLPGTRHCLCQRFIEKNLQSHLGTINDSGTFHSMLSKCMRECESEAEFDEAWAMMHHEYNMQEHQWLSDLYQQRHKWCTALHKDAFDGGIESLDRSEGSNDVLSSIDDESTSLATFVHELDKIVGSWRENESLEDIQCNQAAPECTVEHSSVLQHAAEFYTHKIYKSLETDFLDGCGATSYQEVQCDETLYRFEFILQRSGPKVWVVFLNTSTMDLSCSCKKFETMGVLCSHALNALGLKNVDRIPERYILKRWTKYARKGTYPFPVDGFAEQDRSHALVYRNRAMRFVYDLLMKSKSHQNTRKLILDVLESGEKSLESVCELKRLHMHPLGKEKDGSRVEKRKKKSTKQEKHPRNVKQAVLPQPAGSVFVDPPNQDQYYAAEDIASNSSIGRPIFYQGYPATGVSTSQIQGHTNMQTVPQCASQEYSEYAAVQPPSQFGGERNF

SEQ ID NO: 81255 - protein, 91 aa, Setaria italica
  misc_feature (48)..(48): Xaa can be any naturally occurring amino acid
  Transcript Sequence Number=SeqID_15281
  Gene Ontology: Mol. function=actin binding; Cellular component =intracellular
  Homolog annotation: Hit_ID=Q84TB6; Match level="QueryCoverage=84%, HitCoverage=50%, E-value=5e-18, Identity=63%"; Hit description=Actin- depolymerizing factor 3
  Pfam annotation: Domain name=Cofilin_ADF; Domain location=12-90; Score=9.1; E_value=3e-05; Accession=PF00241.12; Description =Cofilintropomyosin-type actin-binding pr
MANAASGVAVADECVARFQELRTGRAHRFVVFKVDDSQQQVVVDKVGXPRDAGFGDLTASLPPDDCRYAVYDHDFTVGEATAAGPGGEAPR

SEQ ID NO: 81256 - protein, 364 aa, Setaria italica
  misc_feature (11)..(11): Xaa can be any naturally occurring amino acid
  misc_feature (33)..(33): Xaa can be any naturally occurring amino acid
  Transcript Sequence Number=SeqID_15282
  Gene Ontology: Cellular component=mitochondrion
  Homolog annotation: Hit_ID=B6T4P4; Match level="QueryCoverage=96%, HitCoverage=89%, E-value=1e-165, Identity=78%"; Hit description =Membrane-associated salt-inducible protein
  Pfam annotation: Domain name=PPR; Domain location=145-179; Score =32.1; E_value=2.3e-06; Accession=PF01535.12; Description=PPR repeat
  Pfam annotation: Domain name=PPR; Domain location=180-214; Score =15.7; E_value=0.13; Accession=PF01535.12; Description=PPR repeat
  Pfam annotation: Domain name=PPR; Domain location=215-249; Score =31.0; E_value=5e-06; Accession=PF01535.12; Description=PPR repeat
  Pfam annotation: Domain name=PPR; Domain location=250-284; Score =42.9; E_value=1.3e-09; Accession=PF01535.12; Description=PPR repeat
  Pfam annotation: Domain name=PPR; Domain location=285-319; Score =10.8; E_value=0.47; Accession=PF01535.12; Description=PPR repeat
  Pfam annotation: Domain name=PPR; Domain location=320-353; Score=2.5; E_value=4.5; Accession=PF01535.12; Description=PPR repeat
  Pfam module annotation: Pfam domain module=PPR::PPR::PPR::PPR::PPR::PP R; Domain location=145-179::180-214::215-249::250-284::285-319::320 -353
  Subcellular localization annotation: CTP_CleavageSite=40; ConfidenceScore=5.47e-01
ILNPSSPNTPXSSLQKTRLAISLLKSSPPPPPXQILSICRAAALSPETHIDRVALSLAASKLSSAPDTLRDLTSTVLTPRHAPHAIVLFGQAGLLPDAISTFQSSPSTRSLNALIFACIVSKNHTEAARIFQTFPDAHGVKPNTETFNTIIKSFAESGTIRSFYSVFDEMCKKGVKPDARTFTTALAGFYNEERFDDVAKVIELMKKHGCGETLPVYNVRVRSLCKLGRSGEAKALVNEMVKKGTKPSWVTYNHLVYGFCKEGDLEEAKRLYKEMGMKGLVGDCNFYYMLIHFLCRGGDFDTALGLYNEIEPKNWVPCFSTMKMLVNGLAGSSKIDEAKGIIEKMKEKFPDNEGWKEVEAALPQ

SEQ ID NO: 81257 - protein, 412 aa, Setaria italica
  Transcript Sequence Number=SeqID_15283
  Gene Ontology: Mol. function=protein binding; Cellular component =nucleus; Biological process=regulation of transcription, DNA -dependent
  Homolog annotation: Hit_ID=Q9FUZ7; Match level="QueryCoverage=88%, HitCoverage=54%, E-value=0.0, Identity=87%"; Hit description=Protein SCARECROW
  Pfam annotation: Domain name=GRAS; Domain location=44-405; Score =660.9; E_value=1.1e-195; Accession=PF03514.6; Description=GRAS family transcription factor
EPKPPTAEETAAAAAAAAAAAAAAAKERKEEQRRKQRDEEGLHLLTLLLQCAEAVNADNLDDAHQTLLEIAELATPFGTSTQRVAAYFAEAMSARLVSSCLGLYAPLPPASPAAARLHGRVAAAFQVFNGISPFVKFSHFTANQAIQEAFEREERVHIIDLDIMQGLQWPGLFHILASRPGGPPRVRLTGLGASMEALQATGKRLSDFADTLGLPFEFCAVAEKAGNVDPEKLGVTRREAVAVHWLHHSLYDVTGSDSNTLWLIQRLAPKVVTMVEQDLSHSGSFLARFVEAIHYYSALFDSLDASYGEDSPERHVVEQQLLSREIRNVLAVGGPARTGDVKFGSWREKLAQSGFRSASLAGSAAAQASLLLGMFPSDGYTLVEENGALKLGWKDLCLLTASAWRPIQTPCR

SEQ ID NO: 81258 - protein, 130 aa, Setaria italica
  Transcript Sequence Number=SeqID_15284
  Gene Ontology: Mol. function=ATP-dependent helicase activity
  Homolog annotation: Hit_ID=Q2R378; Match level="QueryCoverage=89%, HitCoverage=14%, E-value=3e-40, Identity=74%"; Hit description=CarD -like transcriptional regulator family protein, expressed
  Pfam annotation: Domain name=CarD_TRCF; Domain location=62-129; Score= -14.5; E_value=0.026; Accession=PF02559.8; Description=CarD-likeTRCF domain
PAQAEAYLRMIRDQQRLGLSQLRGDRGGGGGEAEADGDEEGETRRKGVAAGSSLGHRVDPRELEPGEYVVHKKVGVGKFACISAEDGVDYVFIQYADAMAKLAVDQAARMLYRYNLLMSFSGLMRRRDRR

SEQ ID NO: 81259 - protein, 111 aa, Setaria italica
  Transcript Sequence Number=SeqID_15285
  Gene Ontology: Mol. function=transferase activity, transferring glycosyl groups
  Homolog annotation: Hit_ID=B6TE34; Match level="QueryCoverage=100%, HitCoverage=31%, E-value=4e-60, Identity=98%"; Hit description =Transferase, transferring glycosyl groups
RWRRAGYTAQIEEWMELQKRVRIYELGSLPPFLLVFAGRIASVDHRWNQHGLGGDNYRGLCRGLHAGAVSLLHWSGKGKPWDRLDAGRPCPLDAVWAKYDLLRPAAGIESS

SEQ ID NO: 81260 - protein, 106 aa, Setaria italica
  Transcript Sequence Number=SeqID_15286
  Gene Ontology: Mol. function=transferase activity
  Homolog annotation: Hit_ID=B6U236; Match level="QueryCoverage=97%, HitCoverage=71%, E-value=1e-44, Identity=89%"; Hit description =Glutamyl-tRNA
  Pfam annotation: Domain name=Glu-tRNAGln; Domain location=27-99; Score=15.5; E_value=0.0038; Accession=PF02686.7; Description=Glu -tRNAGln amidotransferase C subunit
PLPAAAGAGSLEPPDLPRLAKAARISLSPQEAEEFEPKIRQVVDWFGQLQAVDLESIEPSLRAGTAAGSSLREDKPETFVNTDAIVEAIPSYDDPYIKVPRVLNKE

SEQ ID NO: 81261 - protein, 104 aa, Setaria italica
  Transcript Sequence Number=SeqID_15287
TILQGIILPLCHISKNHYLTLVSLQMANIQSDQTISTGGYVGNANLSTSKSITAQCITSTLSFPDSYQFHKLNHSTTFVSRCSSTAYCILALPMFIIPWVIGSD

SEQ ID NO: 81262 - protein, 78 aa, Setaria italica
  Transcript Sequence Number=SeqID_15288
  Gene Ontology: Mol. function=DNA binding
MDGNSENIQFSWGKRRAKGGAKMDTQFYESFTLDNVKYSLYDCVYLFKHGDPEPYIGKIVKIWEQNQAKKVKILWFFL

SEQ ID NO: 81263 - protein, 120 aa, Setaria italica
  Transcript Sequence Number=SeqID_15289
  Gene Ontology: Mol. function=transferase activity, transferring glycosyl groups; Biological process=metabolic process
  Homolog annotation: Hit_ID=Q9AR73; Match level="QueryCoverage=77%, HitCoverage=19%, E-value=4e-15, Identity=43%"; Hit description =Hydroquinone glucosyltransferase
RRPCPRRARRGARPRPAPARGVAAEMGVPFYMFFTSPWMTLSLFLHLPGIDAARAGEHRDATEPIRLPGCVPIHAHELPASMLADRSSDTYAGFLSMAKAVKGVDGILVNTSRDIEPAVG

SEQ ID NO: 81264 - protein, 249 aa, Setaria italica
  Transcript Sequence Number=SeqID_15290
  Gene Ontology: Mol. function=nucleoside-triphosphatase activity; Cellular component=chloroplast; Biological process=DNA metabolic process
  Homolog annotation: Hit_ID=B6T788; Match level="QueryCoverage=98%, HitCoverage=59%, E-value=1e-125, Identity=90%"; Hit description =Protein recA
  Pfam annotation: Domain name=RecA; Domain location=1-228; Score =306.5; E_value=5.7e-89; Accession=PF00154.13; Description=recA bacterial DNA recombination protein
SKALGVDIENLIVCQPDNGEMALEIADRMCRSGAIDLICIDSVSALTPRAEIEGEIGMQQMGLQARLMSQALRKMSGNASKAGCTLMFLNQIRYKIGVFYGNPEVTSGGIALKFFASVRLEIRSTGKIKSAKGDEDVGVKVRVRVQKSKVSRPYKQAEFEIIFGEGVSKLGCVLDCAELMEVVAKKGSWYSYKDMRLGQGREKALQYLRENPTICDEIEKVVRAMIPEGTRHMSLLAFGQSSLTEVFHT

SEQ ID NO: 81265 - protein, 222 aa, Setaria italica
  misc_feature (18)..(18): Xaa can be any naturally occurring amino acid
  Transcript Sequence Number=SeqID_15291
  Gene Ontology: Mol. function=electron carrier activity; Biological process=oxidation reduction
  Homolog annotation: Hit_ID=B6SYA2; Match level="QueryCoverage=100%, HitCoverage=42%, E-value=1e-97, Identity=77%"; Hit description =Cytochrome P450 CYP81A1
  Pfam annotation: Domain name=p450; Domain location=1-209; Score= -97.1; E_value=5.7e-07; Accession=PF00067.14; Description=Cytochrome P450
KTEPDVYTDTFISALVAXNILGAGTETTSTTMEWTMTLLLNHPDVLKKAQEEIDSNVGGDRLLDKNDLPHLPYLHCIINETLRLYPAAPMLLPHEASTDCKIHGYDVPVGSMVLVNAYAIHRDPAIWENPEEFRPERFEHGRAEGKFMMPFGMGRRKCPGENLAMRTMGLVLGVLLQCFDWSRIGDGEVDMATGTGTIMFKAVPLEALCKPRAHMYAVLQKI

SEQ ID NO: 81266 - protein, 80 aa, Setaria italica
  Transcript Sequence Number=SeqID_15292
  Gene Ontology: Mol. function=endonuclease activity
  Homolog annotation: Hit_ID=B9SHH8; Match level="QueryCoverage=91%, HitCoverage=26%, E-value=1e-24, Identity=68%"; Hit description =Endonuclease, putative
  Pfam annotation: Domain name=HNH; Domain location=15-60; Score=51.0; E_value=4.7e-12; Accession=PF01844.15; Description=HNH endonuclease
CSDLIHVIILYRDEFTCQYCSSRDNLTIDHVIPISRGGKWEWENLVTACSRCNSRKGQKTLEQANMKLRKLPRVCDVLPC

SEQ ID NO: 81267 - protein, 80 aa, Setaria italica
  Transcript Sequence Number=SeqID_15293
  Homolog annotation: Hit_ID=Q01IY4; Match level="QueryCoverage=78%, HitCoverage=21%, E-value=2e-15, Identity=66%"; Hit description =OSIGBa0106G07.13 protein
LKEAVQMIREYLKDEPWLTLLCKKLQLDMNEIIKDTTTKTSEASFYADSSPAPACPSESKVANGSAKSSKGRAAKKPKTE

SEQ ID NO: 81268 - protein, 63 aa, Setaria italica
  Transcript Sequence Number=SeqID_15294
  Gene Ontology: Mol. function=binding
  Homolog annotation: Hit_ID=B6SLI0; Match level="QueryCoverage=100%, HitCoverage=27%, E-value=5e-22, Identity=80%"; Hit description=TPR domain containing protein
  Pfam annotation: Domain name=TPR_1; Domain location=10-43; Score =28.4; E_value=3e-05; Accession=PF00515.20; Description =Tetratricopeptide repeat
  Pfam annotation: Domain name=TPR_2; Domain location=10-43; Score =33.1; E_value=1.1e-06; Accession=PF07719.9; Description =Tetratricopeptide repeat
  Pfam module annotation: Pfam domain module=TPR_1::TPR_2; Domain location=10-43::10-43
EAVRLSPENARAHAMLGECYERKGQAAQARDAFKTAASIDPKLTAALDGLRRVDGGDEGNGSD

SEQ ID NO: 81269 - protein, 72 aa, Setaria italica
  Transcript Sequence Number=SeqID_15295
PAGVARYTLTRVNWTGSVAGHPHRYAAAEVTPRLIDELRASNHTHPHMFARKFAPDCLGPLLAIADTVIFKD

SEQ ID NO: 81270 - protein, 98 aa, Setaria italica
  Transcript Sequence Number=SeqID_15296
SPQSKKSLTSAARCHALPPHLTISADLSVRIRFVVVGFVSHLPISIDQSIKAASYWSTESNNSVWMILCRDQSRAQRQGKLWPFLFAVRLHLQSSFRL

SEQ ID NO: 81271 - protein, 168 aa, Setaria italica
  Transcript Sequence Number=SeqID_15297
  Pfam annotation: Domain name=DUF266; Domain location=1-158; Score =73.0; E_value=7.8e-21; Accession=PF03267.6; Description=Arabidopsis protein of unknown function, DUF266
AARHRRLPSYIEVLTGEPQMPSRYAARGEGAMLPEVPYERFRIGSQFFTLARRHAVLVVRERRLWRKFRAPCLPEAAQDECYPEEHYFPTLLDMADPAGVARYTLTRVNWTGSVAGHPHRYAAAEVTPRLIDELRASNHTHPHMFARKFAPDCLGPLLAIADTVIFKD

SEQ ID NO: 81272 - protein, 131 aa, Setaria italica
  Transcript Sequence Number=SeqID_15298
  Gene Ontology: Mol. function=protein tyrosine kinase activity; Cellular component=plasma membrane; Biological process=protein amino acid phosphorylation
  Homolog annotation: Hit_ID=B9R9P2; Match level="QueryCoverage=100%, HitCoverage=20%, E-value=1e-42, Identity=61%"; Hit description =Leucine rich repeat receptor kinase, putative
  Pfam annotation: Domain name=Pkinase_Tyr; Domain location=25-131; Score=-167.2; E_value=0.013; Accession=PF07714.9; Description =Protein tyrosine kinase
TRYFSELNLLGRRGRNKAGGLAATYRGTLRDGTPVAVKRLGKTCCRQEEAEFLRGLKLLAELRHDNVVALRGFCCSRARGECFLVYDFVPNGCLSQFLDVDADDTAGGRVLEWSTRISIIKGIARGIEYLH

SEQ ID NO: 81273 - protein, 39 aa, Setaria italica
  Transcript Sequence Number=SeqID_15299
  Gene Ontology: Mol. function=kinase activity
  Homolog annotation: Hit_ID=Q9AS76; Match level="QueryCoverage=100%, HitCoverage=6%, E-value=7e-11, Identity=79%"; Hit description=Kinase interacting protein 1-like
MKRTRRAQSGKSHSWWWDSHISPQNSKWLAENLEEMEKQ

SEQ ID NO: 81274 - protein, 305 aa, Setaria italica
  Transcript Sequence Number=SeqID_15300
  Gene Ontology: Mol. function=electron carrier activity; Biological process=oxidation reduction
  Homolog annotation: Hit_ID=B6SSB8; Match level="QueryCoverage=99%, HitCoverage=57%, E-value=1e-141, Identity=81%"; Hit description =Transposon protein
  Pfam annotation: Domain name=p450; Domain location=5-301; Score=-8.0; E_value=2.9e-11; Accession=PF00067.14; Description=Cytochrome P450
NATVLAFWPALTRILFRGGLQKGLDARRRQKELFVPLIEARRERKKQLDSPVGGGAAAEAPEKETTFGHSYVDTLLDIRLADEGNRALTDEEMVNLCSEFLTAGTDTTSTALQWIMAELVKNPAIQEKLYGEIKAACGGEQEEVGEEDTHRMPYLKAVVLEGLRRHPPAHFLLAHKAAEDIEVGGYLIPKGATVNFTVAEMGWDEREWDRPREFVPERFLPGGDGEGVDVTGSREIKMIPFGVGRRICAGLGIAMLHLEYFVANLVREFEWKGVPGEEVDLVETREFTTVMKKPLRARLLRRTAG

SEQ ID NO: 81275 - protein, 165 aa, Setaria italica
  Transcript Sequence Number=SeqID_15301
  Gene Ontology: Mol. function=transferase activity
  Homolog annotation: Hit_ID=B6U900; Match level="QueryCoverage=100%, HitCoverage=42%, E-value=2e-77, Identity=85%"; Hit description =Glutathione transferase
  Pfam annotation: Domain name=GST_C; Domain location=50-145; Score =44.1; E_value=5.5e-10; Accession=PF00043.17; Description=Glutathione S-transferase, C-terminal domain
DAERREVVCNESIEIIKYLCGLADADGGGGGLDLWPSELRQDIDRWYGVIYPSVNNGVYRCGFAQSQEAYDAAASELFGALDRLEAHLASSRYLCGDRLTLADVCLFTTLIRFDLVYNTLFRCTRRKLAEYPSLHAYTRDIYQMPRVADTCDMEAIMAGYFKTLF

SEQ ID NO: 81276 - protein, 78 aa, Setaria italica
  Transcript Sequence Number=SeqID_15302
  Gene Ontology: Mol. function=zinc ion binding; Cellular component =intracellular
  Homolog annotation: Hit_ID=B4F826; Match level="QueryCoverage=100%, HitCoverage=19%, E-value=3e-28, Identity=73%"; Hit description =Endonuclease/Exonuclease/phosphatase family protein
SNSYMGRELCTADVIVGGLIKLVWATSHLESPCPGPPNWDQMFSKERVAQANESLRILGAFRNVIFCGDMNWDDKGDG

SEQ ID NO: 81277 - protein, 88 aa, Setaria italica
  Transcript Sequence Number=SeqID_15303
  Subcellular localization annotation: CTP_CleavageSite=13; ConfidenceScore=5.24e-01
PQLKQHGRRSLPHCASVPLLSLSLSLTLGSTSLLPSERIGFFSPSEHANSHEFTEELRSPYKSERNSGACFQPLLVSFFSLHQKKPRN

SEQ ID NO: 81278 - protein, 122 aa, Setaria italica
  misc_feature (106)..(106): Xaa can be any naturally occurring amino acid
  Transcript Sequence Number=SeqID_15304
  Gene Ontology: Mol. function=sucrose-phosphate synthase activity; Cellular component=plasma membrane; Biological process=sucrose metabolic process
  Homolog annotation: Hit_ID=Q6EZE8; Match level="QueryCoverage=100%, HitCoverage=11%, E-value=3e-45, Identity=73%"; Hit description =Sucrose-phosphate synthase
RRRGVSCLGRYMPRMVVIPPGMDFSYVDTGDLAAGDGDGDLQALISPGKAKNPLPPIWSEVLRFFTNPHKPMILALSRPDPKKNVTTLLKAYGESRHLRELANLTXILGNRDDIEEMSGGAA

SEQ ID NO: 81279 - protein, 66 aa, Setaria italica
  Transcript Sequence Number=SeqID_15305
  Gene Ontology: Mol. function=drug transporter activity; Cellular component=membrane; Biological process=multidrug transport
  Homolog annotation: Hit_ID=Q10A00; Match level="QueryCoverage=95%, HitCoverage=14%, E-value=9e-15, Identity=63%"; Hit description=MATE efflux family protein, expressed
MMPSMDEPLLGNGVEKTGGAVLTELRKQLYLAGPLIAAWLLQNLVSMISVMFVGHLGELALSSASI

SEQ ID NO: 81280 - protein, 85 aa, Setaria italica
  Transcript Sequence Number=SeqID_15306
  Gene Ontology: Mol. function=ligase activity; Cellular component =nucleolus; Biological process=regulation of transcription
  Homolog annotation: Hit_ID=B9RVL0; Match level="QueryCoverage=94%, HitCoverage=16%, E-value=1e-24, Identity=63%"; Hit description =Pentatricopeptide repeat-containing protein, putative
LEPDALAHILRTEAAVSGISRKAAAVRQQSTRLWPRAVLEALDSAVAASRWESALEIFELLRKQHWYEPRSQTYARLLMMLGRCR

SEQ ID NO: 81281 - protein, 126 aa, Setaria italica
  Transcript Sequence Number=SeqID_15307
  Gene Ontology: Cellular component=mitochondrion
  Homolog annotation: Hit_ID=B9T6B6; Match level="QueryCoverage=96%, HitCoverage=17%, E-value=6e-28, Identity=47%"; Hit description =Pentatricopeptide repeat-containing protein, putative
LLSGPLIILFCHILCSYSSMDMHREITMLWGEIKRRLEYGELDVDRDLLDCLILNFLKGGYFSRVMEVISYMSKHNIHCDKWKYRHVFLKLHKNLYRNLNSLHDKTEAQNKRIEDVRAFRSWAGIK

SEQ ID NO: 81282 - protein, 38 aa, Setaria italica
  Transcript Sequence Number=SeqID_15308
MMLLAQLATVHRCLLSSMRKLWSSTNVVYVCRCVCINQ

SEQ ID NO: 81283 - protein, 574 aa, Setaria italica
  Transcript Sequence Number=SeqID_15309
  Gene Ontology: Cellular component=exocyst; Biological process =exocytosis
  Homolog annotation: Hit_ID=B6U0J9; Match level="QueryCoverage=97%, HitCoverage=84%, E-value=0.0, Identity=87%"; Hit description=Protein binding protein
  Pfam annotation: Domain name=Exo70; Domain location=211-568; Score =463.3; E_value=3.5e-136; Accession=PF03081.7; Description=Exo70 exocyst complex subunit
VAAAAAVSAAGARPTSMERTVRTLDRQISQFVAMDRLIWADSGDADAFLEAVDDLIGTVQELDAAGTNRALLDRADELLSRCMARLEDEFRALIERPDDAAPVAPGGFGSDGSDDEDDFGGGDGYGDEPIPIAKPVTDYDVVIDALSPGSIANVHQIAKRMVDAGFGRECAEAYAAARRSFVDESVARLGVRPRTAEEVHASPWEELEFDIARWIPAFNMVFRILIPSERRLCDRVFDGLAPFGDLAFIAAVRTQALQLISFGDAICSSSRAPERLFRVVDMYEAVRDILPDLDPVFSDPYSAALRAEVSAMCNTLGSSIKGIFMELENLIRRDPARVAAPGGHIHPITRYVMNYLRAACGSRQTLEEVMEGDLGANGGAPVAVDPDRPTSSLAVHIAWIMDVLHKNLDTKSKVYRDPSLASIFLLNNGKYIIQKVNDSELGVLLGDEWIKQMTTRVRRWSMDYQRTTWGKVTTVLQTGSPGIGGLPAKAMLQKLRMFNTYFDEIFAAQSEWVVADDQLRVDIRAAVEDSVMPVYASLIAKLKSSPETGRDLYIKYTPEVVVDRIHHLFEGAAK

SEQ ID NO: 81284 - protein, 91 aa, Setaria italica
  Transcript Sequence Number=SeqID_15310
  Gene Ontology: Mol. function=catalytic activity; Cellular component =plasma membrane
  Homolog annotation: Hit_ID=B6UBI9; Match level="QueryCoverage=98%, HitCoverage=30%, E-value=4e-38, Identity=84%"; Hit description =Protein phosphatase 2C isoform epsilon
MLSIDHDPNVERSVIENRGGFVSNMPGDVPRVCGQLAVSRAFGDRNLKSLLRSEPDIKVEDIDHTAELLVLASDNLLIVHNLPKLLTLSRR

SEQ ID NO: 81285 - protein, 100 aa, Setaria italica
  Transcript Sequence Number=SeqID_15311
  Gene Ontology: Mol. function=catalytic activity; Cellular component =plasma membrane; Biological process=protein amino acid dephosphorylation
  Homolog annotation: Hit_ID=Q7XQU7; Match level="QueryCoverage=99%, HitCoverage=34%, E-value=9e-40, Identity=79%"; Hit description =Probable protein phosphatase 2C 41
ISGDVPRVCGQLAVSRAFGDRNLKSLLRSEPDIKVENIDHTAELLVLASDGLWKVMNNQEVVDVAKRYKDPYAAARQLTAAALKRESKDDISCIVVRFKA

SEQ ID NO: 81286 - protein, 90 aa, Setaria italica
  Transcript Sequence Number=SeqID_15312
  Subcellular localization annotation: CTP_CleavageSite=54; ConfidenceScore=5.06e-01
RKRMMKYRKPLKADSPLRTQHQSSKTLPYARDSLSKIKEKGRKFRSPPQPPMLPSGHRSTSLTTVLPKSRPFHGISHPILEGRWVRRPEA

SEQ ID NO: 81287 - protein, 294 aa, Setaria italica
  misc_feature (271)..(271): Xaa can be any naturally occurring amino acid
  Transcript Sequence Number=SeqID_15313
  Gene Ontology: Mol. function=catalytic activity; Cellular component =plasma membrane
  Homolog annotation: Hit_ID=B6UBI9; Match level="QueryCoverage=96%, HitCoverage=95%, E-value=1e-142, Identity=86%"; Hit description =Protein phosphatase 2C isoform epsilon
  Pfam annotation: Domain name=PP2C; Domain location=40-279; Score =168.8; E_value=1.6e-47; Accession=PF00481.13; Description=Protein phosphatase 2C
SLALQPYHFPCCSACIQFTGHGSTASGKGKGCHGQVKVCYGYNLVRGKTNHPMEDYHVADFAEVKGNELGLFAIYDGHLGDTVPAYLQKNLFSNILNEEEFWTHTDRAIIKAYEKTDQAILSHTPDLGQGGSTAVTAILVNGRKLWVANVGDSRAVLLKGGEPIQMSIDHDPNVERSVIENRGGFVSNMPGDVPRVCGQLAVSRAFGDRNLKSLLRSEPDIKVEDIDHTAELLVLASDGLWKVMNNQEVVDLAKRFKDPYAAARQLTAAAXKERVKMIYHVLLFGSRRKWIAGD

SEQ ID NO: 81288 - protein, 224 aa, Setaria italica
  Transcript Sequence Number=SeqID_15314
  Gene Ontology: Mol. function=translation initiation factor activity; Cellular component=protein complex; Biological process=translation
  Homolog annotation: Hit_ID=B4FRD9; Match level="QueryCoverage=90%, HitCoverage=70%, E-value=1e-98, Identity=87%"; Hit description =Eukaryotic translation initiation factor 3 subunit 5
  Pfam annotation: Domain name=Mov34; Domain location=16-126; Score =125.0; E_value=2.4e-34; Accession=PF01398.13; Description =Mov34MPNPAD-1 family
  Subcellular localization annotation: CTP_CleavageSite=19; ConfidenceScore=5.20e-01
MATSPALLFPSTSSSSSPSSARVEAVVLFNICDSYVRRPDQADRVIGTLLGSLLPDGTVHVRNSYVVPHSESADQVAIDIEYHHNMYASHQKVNPKEVIVGWFSTGFGVSGGSTLIHDFYSREVQNPIHLTVDTGFTRGEASIKAYISSNLSLGDRHLAAQFQEIPLDLRMIEAEKAGFEILKYTMVEKLPNDLEGMESSMEKLYILIDEIYKYVDDVVEGRVA

SEQ ID NO: 81289 - protein, 183 aa, Setaria italica
  Transcript Sequence Number=SeqID_15315
  Gene Ontology: Mol. function=translation initiation factor activity; Cellular component=protein complex; Biological process=translation
  Homolog annotation: Hit_ID=B4FRD9; Match level="QueryCoverage=95%, HitCoverage=60%, E-value=4e-90, Identity=94%"; Hit description =Eukaryotic translation initiation factor 3 subunit 5
VFLGVCFRGSTLIHDFYSREVQNPIHLTVDTGFTRGEASIKAYISSNLSLGDRHLAAQFQEIPLDLRMIEAEKAGFEILKYTMVEKLPNDLEGMESSMEKLYILIDEIYKYVDDVVEGRVAPDNRIGRFISESVASMPKLSPAAFDKLFNDKIQDNLALVYLSSITRTQISIAEKLNTAAQVL

SEQ ID NO: 81290 - protein, 53 aa, Setaria italica
  Transcript Sequence Number=SeqID_15316
  Gene Ontology: Mol. function=phosphoprotein phosphatase activity; Cellular component=cytoplasm; Biological process=cell division
  Homolog annotation: Hit_ID=B9F783; Match level="QueryCoverage=92%, HitCoverage=12%, E-value=6e-17, Identity=85%"; Hit description =Serine/threonine protein phosphatase
SSFYLLFLRSPPNYCGEFDNAGAMMSVDETLMCSFQILKPAERKNKFMGSNKM

SEQ ID NO: 81291 - protein, 322 aa, Setaria italica
  Transcript Sequence Number=SeqID_15317
  Gene Ontology: Mol. function=phosphoprotein phosphatase activity; Cellular component=cytoplasm; Biological process=carbohydrate metabolic process
  Homolog annotation: Hit_ID=P48489; Match level="QueryCoverage=95%, HitCoverage=95%, E-value=1e-175, Identity=96%"; Hit description =Serine/threonine-protein phosphatase PP1
  Pfam annotation: Domain name=Metallophos; Domain location=68-263; Score=159.8; E_value=8.2e-45; Accession=PF00149.20; Description =Calcineurin-like phosphoesterase
MAAAPAAGGQGGGGMDNALLDDIIRRLLEVRTARPGKQVQLSEAEIRQLCTASRDIFLSQPNLLELEAPIKICGDIHGQYSDLLRLFEYGGFPPEANYLFLGDYVDRGKQSLETICLLLAYKIKYPENFFLLRGNHECASINRIYGFYDECKRRFNVRLWKVFTECFNTLPVAALIDDKILCMHGGLSPDLTHLDEIKNLQRPTDVPDQGLLCDLLWSDPGKDVQGWGMNDRGVSYTFGADKVSEFLEKHDLDLICRAHQVVEDGYEFFADRQLVTIFSAPNYCGEFDNAGAMMSVDETLMCSFQILKPAERKNKFMGSNKM

SEQ ID NO: 81292 - protein, 137 aa, Setaria italica
  Transcript Sequence Number=SeqID_15318
  Gene Ontology: Mol. function=protein serine/threonine phosphatase activity; Cellular component=protein serine/threonine phosphatase complex; Biological process=protein amino acid dephosphorylation
  Homolog annotation: Hit_ID=Q336W3; Match level="QueryCoverage=81%, HitCoverage=33%, E-value=5e-45, Identity=76%"; Hit description =Protein phosphatase 2C containing protein, expressed
RHCASSMRIAAAAASSDYGMDLGTLSLISPTDVRPGFLPVFRSGSCAEIGPKSYMEDEHVCVDNLIEHLGGRAAGIPAPGAFYGVFDGHGGTDAACFVRKNILKFIVEDMHFPNNVEKAIRGAFLKADHALADFPIS

SEQ ID NO: 81293 - protein, 374 aa, Setaria italica
  misc_feature (308)..(308): Xaa can be any naturally occurring amino acid
  misc_feature (326)..(326): Xaa can be any naturally occurring amino acid
  misc_feature (344)..(344): Xaa can be any naturally occurring amino acid
  misc_feature (358)..(358): Xaa can be any naturally occurring amino acid
  Transcript Sequence Number=SeqID_15319
  Gene Ontology: Mol. function=protein serine/threonine phosphatase activity; Cellular component=protein serine/threonine phosphatase complex; Biological process=protein amino acid dephosphorylation
  Homolog annotation: Hit_ID=Q336W3; Match level="QueryCoverage=86%, HitCoverage=96%, E-value=1e-147, Identity=79%"; Hit description =Protein phosphatase 2C containing protein, expressed
  Pfam annotation: Domain name=PP2C; Domain location=70-331; Score =290.3; E_value=4.2e-84; Accession=PF00481.13; Description=Protein phosphatase 2C
  Subcellular localization annotation: CTP_CleavageSite=39; ConfidenceScore=5.05e-01
GSVEPQTPPDSPSMDVGVGKPPRHQLTSIRHCASSMRIAAAAASSDYGMDLGTLSLISPTDVRPGFLPVFRSGSCAEIGPKSYMEDEHVCVDNLIEHLGGRAAGIPAPGAFYGVSHIHVFDGHGGTDAACFVRKNILKFIVEDMHFPNNVEKAIRGAFLKADHALADSHSLDNNSGTTALTALIFGRTLFVANAGDCRAVLGKRGRAVELSRDHKPNCKSEKIRIEKLGGTVFDGYLNGQLAVARALGDWHMKGPKGSISPLSAEPELQEIVLSEEDEFLIIGCDGLWDVMTSQCAVTIVRKELMQHXNNPERCSSELVQEALKRXSYDNLTVVVICFSSNPPXQIDIPRSRVRRSIXLEGLHLTLGESLDRNA

SEQ ID NO: 81294 - protein, 111 aa, Setaria italica
  Transcript Sequence Number=SeqID_15320
  Subcellular localization annotation: CTP_CleavageSite=56; ConfidenceScore=5.26e-01
WFQITGKMEKIVSRKKVPEAVASNSSDNHSPQSKVSPSSSPNNKDLECECPSSSPRSENKVPAMDNSLLTSAAPENVMATSALPIRQLLMLKVNVPVHPQGLRIRFLLWTI

SEQ ID NO: 81295 - protein, 468 aa, Setaria italica
  misc_feature (17)..(17): Xaa can be any naturally occurring amino acid
  Transcript Sequence Number=SeqID_15321
  Gene Ontology: Mol. function=zinc ion binding; Cellular component =nucleus; Biological process=transcription initiation
  Homolog annotation: Hit_ID=Q7XCX5; Match level="QueryCoverage=86%, HitCoverage=24%, E-value=1e-53, Identity=38%"; Hit description=Plus -3 domain containing protein, expressed
  Pfam annotation: Domain name=GYF; Domain location=1-52; Score=27.7; E_ value=4.8e-05; Accession=PF02213.8; Description=GYF domain
WHYKDPAGIVQGPFTLXQLSKWTSYFPRDLRVWLTFESEERSLLLTEVLSKQQKDFNQAASLTSSKVTLAGTRHTMNSPSVDQTNALSPVGYSVAGSSGITVQSNKYYAPERECVYSPDDSLSLSTSSVPPKDVRTVNSQAQCQTKHSVFIQSPGNSYGQTDLHHNGIHGGCSGESNHRHSSAALWSPTTAHMSGSGRGNTESHQNQHVSWSQCQHDSKGSSQCGSVKDLNSRRDLSKNLPTQRVGKDVSSPVFAWSPSESRTASSQHEGSCLSSTTNPNFVDELHSSIASAKSMSCAPATPIEDRGSSSPSGMLSHSESVPICSPHSAPLASASDICKMDEIMNQQRTLEADTSNASVNQSPQSKIFHVSSPDNQDIDREVPSPAPRSENKELAVDNSGLTPASPENVTSTNSPGSNTGKMEKIVSRKKVPEAVASNSSDNHSPQSKVSPFYSFFLNLNLKVILLLV

SEQ ID NO: 81296 - protein, 712 aa, Setaria italica
  misc_feature (695)..(695): Xaa can be any naturally occurring amino acid
  misc_feature (701)..(701): Xaa can be any naturally occurring amino acid
  Transcript Sequence Number=SeqID_15322
  Gene Ontology: Mol. function=zinc ion binding; Cellular component =nucleus; Biological process=transcription initiation
  Homolog annotation: Hit_ID=Q0DVU4; Match level="QueryCoverage=89%, HitCoverage=97%, E-value=2e-87, Identity=39%"; Hit description=Zinc finger CCCH domain-containing protein 20
MEDFVNQQKTLDADASNAPLYQPPHSHIFPVTSPDYQDIGRESPSFTPRSDSKEPLVDNSMLTSTAPENLTTASASASDTCEMEFVNQQKTLETDASNAPLNQPPHTHIFPVSSPDDKDIECESPRPNPISGSKDPLVDKSVLTSAGPENLPTTSAPASGTCKVEEILNKERTPEADASNVSPNQPPHSSFSCPDNQDMECEYPRPTPRYESEQPVMDNSGLTSIVPENLTSASTPDICKMEDILNEKRTLEANPSNGSVIQSPQSKVFPVSSPSTNPKPEIKEPVVVSYVLTSAASDNLTEQHMDPPDAFVSLKSDPPTGVPRPELDEPVVVSSVLTLAAPENLTKQHVDSPDAFVSHKSGPSTGGLGAMESDFKCEETIQKELYCQSESTVVTRGNMLIDLSYGAESIDVSDVLESLMEEQRCGTSYMQGTTDLEDFLATSVEEEPQCSSPIALSPWGEPSYYQGDAVDSALWGAQDDPINNMWSLLSPRPTLQPSSGIGTEGKVAFGINEVVLAHGNNNEIVRGGLVPGEDNVNQVNLGAPTDWVLPEQIPSIPNDMSMSSVDESTGVVGWQPSANQNLNEGTTWSTSQNLNMSSNEKAGPSSKKTWEAPRKQESTDSSISSSGEVIGNTRKGLNPPSGNANRGIQRNHHRGRYSQISESWLLSSNHSRSRSDRFGSGGSSRSTSKGHTRGXCKFDEXRKGASCSYLHP

SEQ ID NO: 81297 - protein, 133 aa, Setaria italica
  Transcript Sequence Number=SeqID_15323
  Gene Ontology: Mol. function=electron carrier activity; Cellular component=extracellular region; Biological process=response to oxidative stress
  Homolog annotation: Hit_ID=B6SNF9; Match level="QueryCoverage=100%, HitCoverage=41%, E-value=1e-53, Identity=84%"; Hit description =Peroxidase 52
  Pfam annotation: Domain name=peroxidase; Domain location=1-133; Score= 115.5; E_value=1.8e-31; Accession=PF00141.15; Description=Peroxidase
FTGEKNAGANANSVRGYEVIDAIKTQVEAACNGTVSCADIVALASRDAVNLLGGPTWNVQLGRKDSRTASPSAANANLPGPGSSAASLVSAFAAKGLSARDMTALSGAHTVGRARCLFFRGRIYGEPNINATF

SEQ ID NO: 81298 - protein, 147 aa, Setaria italica
  Transcript Sequence Number=SeqID_15324
IPARRWSTPRTLTAPSPPGQARGVAVVFAWVWSDEAQLRPFVELYASLGWRCLVCHPDLVALYLSEKATSLATGIISELVKELKVKPLPTVLASFSGGSKGCMYKVIQLLDGRCEGDATMKDYRLVRNCICGQIYDSSPVEFTSDVG

SEQ ID NO: 81299 - protein, 273 aa, Setaria italica
  Transcript Sequence Number=SeqID_15325
  Pfam annotation: Domain name=DUF829; Domain location=28-273; Score =135.4; E_value=1.8e-37; Accession=PF05705.6; Description=Eukaryotic protein of unknown function (DUF829)
TFCLKVLKVSFSLFPLPTVLASFSGGSKGCMYKVIQLLDGRCEGDATMKDYRLVRNCICGQIYDSSPVEFTSDVGTQFLQKSAVGNSFQSSVLRSWMAKALASGMDTLFPSRIEAQRAEYWHTLYSSAGLGPVLIFCSEDDNLAPSHVICGFARRLIELGTDVKLMKWSDSQHVGHYNSHEAEYRTAVNDMLKKALITFCHRSQLYDSNMAGDREYKIAHSVCSLHNAAANSNESLRRVANSPSDHFFLPSSKDHDESREPGSLIEDQRRHFI

SEQ ID NO: 81300 - protein, 166 aa, Setaria italica
  Transcript Sequence Number=SeqID_15326
KERRLIYTDVERFPTCWTAVNDMLKKALITFCHRSQLYDSNMAGDREYKIAHSVCSLHNAAANSNESLRRVANSPSDHFFLPSSKDHDESREPGSLIEDQRRHLSHPPSMEPKGVLGQILFDVCVPKNVEGWDIKPTVSSNGRPTFASARQLGPFNPIKYFRRSRL

SEQ ID NO: 81301 - protein, 532 aa, Setaria italica
  Transcript Sequence Number=SeqID_15327
  Gene Ontology: Mol. function=oxidoreductase activity
  Homolog annotation: Hit_ID=Q10PC8; Match level="QueryCoverage=92%, HitCoverage=74%, E-value=1e-170, Identity=63%"; Hit description =Hydroxyproline-rich glycoprotein family protein, putative, expressed
RRQPFSQSHHSHQHHRHGGHYRPDPARGGGAVPAAGSDKDGRDIHNHKEGKVMKEVENMVDTKSLRLDSPIIDEGEKNSKLQAVSEGSSKVVPTPVEHSTTEIVDGKKVNSVEGLKVYEGLVNVAETNKILTLVNETKASCRRGGLEAGQTVIIGKRPTKGHGREIVQMGIPIIEGPPDDENQRETRVEPVPGLLHDLFDRLSQQEIIAFKPDYCVIDFFNEGDYLHPHHSPPWYGRPLCTLCLTDCDMVFGRAISGERGDHRGPLKLSLTAGSLLLLEGQSADLAKRAIPATRKHRILLSFGKSVARKHIPAESARFTPPLTPPMPWGPSSRPGNMARHPQSPKHFGYAPASGVLPAPAVGPHHVSPSDGMQPIFVAPAPVSAAAIPFTPAVPLPNTTAAWIPEATPRPPPPRFPGPGTGVFLPPGSGHPLPHQMMPGSPGHGEPNSPQGSASAYLQNKIAGKEMSNGHLSPKSSPTNRSYTTEEKPECNGSSNGGGSFAEEKSAVSKEHQNGSLKNVGSSKVQPHGHASK

SEQ ID NO: 81302 - protein, 125 aa, Setaria italica
  misc_feature (97)..(97): Xaa can be any naturally occurring amino acid
  Transcript Sequence Number=SeqID_15328
  Gene Ontology: Mol. function=nutrient reservoir activity; Cellular component=extracellular region
  Homolog annotation: Hit_ID=Q942A7; Match level="QueryCoverage=100%, HitCoverage=54%, E-value=2e-44, Identity=72%"; Hit description =Germin-like protein 1-4
  Pfam annotation: Domain name=Cupin_1; Domain location=3-125; Score =86.0; E_value=1.4e-22; Accession=PF00190.14; Description=Cupin
  Pfam annotation: Domain name=Cupin_2; Domain location=40-117; Score =37.2; E_value=6.7e-08; Accession=PF07883.3; Description=Cupin domain
  Pfam module annotation: Pfam domain module=Cupin_1::Cupin_2; Domain location=3-125::40-117
FFGGLAKAADVYTGNPVGSAVTAADVEVLPGLNTLGVSMARTDFAPSGGVSPPHAHPRATEILFVVEGALEVGFVTAANWRLLGRTVRAGEVFVFPXGLLHFQRSVGAVPAVAISAFNSQLPGTQ

SEQ ID NO: 81303 - protein, 103 aa, Setaria italica
  Transcript Sequence Number=SeqID_15329
  Gene Ontology: Mol. function=O-methyltransferase activity
  Homolog annotation: Hit_ID=B6TR72; Match level="QueryCoverage=80%, HitCoverage=27%, E-value=6e-39, Identity=92%"; Hit description =Caffeoyl-CoA O-methyltransferase 1
  Pfam annotation: Domain name=Methyltransf_3; Domain location=27-103; Score=-75.1; E_value=1.8e-06; Accession=PF01596.9; Description=O -methyltransferase
HSAAAAVEEARRGRKQLGMTPPLYDYLLANVREHPVLRELREETAAMKGSQMQVSPAQAQLLAMLVQILGAQRCIEVGIFTGYSSLAVALALPESVVRLSNRK

SEQ ID NO: 81304 - protein, 158 aa, Setaria italica
  Transcript Sequence Number=SeqID_15330
  Gene Ontology: Mol. function=protein serine/threonine kinase activity; Biological process=protein amino acid phosphorylation
  Homolog annotation: Hit_ID=Q7XKA8; Match level="QueryCoverage=100%, HitCoverage=39%, E-value=1e-39, Identity=56%"; Hit description =Serine/threonine-protein kinase SAPK5
IPEYVHVSQNCRHLLSRIFVANPYKRITMSEIKSHPWFLKNLPRELKEEAQAAYYSRRGGGDASAGAGGSATSNNAPAATFSAQSVEDIMRIVQEAQTVPRPARPVAGYGWGAASDDEQYDDDDDAQDQEEEGEEDDYDRTVRQVHASGEFDMSKLQI

SEQ ID NO: 81305 - protein, 124 aa, Setaria italica
  Transcript Sequence Number=SeqID_15331
  Gene Ontology: Mol. function=protein serine/threonine kinase activity; Biological process=protein amino acid phosphorylation
  Homolog annotation: Hit_ID=Q7XKA8; Match level="QueryCoverage=100%, HitCoverage=33%, E-value=1e-65, Identity=96%"; Hit description =Serine/threonine-protein kinase SAPK5
  Pfam annotation: Domain name=Pkinase; Domain location=4-124; Score= -42.2; E_value=5.6e-06; Accession=PF00069.17; Description=Protein kinase domain
  Pfam annotation: Domain name=Pkinase_Tyr; Domain location=4-124; Score=-168.2; E_value=0.015; Accession=PF07714.9; Description =Protein tyrosine kinase
  Pfam module annotation: Pfam domain module=Pkinase::Pkinase_Tyr; Domain location=4-124::4-124
MERYEPVREIGAGNFGVAKLMRNKETRELVAMKFIERGNRIDENVFREIVNHRSLRHPNIIRFKEVVLTPTHLAIVMEYAAGGELFERICEAGRFHEDEARYFFQQLVCGVSYCHAMQICHRDL

SEQ ID NO: 81306 - protein, 257 aa, Setaria italica
  misc_feature (160)..(160): Xaa can be any naturally occurring amino acid
  misc_feature (171)..(171): Xaa can be any naturally occurring amino acid
  Transcript Sequence Number=SeqID_15332
  Gene Ontology: Mol. function=protein serine/threonine kinase activity; Biological process=protein amino acid phosphorylation
  Homolog annotation: Hit_ID=Q7XKA8; Match level="QueryCoverage=100%, HitCoverage=69%, E-value=1e-143, Identity=95%"; Hit description =Serine/threonine-protein kinase SAPK5
  Pfam annotation: Domain name=Pkinase; Domain location=4-255; Score =269.7; E_value=6.9e-78; Accession=PF00069.17; Description=Protein kinase domain
  Pfam annotation: Domain name=Pkinase_Tyr; Domain location=4-257; Score=-27.4; E_value=6.7e-12; Accession=PF07714.9; Description =Protein tyrosine kinase
  Pfam module annotation: Pfam domain module=Pkinase::Pkinase_Tyr; Domain location=4-255::4-257
MERYEPVREIGAGNFGVAKLMRNKETRELVAMKFIERGNRIDENVFREIVNHRSLRHPNIIRFKEVVLTPTHLAIVMEYAAGGELFERICEAGRFHEDEARYFFQQLVCGVSYCHAMQICHRDLKLENTLLDGSPAPRLKICDFGYSKSSVLHSRPKSTXGTPAYIAPEVXLSRREYDGKHADVWSCGVTLYVMLVGAYPFEDPKDPKNFRKTISRIMSVQYKIPEYVHVSQNCRHLLSRIFVANPYKRITMSEIKS

SEQ ID NO: 81307 - protein, 400 aa, Setaria italica
  misc_feature (54)..(54): Xaa can be any naturally occurring amino acid
  misc_feature (62)..(62): Xaa can be any naturally occurring amino acid
  Transcript Sequence Number=SeqID_15333
  Gene Ontology: Mol. function=protein serine/threonine kinase activity; Biological process=protein amino acid phosphorylation
  Homolog annotation: Hit_ID=Q7XKA8; Match level="QueryCoverage=100%, HitCoverage=99%, E-value=1e-170, Identity=76%"; Hit description =Serine/threonine-protein kinase SAPK5
  Pfam annotation: Domain name=Pkinase; Domain location=4-282; Score =300.3; E_value=4.1e-87; Accession=PF00069.17; Description=Protein kinase domain
  Pfam annotation: Domain name=Pkinase_Tyr; Domain location=4-280; Score=-35.3; E_value=2.2e-11; Accession=PF07714.9; Description =Protein tyrosine kinase
  Pfam module annotation: Pfam domain module=Pkinase::Pkinase_Tyr; Domain location=4-282::4-280
MERYEPVREIGAGNFGVAKLMRNKETRELVAMKFIERGNRRPCLALPCLQFNYXNHQLLAIXIDENVFREIVNHRSLRHPNIIRFKEVVLTPTHLAIVMEYAAGGELFERICEAGRFHEDEARYFFQQLVCGVSYCHAMQICHRDLKLENTLLDGSPAPRLKICDFGYSKSSVLHSRPKSTVGTPAYIAPEVLSRREYDGKHADVWSCGVTLYVMLVGAYPFEDPKDPKNFRKTISRIMSVQYKIPEYVHVSQNCRHLLSRIFVANPYKRITMSEIKSHPWFLKNLPRELKEEAQAAYYSRRGGGDASAGAGGSATSNNAPAATFSAQSVEDIMRIVQEAQTVPRPARPVAGYGWGAASDDEQYDDDDDAQDQEEEGDDYDRTVRQVHASGEFDMSKLQI

SEQ ID NO: 81308 - protein, 86 aa, Setaria italica
  Transcript Sequence Number=SeqID_15334
  Gene Ontology: Mol. function=hydrolase activity; Biological process =metabolic process
  Homolog annotation: Hit_ID=B9T399; Match level="QueryCoverage=87%, HitCoverage=24%, E-value=3e-25, Identity=64%"; Hit description =Catalytic, putative
  Pfam annotation: Domain name=Abhydrolase_3; Domain location=1-86; Score=-50.2; E_value=0.00026; Accession=PF07859.5; Description =alphabeta hydrolase fold
AIVVSVEYRLAPEHPLPAAYDDSWRALRWVASHATGSGEEPWLTDHGDFSRLCVGGESAGANIAHHMAMRAGAEPLPTAPDQRRRR

SEQ ID NO: 81309 - protein, 60 aa, Setaria italica
  Transcript Sequence Number=SeqID_15335
PAAGSSSDGGAGVWLELARVFLSCMLTYWICCCFPIDRSCTCLLFIFNYSVLVVGVAASS

SEQ ID NO: 81310 - protein, 82 aa, Setaria italica
  misc_feature (27)..(27): Xaa can be any naturally occurring amino acid
  Transcript Sequence Number=SeqID_15336
LMKCFPCLEKLYIQSCGSVRQNLWHSXNKNFIQNYDIHIKTVVLGMWECIWASERKSTLLRTQNATELEVMRIETILLCPYN

SEQ ID NO: 81311 - protein, 56 aa, Setaria italica
  Transcript Sequence Number=SeqID_15337
  Homolog annotation: Hit_ID=B6TJJ0; Match level="QueryCoverage=57%, HitCoverage=8%, E-value=2e-10, Identity=93%"; Hit description=Omega -3 fatty acid desaturase
MLINVTATTDHICIYFIWSEQMTEKLYRQLEPRTKKLRFTVPFPLLAFPVYLVCSE

SEQ ID NO: 81312 - protein, 60 aa, Setaria italica
  misc_feature (11)..(11): Xaa can be any naturally occurring amino acid
  Transcript Sequence Number=SeqID_15338
  Gene Ontology: Mol. function=oxidoreductase activity; Cellular component=endoplasmic reticulum membrane; Biological process=lipid metabolic process
  Homolog annotation: Hit_ID=A3F5L2; Match level="QueryCoverage=100%, HitCoverage=15%, E-value=3e-23, Identity=83%"; Hit description=Fatty acid desaturase DES1
QTTCWCIMLAXLLAMACTFGPIQVLKIYGVPYLVFVMWLDLVTYLHHHGSHDLPWYRGEE

SEQ ID NO: 81313 - protein, 159 aa, Setaria italica
  misc_feature (152)..(152): Xaa can be any naturally occurring amino acid
  Transcript Sequence Number=SeqID_15339
  Gene Ontology: Mol. function=tRNA (guanine-N7-)-methyltransferase activity; Cellular component=cellular_component; Biological process =tRNA modification
  Homolog annotation: Hit_ID=B6SHG7; Match level="QueryCoverage=100%, HitCoverage=58%, E-value=1e-60, Identity=74%"; Hit description=tRNA (guanine-N(7)-)-methyltransferase
  Pfam annotation: Domain name=Methyltransf_4; Domain location=45-159; Score=-64.7; E_value=0.012; Accession=PF02390.9; Description =Putative methyltransferase
  Subcellular localization annotation: CTP_CleavageSite=16; ConfidenceScore=5.13e-01
MTRTNGASGGGGGQQQASAAGKLPRKRFYRARAHSNPLSDSHFPVPVSPDEFDLSEHYPRYFPADKGSGEEAPPPPRIRFADVGCGFGGLLVGLAPLFPDTLMIGMELRDKVTEYVKERILALRASNPGQYDNISVVRTNSMKYIPNYFRKXQLTKMFF

SEQ ID NO: 81314 - protein, 283 aa, Setaria italica
  misc_feature (35)..(35): Xaa can be any naturally occurring amino acid
  Transcript Sequence Number=SeqID_15340
  Gene Ontology: Mol. function=protein binding; Biological process =protein metabolic process
  Homolog annotation: Hit_ID=Q9LML2; Match level="QueryCoverage=65%, HitCoverage=17%, E-value=3e-16, Identity=30%"; Hit description =F10K1.9 protein
PVSCCGRGPHADEHGVASAAADFATASPYRILPVXPTPINNPNPNSNSGLILSIGDLKDLVADDDPDLQERGRRVVSEVTRLLETHRAGHTVWVMGWSATYETYLAFLSKFPLVDKDWELQLLPITAVRDAGTAAAGVMPPATTATALSKPASTSLMESFVPFGGFMCDAYDANSLMPSSTRCQQCNDRYEQEIATIIRGSGITAEAHQEGLPSLLQNGSMMDPNSGFDAVKVRDDQMVLNTKILNLQKKWNEYCLRLHQGCQRINRDPHQLFPHYIGVPADR

SEQ ID NO: 81315 - protein, 712 aa, Setaria italica
  Transcript Sequence Number=SeqID_15341
  Gene Ontology: Mol. function=protein binding; Biological process =protein metabolic process
  Homolog annotation: Hit_ID=Q9LML2; Match level="QueryCoverage=57%, HitCoverage=36%, E-value=3e-32, Identity=27%"; Hit description =F10K1.9 protein
  Pfam annotation: Domain name=AAA_2; Domain location=342-628; Score= -43.0; E_value=0.024; Accession=PF07724.6; Description=ATPase family associated with various
MPSGPRCQQCNDRYEQEIATIIRGSGITAEAHQECLPSLLQNGSMMDPNSGFDAVKVRDDQMVLNTKILNLQKKWNEYCLRLHQGCQRINRDPHQLFPRYIGVPADRETGPNPSQGSEAVALQREVIKPSAVSASHTNTTAKSISSPSISNQRNADLVLNLQVRQSKSDEPLHDRGVQSQHSNSSNCDNREDHVSPSSAAAVATDLVLGTPRGSSSKDSSNALCKHVEDAEGSIQPMPKKVDDLNLKPPQFSVQPYYCSRSSSNWGQSQTSPSALHSAAPGGTSAFGQWQRPSPLAAQSFDYKLLMEHLFKAVGRQEEALSAICASIVRCRSVERRRGAHRKNDIWFSFHGPDNIAKRRVGVALAELMHGSSDNLIYLDFSVQDWDNSNFRGKRATDCIFEELRKKRRSVIFLENIDKADFLVQESLTQAFETGRYKDLHGGRVADLNDSIVVLSTRMIRGCQEASVGMGEGHALSEEKVLAARGHHLKIIVEPGTANVGGGPGGKAVVSSRHSLSDIQASLYSSSFSKRKLNISDGVEKVEEPSSTSKRLHRTSSVPFDLNLPVDEAETHDGDDGSSSSHENSSGDPDGSIDNLLRSVDESINFKPVDFGKLCEELLQEFTNRTSNVVGSRCRLEIDVGAMVQIVGAACASDSGKRPVRTWVEQVFVRSLEQLKVKCKNVSACTLRLVACEDELLKDEGFGGLLPSRIFLD

SEQ ID NO: 81316 - protein, 42 aa, Setaria italica
  Transcript Sequence Number=SeqID_15342
LENNWCLPVLMIYKQKCNDDFYIMKTGLYFLKIIGAYQFCFL

SEQ ID NO: 81317 - protein, 69 aa, Setaria italica
  Transcript Sequence Number=SeqID_15343
FVLCDMSFFAECQKVLFVTSSFWSGLKTIKYYKHRLQVSLKSAQSLFMDAIICNEFSDKTRSHGDWHRF

SEQ ID NO: 81318 - protein, 118 aa, Setaria italica
  misc_feature (37)..(37): Xaa can be any naturally occurring amino acid
  Transcript Sequence Number=SeqID_15344
  Gene Ontology: Mol. function=heat shock protein binding
  Homolog annotation: Hit_ID=B6U2P5; Match level="QueryCoverage=99%, HitCoverage=47%, E-value=1e-59, Identity=93%"; Hit description=Heat shock protein binding protein
  Pfam annotation: Domain name=DnaJ; Domain location=52-115; Score =52.1; E_value=2.2e-12; Accession=PF00226.23; Description=DnaJ domain
GGYESWRENGPPGGYNYIPRDDWYWQTDTSHSEHKTXRTYTPAGPRVYPMSHHYAVLGLDRSRATPYTDAEVKTAFRTKAMEVHPDQNQDDREGAEEKFKEVVKSYEAIKLERKNGVN

SEQ ID NO: 81319 - protein, 158 aa, Setaria italica
  Transcript Sequence Number=SeqID_15345
  Gene Ontology: Mol. function=protein serine/threonine kinase activity; Cellular component=plasma membrane; Biological process =protein amino acid phosphorylation
  Homolog annotation: Hit_ID=B6TJA2; Match level="QueryCoverage=100%, HitCoverage=29%, E-value=2e-82, Identity=96%"; Hit description =Calcium-dependent protein kinase, isoform AK1
  Pfam annotation: Domain name=efhand; Domain location=25-53; Score =19.4; E_value=0.015; Accession=PF00036.24; Description=EF hand
  Pfam annotation: Domain name=efhand; Domain location=61-89; Score =32.8; E_value=1.4e-06; Accession=PF00036.24; Description=EF hand
  Pfam annotation: Domain name=efhand; Domain location=97-125; Score =39.5; E_value=1.4e-08; Accession=PF00036.24; Description=EF hand
  Pfam module annotation: Pfam domain module=efhand::efhand::efhand; Domain location=25-53::61-89::97-125
NRELVSYEELKTGIAKLGSHLAESEVQMLIEAVDTNGRGALDYGEFLAVSLHLQRMADDEHLRRAFLFFDKDGNGFIEPEELREALVDDGAADSMEVVNDILQEVDTDKDGKISYDEFVAMMKTGTDWRKASRHYSRGRFNSLSMKLIKDGSVKLGVE

SEQ ID NO: 81320 - protein, 545 aa, Setaria italica
  Transcript Sequence Number=SeqID_15346
  Gene Ontology: Mol. function=protein serine/threonine kinase activity; Cellular component=plasma membrane; Biological process =protein amino acid phosphorylation
  Homolog annotation: Hit_ID=B6TJA2; Match level="QueryCoverage=100%, HitCoverage=100%, E-value=0.0, Identity=91%"; Hit description =Calcium-dependent protein kinase, isoform AK1
  Pfam annotation: Domain name=Pkinase; Domain location=71-329; Score =351.6; E_value=1.5e-102; Accession=PF00069.17; Description=Protein kinase domain
  Pfam annotation: Domain name=Pkinase_Tyr; Domain location=71-327; Score=-47.5; E_value=1.4e-10; Accession=PF07714.9; Description =Protein tyrosine kinase
  Pfam annotation: Domain name=efhand; Domain location=376-404; Score =41.2; E_value=4.2e-09; Accession=PF00036.24; Description=EF hand
  Pfam annotation: Domain name=efhand; Domain location=412-440; Score =19.4; E_value=0.015; Accession=PF00036.24; Description=EF hand
  Pfam annotation: Domain name=efhand; Domain location=448-476; Score =32.5; E_value=1.7e-06; Accession=PF00036.24; Description=EF hand
  Pfam annotation: Domain name=efhand; Domain location=484-512; Score =38.4; E_value=2.8e-08; Accession=PF00036.24; Description=EF hand
  Pfam module annotation: Pfam domain module=Pkinase::Pkinase _Tyr::efhand::efhand::efhand::efhand; Domain location=71-329::71 -327::376-404::412-440::448-476::484-512
MGNCCRSPAAAAREDVKSSHFPASAGGKKKPHQARNGGGAGGGGGGGGEKKRLSVLGEEGCDVGAGIEDKYALDRELGRGEFGVTYLCMDRDTKELLACKSISKRKLRTAVDVEDVRREVAIMRHLPKSPSIVSLREACEDEGAVHLVMELCEGGELFDRIVARGHYTERAAANVTRTIVEVVQLCHRHGVIHRDLKPENFLFANKKENSPLKAIDFGLSIFFKPGEKFSEIVGSPYYMAPEVLKRNYGPEIDIWSAGVILYILLCGVPPFWAETEQGVAQAILRGNIDFKREPWPNVSDNAKDLVRQMLQPDPKLRLTAKQVLEHPWLQNAKKAPNVPLGDIVKSRLKQFSRMNRFKRRALRVIADHLSAEEVEDIKEMFKVMDTDNDGKVSYEELKNGIAKFGSHLAESEVQMLIEAVDTNGRGALDYGEFLAVSLHLQRMANDEHLRRAFLFFDKDGNGFIEPEELQEALVEDGGADSMDVVNDILHEVDTDKDGKISYEEFVAMMKTGTDWRKASRHYSRGRFNSLSIKLIKDGSLKLGNE

SEQ ID NO: 81321 - protein, 162 aa, Setaria italica
  Transcript Sequence Number=SeqID_15347
  Gene Ontology: Mol. function=metal ion binding; Cellular component =cell wall; Biological process=cell redox homeostasis
  Homolog annotation: Hit_ID=B6T483; Match level="QueryCoverage=96%, HitCoverage=52%, E-value=1e-22, Identity=37%"; Hit description=RHC1A
MSGGRQSYWCYQCRQRIRPRGREMVCPYCDSGFVAEMDDVDALMNHFVGMDPDFQRDPRFGIMEAISAVMRHGMTGMNREVDVRGRPNIFSDLEMEFGSGPWLLFRGQLPGHLTEDNGFDVFINGRRGVGMRRANIADYFVGPGLEELGEQLTQNDRRGPPL

SEQ ID NO: 81322 - protein, 114 aa, Setaria italica
  Transcript Sequence Number=SeqID_15348
  Homolog annotation: Hit_ID=B6TQD1; Match level="QueryCoverage=94%, HitCoverage=38%, E-value=2e-50, Identity=89%"; Hit description=Sec20 family protein
MDEVTQAVENLKKEWNQAVSQLEESIAAIRSCGKTGKGTEEANSLPRLNGSAQDALQLLKSLQFRLDLLAQQLPTFEEVQSGQATLESWDEQYKKLRASLRNANLQAKVSKQFK

SEQ ID NO: 81323 - protein, 78 aa, Setaria italica
  Transcript Sequence Number=SeqID_15349
LDIHLPAHSIPGSSHAVPIPKSQFNPISYSHVDRNKQYAYKLAAIMRGVVFVWTTKQLHARETQKHRVKQSATSVSTK

SEQ ID NO: 81324 - protein, 80 aa, Setaria italica
  misc_feature (20)..(20): Xaa can be any naturally occurring amino acid
  Transcript Sequence Number=SeqID_15350
  Subcellular localization annotation: CTP_CleavageSite=41; ConfidenceScore=5.13e-01
MAGGRKREWLRKKVAAVAGXGGRSQQQQQSPRWTLRVRALSAALRRRRLGAGGLPRVDFLQVLYQNVLFYLLWVVESVVV

SEQ ID NO: 81325 - protein, 54 aa, Setaria italica
  Transcript Sequence Number=SeqID_15351
  Gene Ontology: Mol. function=transporter activity; Cellular component= integral to membrane; Biological process=transport
  Homolog annotation: Hit_ID=Q8GRT8; Match level="QueryCoverage=100%, HitCoverage=18%, E-value=3e-22, Identity=90%"; Hit description =Aquaporin PIP2-4
MGKEVDVSALEAGGARDYVDPPPAPLVDIDELGKWSLYRAVIAEFVATLLFLYI

SEQ ID NO: 81326 - protein, 70 aa, Setaria italica
  Transcript Sequence Number=SeqID_15352
  Gene Ontology: Mol. function=transporter activity; Cellular component= integral to membrane; Biological process=transport
  Homolog annotation: Hit_ID=Q6K215; Match level="QueryCoverage=100%, HitCoverage=23%, E-value=3e-29, Identity=88%"; Hit description =Probable aquaporin PIP2-2
MAKDIEAAAAPEGGEYTAKDYSDPPPAPLIDAEELTKWSLYRAVIAEFVATLLFLYITVATVIGYKHQTD

SEQ ID NO: 81327 - protein, 87 aa, Setaria italica
  Transcript Sequence Number=SeqID_15353
  Gene Ontology: Mol. function=transporter activity; Cellular component= integral to membrane; Biological process=transport
  Homolog annotation: Hit_ID=Q8GRT8; Match level="QueryCoverage=100%, HitCoverage=30%, E-value=7e-40, Identity=89%"; Hit description =Aquaporin PIP2-4
MGKEVDVSTLEAGGARDYADPPPAPLVDIDELGKWSLYRAVIAEFVATLLFLYITVATVIGYKHQTDASASGPDAACGGVGILGIAW

SEQ ID NO: 81328 - protein, 213 aa, Setaria italica
  Transcript Sequence Number=SeqID_15354
  Gene Ontology: Mol. function=transporter activity; Cellular component= integral to membrane; Biological process=transport
  Homolog annotation: Hit_ID=Q9ATM7; Match level="QueryCoverage=93%, HitCoverage=68%, E-value=1e-107, Identity=96%"; Hit description =Aquaporin PIP2-3
  Pfam annotation: Domain name=MIP; Domain location=1-194; Score=339.7; E_value=5.6e-99; Accession=PF00230.12; Description=Major intrinsic protein
AACGGVGILGIAWAFGGMIFILVYCTAGVSGGHINPAVTLGLFLARKVSLVRALLYIVAQCLGAICGVGLVKGFQSAYYVRYGGGANELSDGYSKGTGLAAEIIGTFVLVYTVFSATDPKRNARDSHVPVLAPLPIGFAVFMVHLATIPITGTGINPARSLGAAVIYNNDKAWDDHWIFWVGPFIGAAIAAAYHQYVLRASASKLGSSASFSR

SEQ ID NO: 81329 - protein, 152 aa, Setaria italica
  Transcript Sequence Number=SeqID_15355
  Gene Ontology: Mol. function=transporter activity; Cellular component= integral to membrane; Biological process=transport
  Homolog annotation: Hit_ID=Q8GRT8; Match level="QueryCoverage=100%, HitCoverage=53%, E-value=2e-78, Identity=92%"; Hit description =Aquaporin PIP2-4
  Pfam annotation: Domain name=MIP; Domain location=1-134; Score=112.2; E_value=1.8e-30; Accession=PF00230.12; Description=Major intrinsic protein
CLGAICGVALVKGFQSGFYVRYGGGANEVSTGYSTGTGLAAEIVGTFVLVYTVFSATDPKRNARDSHIPVLAPLPIGFAVFMVHLATIPITGTGINPARSLGAAVVYNNNKAWSDQWIFWVGPFIGAAIAALYHQIVLRASARGYGSFRSNA

SEQ ID NO: 81330 - protein, 288 aa, Setaria italica
  Transcript Sequence Number=SeqID_15356
  Gene Ontology: Mol. function=transporter activity; Cellular component= integral to membrane; Biological process=transport
  Homolog annotation: Hit_ID=Q9ATM7; Match level="QueryCoverage=100%, HitCoverage=100%, E-value=1e-156, Identity=95%"; Hit description =Aquaporin PIP2-3
  Pfam annotation: Domain name=MIP; Domain location=33-270; Score =445.1; E_value=1e-130; Accession=PF00230.12; Description=Major intrinsic protein
MAKDIEASGPEAGEFSAKDYSDPPPAPLIDAEELTKWSLYRAAIAEFVATLLFLYITVATVIGYKHQTDAAASGPDAACGGVGILGIAWAFGGMIFILVYCTAGISGGHINPAVTFGLFLARKVSLVRAVLYIIAQCLGAICGVGLVKGFQSAYFVRYGGGANELSAGYSNGTGLAAEIIGTFVLVYTVFSATDPKRNARDSHVPVLAPLPIGFAVFMVHLATIPITGTGINPARSLGAAVIYNNDKAWDDQWIFWVGPLIGAAIAAAYHQYVLRASAAKLGSFRSNA

SEQ ID NO: 81331 - protein, 589 aa, Setaria italica
  Transcript Sequence Number=SeqID_15357
  Gene Ontology: Mol. function=ATP binding
  Homolog annotation: Hit_ID=B9RAZ5; Match level="QueryCoverage=99%, HitCoverage=81%, E-value=1e-170, Identity=52%"; Hit description=Zinc finger protein, putative
  Pfam annotation: Domain name=HATPase_c; Domain location=45-143; Score= 7.5; E_value=0.014; Accession=PF02518.18; Description=Histidine kinase-, DNA gyrase B-, and HSP90-like ATPase
DRPRLCRQFWKSGDYVVACRNPDANAPGGRNRLRINPKFLHSNATSHKWAFGAIAELLDNAIDEVNNGATYVRINKFTNPRDGSPSLLVQDDGGGMDPEALRRCMSFGFSDKQSDAFIGQYGNGFKTSTMRLGADVIVFTQNQNNWTPTRSIGLLSYTFLMETGCDDVLVPTVDYQYDLTTASYIQMLRHDQKLFSSNLGILLKWSPFASEAELLKQFDDMGEHGTKIIVFNLWFNDDGDMELDFNSDEKDILITGAHKKLKTNKAEKIAKQNYVSSRLRYSLRAYASILYLHVPDNFRIILRGCDVEPHNIVNDLMYRECVLYKPQIAGLTESSVITTIGFVKGAPDIDVQGFNVYHKNRLISPFWKVANNSYGKGRGVVGILEANFIKPTHDKQDFEKSVLYQRLEIRLKEMTYEYWGLHCHRLGYDNKSLPKATRALHRANHMNARSSPISAPPRLLAADIPTSSCGIPRLSASAAREKINSLESHSKSKMGLKRKFDSAMTDSADQDGLDHTNGVDVSQRKRFNEYRTLTLENDKLRKECLQYEESEKQLVMKEQKLRSEIAEAKKKYQELLKELGSLDVKEEKS

SEQ ID NO: 81332 - protein, 102 aa, Setaria italica
  misc_feature (51)..(51): Xaa can be any naturally occurring amino acid
  Transcript Sequence Number=SeqID_15358
  Gene Ontology: Mol. function=heat shock protein binding; Biological process=protein folding
  Homolog annotation: Hit_ID=B6TF62; Match level="QueryCoverage=85%, HitCoverage=32%, E-value=1e-36, Identity=86%"; Hit description=Heat shock protein DnaJ, N-terminal
GILKDLQTEFQNWEAGLNSDQKPKSLWEELAAIGEEFVEFLENELKIDDSXPKDDTGNDPYTQFGGQAKNAKDSKTVTNNFDDGVSEIEAALEKLKKELGLG

SEQ ID NO: 81333 - protein, 71 aa, Setaria italica
  Transcript Sequence Number=SeqID_15359
YIFHYYLYSLAFWFFQSSRDNMLKLLLFLIAHSYLSGAISLSMDVYMSLLFISKPRFVLLLLGLIYARFGV

SEQ ID NO: 81334 - protein, 101 aa, Setaria italica
  Transcript Sequence Number=SeqID_15360
  Gene Ontology: Mol. function=metal ion binding
MYHWCKFEFFKEKAVGRGGGAGGGSSSAAVPVEIAGRVTCYSGGRSCVTVGCDDGTMGLLDRGFQLSYDFQAHTSSVLFLQQLEVQALELDLMRRDPSPLR

SEQ ID NO: 81335 - protein, 79 aa, Setaria italica
  Transcript Sequence Number=SeqID_15361
  Subcellular localization annotation: CTP_CleavageSite=34; ConfidenceScore=5.62e-01
KKEDKLLPSPSQSPSSTPWMPLLSRFSLRSRGPGASEAGSSSFAVDKDTPGAIPIAGSSSPSYRFPLAMIQEATDNFDE

SEQ ID NO: 81336 - protein, 169 aa, Setaria italica
  Transcript Sequence Number=SeqID_15362
  Gene Ontology: Mol. function=hydrolase activity; Biological process =metabolic process
  Homolog annotation: Hit_ID=Q6Z4M3; Match level="QueryCoverage=100%, HitCoverage=37%, E-value=2e-56, Identity=64%"; Hit description =Putative PrMC3
  Pfam annotation: Domain name=Abhydrolase_3; Domain location=1-149; Score=-5.7; E_value=4.2e-07; Accession=PF07859.5; Description =alphabeta hydrolase fold
ADHADPGRTFLAGDSAGGNIVYHTAVRASRDGVGIEGVVIVQPYLWGAERLPSEAACGDGAAVLPAYGVDRLWPFVTAGQAGNEDPRLNPPDEEIASLTCRRFLVAVAEKDTLSERGRRLFGRIRDYYAVAGGEATLVESEGEDHGFHLYSPLRATSRRLMQSIVRFIN

SEQ ID NO: 81337 - protein, 152 aa, Setaria italica
  Transcript Sequence Number=SeqID_15363
  Gene Ontology: Mol. function=hydrolase activity; Biological process =metabolic process
  Homolog annotation: Hit_ID=B6T2X8; Match level="QueryCoverage=98%, HitCoverage=46%, E-value=6e-31, Identity=46%"; Hit description =Gibberellin receptor GID1L2
  Pfam annotation: Domain name=Abhydrolase_3; Domain location=70-150; Score=-71.1; E_value=0.0055; Accession=PF07859.5; Description =alphabeta hydrolase fold
CAYFRLYKDGHVDRGGVADTAPAGFDAETGVTSKDVAIDAATGVAARLYLPPAVQPATATAAAAAKLPVLVFFHGGYFVVGSPYHPLFHRYVNSLAAAARVVAVSVRYRLAPEHRLPAAYDDSWAALSWVASGADPWLADHGDLGRIFLSGV

SEQ ID NO: 81338 - protein, 291 aa, Setaria italica
  misc_feature (108)..(108): Xaa can be any naturally occurring amino acid
  Transcript Sequence Number=SeqID_15364
  Gene Ontology: Mol. function=hydrolase activity; Biological process =metabolic process
  Homolog annotation: Hit_ID=B6T7L7; Match level="QueryCoverage=97%, HitCoverage=92%, E-value=2e-56, Identity=41%"; Hit description =Gibberellin receptor GID1L2
  Pfam annotation: Domain name=Abhydrolase_3; Domain location=61-269; Score=77.6; E_value=4.5e-20; Accession=PF07859.5; Description =alphabeta hydrolase fold
MDSGGGEVVYSCAYFRLYKDGHVDRGGVADTAPAGFDAETGVTSKDVAIDAATGVAARLYLPPAVQPATATTAAAAKLPVLAVSVRYRLAPEHRLPAAYDDSWAALLXWVASGADPWLADHGDLGRIFLSGVSAGANIAHNMAIAAGVSGLRAGTGTPARIEGVILLHPSFASEQKMEGEDEEFWQSNKDRWAVIFPGADGGLDDPSINPMAAGAPSLAKLAGERLLVSTASEDPRAPRGRAYCDAVRDSGWRGELECFESQGGHGFFVPDHGSREAAKLMDRVVDFLGGH

SEQ ID NO: 81339 - protein, 117 aa, Setaria italica
  Transcript Sequence Number=SeqID_15365
  Gene Ontology: Mol. function=prephenate dehydrogenase (NADP+) activity; Biological process=tyrosine biosynthetic process
  Homolog annotation: Hit_ID=B9SXN5; Match level="QueryCoverage=76%, HitCoverage=58%, E-value=6e-29, Identity=68%"; Hit description =Prephenate dehydrogenase, putative
GSQFITHTIGRVLSQLNLKSTPINTKGYESLLQLTHNTVSDSFDLYYGLFMYNVNATEQAQLDNLERAFEKVRQMLYGRLHDLLRKQIVERVPMPVVSSRKLENGRSNSFAGLSYRL

SEQ ID NO: 81340 - protein, 60 aa, Setaria italica
  Transcript Sequence Number=SeqID_15366
STNAKRSIQVASKNKVTIAVEVNNFGSLRVSWVTELSHSLILPSVLIQFHPSPFPKLSQD

SEQ ID NO: 81341 - protein, 223 aa, Setaria italica
  misc_feature (147)..(147): Xaa can be any naturally occurring amino acid
  Transcript Sequence Number=SeqID_15367
  Gene Ontology: Mol. function=transcription regulator activity; Cellular component=nucleus; Biological process=regulation of transcription
  Homolog annotation: Hit_ID=Q9FUA4; Match level="QueryCoverage=36%, HitCoverage=21%, E-value=2e-29, Identity=82%"; Hit description =Transcription factor SPATULA
  Pfam annotation: Domain name=HLH; Domain location=13-62; Score=62.0; E_value=2.2e-15; Accession=PF00010.18; Description=Helix-loop-helix DNA-binding domain
RQRGGSGSKRSRAAEVHNLSEKRRRSKINEKMKALQSLIPNSNKTDKASMLDEAIEYLKQLQLQVQMLSMRNGVYLNPPYLSGALEPAQASQMFAALGGGHITASSSGAVMPPVNQSSGAHQAFDPLNPPPQNQPLSFVLPSVPDKXTIPEHQFQLESSQSHLRTFRMPESSEMMLRGEMIANHQLTSGQERVGLPGNDMNPIRQESSVVNTDHFDGCSRNKE

SEQ ID NO: 81342 - protein, 96 aa, Setaria italica
  misc_feature (35)..(35): Xaa can be any naturally occurring amino acid
  Transcript Sequence Number=SeqID_15368
ILLQQNQPLSFVLPSVPDKTIPEHQFQLESSQFHXFRTFRMPESSEMMLRGEMIANHQLTSGQERVGLPGNDMNPIRQESSVVNTDHFDGCSRNKE

SEQ ID NO: 81343 - protein, 206 aa, Setaria italica
  misc_feature (19)..(19): Xaa can be any naturally occurring amino acid
  misc_feature (22)..(22): Xaa can be any naturally occurring amino acid
  misc_feature (35)..(35): Xaa can be any naturally occurring amino acid
  misc_feature (61)..(61): Xaa can be any naturally occurring amino acid
  misc_feature (84)..(84): Xaa can be any naturally occurring amino acid
  misc_feature (188)..(188): Xaa can be any naturally occurring amino acid
  Transcript Sequence Number=SeqID_15369
  Gene Ontology: Mol. function=metal ion binding; Cellular component =cellular_component; Biological process=negative regulation of transcription, DNA-dependent
  Homolog annotation: Hit_ID=Q25AI3; Match level="QueryCoverage=84%, HitCoverage=12%, E-value=1e-87, Identity=88%"; Hit description =H0702G05.10 protein
RNLGYMVRLGLWGEGTSFXNFXQFLGALEKGGVGXALELVAMDMKARGMYVCRTLSYKGGXFDIVEAPLEERMMNMYRKAAEFXTELRLELISASEFFAEEKGNSNQIWRLYWASHQRFFRHMCMSAKVPAVVRLAKEALAENKCVVIGLQSTGEARTEEAVTKYGVEMEDFVSGPRELLLKLVEEKXNPLPPKPEFFYKQTNYNN

SEQ ID NO: 81344 - protein, 79 aa, Setaria italica
  Transcript Sequence Number=SeqID_15370
VLADVELNSPRTPRRKHYGGPHIGECAFHCFEGSTEGMYKIIRPAIGEALRYLRFIIFFSARFSSVRILHFIQPSRFHI

SEQ ID NO: 81345 - protein, 884 aa, Setaria italica
  misc_feature (207)..(207): Xaa can be any naturally occurring amino acid
  Transcript Sequence Number=SeqID_15371
  Gene Ontology: Mol. function=metal ion binding; Biological process =embryonic development ending in birth or egg hatching
  Homolog annotation: Hit_ID=Q25AI3; Match level="QueryCoverage=99%, HitCoverage=63%, E-value=0.0, Identity=84%"; Hit description =H0702G05.10 protein
  Pfam annotation: Domain name=C1_3; Domain location=286-315; Score =10.8; E_value=0.032; Accession=PF07649.4; Description=C1-like domain
  Pfam annotation: Domain name=PHD; Domain location=287-335; Score =34.4; E_value=4.6e-07; Accession=PF00628.21; Description=PHD-finger
  Pfam module annotation: Pfam domain module=C1_3::PHD; Domain location= 286-315::287-335
KGYNDKSFHNFTQFLGALEKGGVGALELVAMDMKARGMYVCRTLSYKGADFDIVEAPLEERMMNMYRKAAEFWAELRLELISASEFFAEEKGNSNQIWRLYWASHQRFFRHMCMSAKVPAVVRLAKEALAENKCVVIMIPISYHGCIRNICGRVLIIMPKTVCVLVAAECLQNNKCLGLQSTGEARTEEAVTKYGVEMEDFVSGPRXLLLKLVEENYPLPPKPDSFQQGEEKVTEIQRKRHSALDVSFKGRVRKVAKMVDVSDDDTDDYSPSESDHESTESDEEFHMCQICNTEEEKSLLLHCSGCSRHVHPSCLTPPWTGMMTDDWACYTCKIVEDEEKEQDAHVADFSKRYDAALEKKLKILDIIRSLDLPNNPLDDIIDQLGGPDNVAEITGRRGMLIRASDGKGVVYQARNAKEVSMEMINMHEKQQFMDSKKLIAIISEAGSAGVSLHADRRAKNQRRRVHITLELPWSADRAIQQFGRTHRSNQTSAPQYRLLFTNLGGEKRFASIVAKRLESLGALTQGDRRAGPSLSAFNYDSNYGKRALTMMYRGIMEQDSFPVVPPGCSDDEASIQAFINEAKAALVSVGIIRDAVACNGKDGGKLSGRIVDSDMHDVARFLNRLLGLAPNIQNRLFDLFTSILDVVLHNARIEGQLDSGIVHIKAKNAEMKESPKTVHTDSLSGALTVLFTFTIDRGVTWESAKAMLDERQKDGAGSSNDGFYESRREWMGRRHFTLAFEGSTEGMYKIIRPAIGEALRDMPLTELKSKYRKVSSMDKVSKGWQEEYDASSKQCMHGSKCKIGSYCTVGRRLQEVNILGGLILPVWGTIEKALAKQVRQVHKRIRVVRLVTTNDSQRIVGLLIPNSAVESVLTGLQWVQDIDD

SEQ ID NO: 81346 - protein, 273 aa, Setaria italica
  Transcript Sequence Number=SeqID_15372
  Gene Ontology: Mol. function=translation initiation factor activity; Cellular component=chloroplast
  Homolog annotation: Hit_ID=Q7XN08; Match level="QueryCoverage=100%, HitCoverage=52%, E-value=1e-136, Identity=69%"; Hit description =OSJNBa0008M17.9 protein
  Pfam annotation: Domain name=DUF794; Domain location=1-273; Score =427.7; E_value=1.8e-125; Accession=PF05634.3; Description =Arabidopsis thaliana protein of unknown function (DUF794)
VHVGPVGHQIQDCYGSGSQRRNSHHSWASGSINDVLIPIESYHLFDPFGRRVKHETRFDYDRIPAIVELCIQAGVDLPQYPSRRRTSPVRMIGKKVISRGEFVDEPKPHRSEDCVSLLAELDTFNNQQGQSPSPSNVKELAERTLKAYLNVRQGVEQLMSKYTVKACGYCSEVHVGPWGHNVKLCGAFKHQWRDGKHGWQDAVVDEVIPPNYVWHVPDPSGPPLRSSLRSFYGKAPAVVELCVQAGAAIPDEYRPMMRTDIVIPDSEEARWAA

SEQ ID NO: 81347 - protein, 298 aa, Setaria italica
  Transcript Sequence Number=SeqID_15373
  Gene Ontology: Mol. function=electron carrier activity; Cellular component=chloroplast envelope; Biological process=oxidation reduction
  Homolog annotation: Hit_ID=B4FRC8; Match level="QueryCoverage=85%, HitCoverage=85%, E-value=1e-103, Identity=72%"; Hit description =Fruit protein PKIWI502
  Pfam annotation: Domain name=FAD_binding_6; Domain location=60-164; Score=-3.9; E_value=0.0047; Accession=PF00970.16; Description =Oxidoreductase FAD-binding domain
  Pfam annotation: Domain name=NAD_binding_1; Domain location=178-282; Score=66.0; E_value=1.4e-16; Accession=PF00175.13; Description =Oxidoreductase NAD-binding domain
  Pfam module annotation: Pfam domain module=FAD_binding_6::NAD_binding_ 1; Domain location=60-164::178-282
  Subcellular localization annotation: CTP_CleavageSite=67; ConfidenceScore=5.60e-01
MAAAAAISAPPRPPRLALHLHPSPSSCSTASSLPILRRRFRRPLTTAVHAVKQDAAVWTPAPVSAVGAATADGSIFHVAVDLSDAADLAESYTSPGQYLQIRVPSGGGEELKPAFMAVASPPGAGARFEFLVKSVPGTTAERLCGLRDGEVVELGAVMGKGFPLERITPADAAQTVLIFAAGTGISTIRSLVEFGFGANERADVRLYYGARSLKTMAYQDRFKNWESAGLKIIPVLSQPDDSWKGECGYAQHAFLRAKNIVNPSSTGAVLCGQRQMQEEVTTALVADGVSQDKILTNF

SEQ ID NO: 81348 - protein, 57 aa, Setaria italica
  Transcript Sequence Number=SeqID_15374
FEPLESGFQILANQDSVLSYLNKFRAWEHLPHGRAGRKMNCCLMTFQNLWTNIIVSR

SEQ ID NO: 81349 - protein, 443 aa, Setaria italica
  Transcript Sequence Number=SeqID_15375
  Gene Ontology: Mol. function=nucleic acid binding; Cellular component= nucleus
  Homolog annotation: Hit_ID=B6TY01; Match level="QueryCoverage=99%, HitCoverage=80%, E-value=1e-150, Identity=63%"; Hit description=Zinc finger CCCH type domain-containing protein ZFN-like 6
  Pfam annotation: Domain name=zf-CCCH; Domain location=153-179; Score =30.8; E_value=5.6e-06; Accession=PF00642.16; Description=Zinc finger C-x8-C-x5-C-x3-H type (and similar)
  Pfam annotation: Domain name=zf-CCCH; Domain location=201-227; Score =42.4; E_value=1.8e-09; Accession=PF00642.16; Description=Zinc finger C-x8-C-x5-C-x3-H type (and similar)
  Pfam annotation: Domain name=zf-CCCH; Domain location=346-372; Score =30.5; E_value=6.6e-06; Accession=PF00642.16; Description=Zinc finger C-x8-C-x5-C-x3-H type (and similar)
  Pfam annotation: Domain name=zf-CCCH; Domain location=391-417; Score =33.5; E_value=8.5e-07; Accession=PF00642.16; Description=Zinc finger C-x8-C-x5-C-x3-H type (and similar)
  Pfam annotation: Domain name=zf-CCCH; Domain location=7-33; Score =40.3; E_value=7.5e-09; Accession=PF00642.16; Description=Zinc finger C-x8-C-x5-C-x3-H type (and similar)
  Pfam module annotation: Pfam domain module=zf-CCCH::zf-CCCH::zf -CCCH::zf-CCCH::zf-CCCH; Domain location=153-179::201-227::346 -372::391-417::7-33
  Subcellular localization annotation: CTP_CleavageSite=42; ConfidenceScore=5.07e-01
CASPRRPGEPDCTYYLKFGTCRFGIKCKFNHPSRKKKGSRARGSGSSGSGSNSSSNKASSPDDDQAPREEYEGLVPDISDSVSFDDKGSSSNSENHRKNSYEVIDMKKGKMEPKEKISEEPEKGIYFKKLDETNNTSQKGAKDKRRETFSEGSAQEECKYYSTPGGCKFGKACKYLHREGKEGKAEVEKVELNFLGLPLRPGEKECPFYMRTGSCKFATNCKFHHPDPTNVPSKEPVLEHENGDTPQQNVQGPSQPSVPIWPEQRALNEQHVPFLAPAPSYNGGMIPPQGMYPSPDWNGYHQVPVNPYYPPPFPHFPAPHMNHPMYKAVDIPGHQQLPSDEYPERPGQPECQHFVKSGFCKYRMKCRFHHPRARQPAPLTGLSPIGLPIKPDQPVCTYYGRFGVCKYGPACMFNHPFNFGPPVPAAGPPLPGQYHPTPGNFTV

SEQ ID NO: 81350 - protein, 499 aa, Setaria italica
  Transcript Sequence Number=SeqID_15376
  Homolog annotation: Hit_ID=Q67UP0; Match level="QueryCoverage=33%, HitCoverage=52%, E-value=1e-59, Identity=68%"; Hit description =Hydroxyproline-rich glycoprotein-like
IQESLLKELQVVEEMKDLCDQKRVEYEGMRAAYKDKGRSTHSKSESFSTEQLQTSFLEYQEEAALFIFRLKSLKQGQFLSILTQAARHHAAQISFFRRGLKHLEALEPYVKAVAEKQHIDYHFSGLDDDSDIDDYSSYQDNHSDGSELSFDYEINDRDKDLPASRSPMDLDQTQPTNSPSPLKEHEQENAEEMKAAFVVPHVKPEIGTQSAPIFAENVPDPSMGFRKLNLPNRTFHSYKLPTPADDKNPDSVVTNTSPHSDPPARKSHVAVNVWHSSPLVKDFKPSSMYSGPIKMPSNNEGISAPLVYSYSTSDFKKMKREAFSGPIPSKTGSSNPLFSATDRRQSMNYPSRVLSTKSHGPGWKSSLPPKVTPRVTSLPTTTPKISELHELPRPPANVGTIRPGLVGYSGPLVSRRQMPNAPTRVSPPSHTASPLPRPPAAMTRSYSIPSNSQRTPIITVNKLLESRHSRESSELSSPPLTPISLADVSRRSTAETTVD

SEQ ID NO: 81351 - protein, 125 aa, Setaria italica
  Transcript Sequence Number=SeqID_15377
  Gene Ontology: Mol. function=protein serine/threonine kinase activity; Cellular component=plasma membrane; Biological process =protein amino acid phosphorylation
  Homolog annotation: Hit_ID=B6SY15; Match level="QueryCoverage=100%, HitCoverage=19%, E-value=3e-50, Identity=78%"; Hit description =Protein kinase
LDADMRARVADFGLARRSREGQSHLTTRVAGTHGYLSPEYALYGQLTEKSDVYSFGVLVLEAMSGRRAIDLSDPSGVVLITDWAWTHVKAGRPREVLAGALRKEPSAVVAAMERFMLVGILCAHV

SEQ ID NO: 81352 - protein, 253 aa, Setaria italica
  Transcript Sequence Number=SeqID_15378
  Gene Ontology: Mol. function=nucleoside-triphosphatase activity; Biological process=defense response
  Homolog annotation: Hit_ID=Q84KC2; Match level="QueryCoverage=96%, HitCoverage=16%, E-value=6e-46, Identity=45%"; Hit description=NBS -LRR disease resistance protein homologue
FLLTCGNAVHAPCLLFPYLEVIVIRGCSNLVELSFPHSACCQQEKEALPFPKLSELKIGNCPQLLSFPPVPWTEAPCSIKIEGTGNSGLQKLVCTKSLNSRYCLTIEEKDIPGSTFWNVLDFHNLTRLTELDMLKCKPLPLRHLQMLPSLRTLKMSCSSNSFPFDEGDNHVQYQFPVESLLIHRWGASGKELTQLLTYFPKLSDLRMWYSEKITGLGVMGHQAMATPGPSSPGHKVGQQQDPRAEEEIVALAA

SEQ ID NO: 81353 - protein, 136 aa, Setaria italica
  Transcript Sequence Number=SeqID_15379
SDCARSISNMFPVQRRQRRHTHHYMQLKLCSALHLSLSLPFPSPILFPVLDCCVGFAQQFKKIKLKNSRQSFSFALLIRTDCAPPRLTGLVRGYWIRPTAPTRSAAARMTPSTSWGMQSSAPPAGPHPARTPTLAI

SEQ ID NO: 81354 - protein, 57 aa, Setaria italica
  Transcript Sequence Number=SeqID_15380
CMCGCCVDHILIILCVVRAAFELNRIAIGYALGSAMRYLLTEPEPSSHYSPHSTSIV

SEQ ID NO: 81355 - protein, 108 aa, Setaria italica
  Transcript Sequence Number=SeqID_15381
  Gene Ontology: Mol. function=L-aspartate oxidase activity; Cellular component=cytoplasm; Biological process=NAD biosynthetic process
  Homolog annotation: Hit_ID=B6U0K6; Match level="QueryCoverage=98%, HitCoverage=15%, E-value=5e-54, Identity=94%"; Hit description=L -aspartate oxidase 1
  Pfam annotation: Domain name=Succ_DH_flav_C; Domain location=1-105; Score=-48.1; E_value=0.00055; Accession=PF02910.12; Description =Fumarate reductasesuccinate dehydroge
GIVRSTGRLKQAEWRISDLESEWEAFLFRRGWAPTTVGVEACEMRNLFCCAKLVVKSALARRESRGLHFTEDFPYLEESRRKPTVIFPDAVQELTWSSKPLQRQLQCK

SEQ ID NO: 81356 - protein, 100 aa, Setaria italica
  Transcript Sequence Number=SeqID_15382
  Gene Ontology: Mol. function=aspartic-type endopeptidase activity; Biological process=DNA integration
  Homolog annotation: Hit_ID=B9SQ74; Match level="QueryCoverage=86%, HitCoverage=13%, E-value=9e-19, Identity=45%"; Hit description =Pentatricopeptide repeat-containing protein, putative
  Pfam annotation: Domain name=PPR; Domain location=44-78; Score=31.1; E_value=4.5e-06; Accession=PF01535.12; Description=PPR repeat
  Pfam annotation: Domain name=PPR; Domain location=9-43; Score=40.9; E_ value=5e-09; Accession=PF01535.12; Description=PPR repeat
  Pfam module annotation: Pfam domain module=PPR::PPR; Domain location =44-78::9-43
RLVVDQTAISYSILITGMCNVGRLKDAMMVWKHMLSRGCAPDTIAYTSMIKGLCMSGMVDGGLRLFNDMLAKGDAKPDAIIYNVVLDGLIRNKINLRLRD

SEQ ID NO: 81357 - protein, 293 aa, Setaria italica
  misc_feature (275)..(275): Xaa can be any naturally occurring amino acid
  Transcript Sequence Number=SeqID_15383
  Gene Ontology: Mol. function=metalloendopeptidase activity; Cellular component=chloroplast; Biological process=proteolysis
  Homolog annotation: Hit_ID=B9R9Q2; Match level="QueryCoverage=100%, HitCoverage=40%, E-value=1e-118, Identity=66%"; Hit description =Mitochondrial intermediate peptidase, putative
  Pfam annotation: Domain name=Peptidase_M3; Domain location=1-293; Score=21.1; E_value=6.6e-11; Accession=PF01432.12; Description =Peptidase family M3
SNIVRHKADEEFNVIKDFKRRICNEKSADLEPWDEDYFIGMMKSSVHSLDASVIAKYFPLSQCLKGLNVLVESLFGATFHQIPMRDGESWHPDVIKLSLCHPDEGDLGFMYLDLYSRKGKYSGCAHFAVQGGRKLSDSNYQLPIIALVCNFSSSSGITARLNHGDVETLFHEFGHALHSLLSRTDYQHFSGTRVALDVAETPSNLFECYAWDYRVLKTFALDETTGDAIPEKLVKALNASRNMFPATELQRQIFYSIKDLTLFGEQASKPMDTIXSTVADLRRKHTSWKCAEG

SEQ ID NO: 81358 - protein, 82 aa, Setaria italica
  Transcript Sequence Number=SeqID_15384
MAAGRLYRPKAKSFWILVRRLILRRGHRPPAPGGAEEDRREERTGLLSRSSLEQLLVTDGGAPGDDDVRRCAKKHGQPVAVL

SEQ ID NO: 81359 - protein, 107 aa, Setaria italica
  Transcript Sequence Number=SeqID_15385
  Gene Ontology: Cellular component=plasma membrane
  Homolog annotation: Hit_ID=Q84VC2; Match level="QueryCoverage=100%, HitCoverage=23%, E-value=1e-31, Identity=66%"; Hit description =Putative myosin heavy chain (Fragment)
  Pfam annotation: Domain name=Myosin_HC-like; Domain location=1-107; Score=-43.1; E_value=1.7e-06; Accession=PF07058.3; Description =Myosin II heavy chain-like
MKQIEICQEETKYLDRMHRQKVAEVEKLTQTVRELEEAVLAGGAAANAVRDYQRKVQEMNEEMKTLDRELARAKVSANRVAVVVANEWKDGNDKVMPVKQWLDQRRI

SEQ ID NO: 81360 - protein, 115 aa, Setaria italica
  Transcript Sequence Number=SeqID_15386
  Gene Ontology: Mol. function=protein serine/threonine kinase activity; Biological process=protein amino acid phosphorylation
  Homolog annotation: Hit_ID=C3TX70; Match level="QueryCoverage=100%, HitCoverage=17%, E-value=5e-37, Identity=68%"; Hit description =Protein kinase
MADSGGLSANNAAAAHDDDDANTAPFPDTVQVGGSPEYKVERKLGKGGFGHVFLGRRLTAAHAARSSASAAQEVAIKFEHTSSKGCSYGPPCEWQVYTALGGTHGVPKVHYKGRQ

SEQ ID NO: 81361 - protein, 574 aa, Setaria italica
  Transcript Sequence Number=SeqID_15387
  Gene Ontology: Cellular component=plasma membrane
  Homolog annotation: Hit_ID=Q84VC2; Match level="QueryCoverage=76%, HitCoverage=95%, E-value=0.0, Identity=76%"; Hit description =Putative myosin heavy chain (Fragment)
  Pfam annotation: Domain name=Myosin_HC-like; Domain location=199-530; Score=695.6; E_value=4e-206; Accession=PF07058.3; Description=Myosin II heavy chain-like
MADPYGDGKKNQQPRPGPGPRLKPAIEMEDLINLLHGSDPVRVELTRLENELQYKEKELGDAQAEIKALRLSDRAREKAVQDLTEELAKVDEKLKLTESLLETKNLEAKKINDEKKAALAAQFAAEATLRRVHAAQKDDDMPPIEAILAPLEAELKLARQEIAKLQDDNRALDRLTKSKEAALLEAERTVQIALAKASLVDDLQNKNQELMKQIEICQEENKILDRMHRQKVAEVEKLTQTVRELEEAVLAGGAAANAVRDYQRKVQEMNEEMKTLDRELARAKVSANRVAVVVANEWKDGNDKVMPVKQWLDQRRILQGEMQQLRDKLAIAERAARSEAQLKEKFQLRLKVLEEGLRMSTSRTNVSTTRRQSIGGADGLSKANGFLSKRPSFQMRSSVSTTTTLVNHAKGASKSFDGGCRSLERYKGLVNGNGMNVSTDSSEDKESSNSDEKCNEFASAESEDLVSGALYDFVQKEVIALRKACHEKDQSLKDKDDAVEMLAKKVDTLTKAMESEAKKSRRELAAMEKELAATRLEKEQDNRAKRFGSSSGSANSSQLPPDRSLPRSGSARNM

SEQ ID NO: 81362 - protein, 548 aa, Setaria italica
  Transcript Sequence Number=SeqID_15388
  Gene Ontology: Mol. function=protein serine/threonine kinase activity; Biological process=protein amino acid phosphorylation
  Homolog annotation: Hit_ID=C3TX70; Match level="QueryCoverage=99%, HitCoverage=85%, E-value=0.0, Identity=88%"; Hit description=Protein kinase
  Pfam annotation: Domain name=Pkinase; Domain location=1-263; Score= -2.0; E_value=2.3e-08; Accession=PF00069.17; Description=Protein kinase domain
YFLGRRLTAAHAARSSASAAQEVAIKFEHTSSKGCSYGPPCEWQVYTALGGTHGVPKVHYKGRQGDYYVMIMDMLGPSLWDSWNSLGQSMSSEMVACIAVESISILESMHSKGYVHGDVKPENFLLGQPSTPQEKKLYLVDLGLATKWRDAASGQHVGYDQRPDAFRGTVRYASVHAHLGRTASRRDDLESLAYTLVFLHRGRLPWQGYQGDNKSFLVCKRKMSTSPESLCGICPQPFKQFLETVVNMKFDEEPNYSKLISLFDSLIGPNPSIRPINTDGAQKVGQKRARLLNDDDGHVKKKIRLGAPATQWISVYNSRSPMKQRYHYNVADTRLAQHVEKGNEDGLLISSISSCANLWAIIMDAGTGFTAQVYELSPHFLHKEWIMEQWDKSFYISSVAGSNNGSSLVVMSKGTPYTQQSYKVSDSFPFKWINKKWKEGFHVTSMATSGSRWAIVMSRSAGFSEQVVELDFLYPSEGIHRRWDNGYRITAMAATMDQSALILSKPRRRPRDETQETLRTTQFPSQHVKEKWAKNLYLAGICYGRTVA

SEQ ID NO: 81363 - protein, 100 aa, Setaria italica
  misc_feature (16)..(16): Xaa can be any naturally occurring amino acid
  Transcript Sequence Number=SeqID_15389
  Gene Ontology: Mol. function=mRNA (guanine-N7-)-methyltransferase activity; Cellular component=nucleus; Biological process=mRNA processing
  Homolog annotation: Hit_ID=B6TE79; Match level="QueryCoverage=93%, HitCoverage=27%, E-value=3e-37, Identity=79%"; Hit description=S -adenosylmethionine-dependent methyltransferase/ catalytic
KGIQADIVCCMQHLQXLCFESEERAKKLLNNVSSLLKPGGYFFGMTPDSSTIWTKYQKNVEASHNKGLKTVPNSIRSENYTITFEVEEEKYEFKLYPKCT

SEQ ID NO: 81364 - protein, 307 aa, Setaria italica
  Transcript Sequence Number=SeqID_15390
  Gene Ontology: Mol. function=mRNA (guanine-N7-)-methyltransferase activity; Cellular component=nucleus; Biological process=mRNA processing
  Homolog annotation: Hit_ID=B6TE79; Match level="QueryCoverage=97%, HitCoverage=87%, E-value=1e-153, Identity=86%"; Hit description=S -adenosylmethionine-dependent methyltransferase/ catalytic
  Pfam annotation: Domain name=Methyltransf_11; Domain location=5-106; Score=9.9; E_value=0.011; Accession=PF08241.4; Description =Methyltransferase domain
  Pfam annotation: Domain name=Methyltransf_12; Domain location=1-104; Score=25.6; E_value=0.00021; Accession=PF08242.4; Description =Methyltransferase domain
  Pfam annotation: Domain name=Pox_MCEL; Domain location=1-246; Score= -97.8; E_value=3.2e-08; Accession=PF03291.8; Description=mRNA capping enzyme
  Pfam module annotation: Pfam domain module=Methyltransf _11::Methyltransf_12::Pox_MCEL; Domain location=5-106::1-104::1-246
FVLLAELILKWCDAQVGHYIGIDASASGVSDARELWENKRKPFTAEFIELDPSDDDFEAQVQEKGIQADIVCCMQHLQLCFESEERAKKLLNNVSSLLKPGGYFFGMTPDSSTIWTKYQKNVEASHNKGLKTVPNSIRSENYTITFEVEEEKFPFFGKKYQLKFASEAVFENHCLVHFPSLMRLAREAGLEYVEIQNLTEFYDDNRIQFAPMLGGYSASFLDARGKLVTRSYDILGLYSTFVFQKPDPDAIPPIVTPDLHDTDNAHEEEWLRRQQASADDGRRSHTDVLPLDHEKGILGPGPADMRL

SEQ ID NO: 81365 - protein, 125 aa, Setaria italica
  Transcript Sequence Number=SeqID_15391
  Gene Ontology: Mol. function=aspartic-type endopeptidase activity; Cellular component=apoplast; Biological process=proteolysis
  Homolog annotation: Hit_ID=B9RGP5; Match level="QueryCoverage=99%, HitCoverage=27%, E-value=2e-21, Identity=44%"; Hit description =Aspartic proteinase nepenthesin-1, putative
EVPLTSGIRFQTLNYVTTIGLGGGSSGSAATNLTVIVDTGSDLTWVQCKPCSSCYAQRDPLFDPAGSATYAAVRCNASACAASLKAATGTPGSCATTGGGGSEKCYYALAYGDGSSSRGVLATDT

SEQ ID NO: 81366 - protein, 119 aa, Setaria italica
  Transcript Sequence Number=SeqID_15392
  Gene Ontology: Mol. function=coproporphyrinogen oxidase activity; Cellular component=chloroplast; Biological process=porphyrin biosynthetic process
  Homolog annotation: Hit_ID=Q2F7H7; Match level="QueryCoverage=100%, HitCoverage=29%, E-value=8e-44, Identity=72%"; Hit description =Coproporphyrinogen III oxidase
  Pfam annotation: Domain name=Coprogen_oxidas; Domain location=1-119; Score=-42.0; E_value=2.6e-13; Accession=PF01218.10; Description =Coproporphyrinogen III oxidase
DAWTRPGGGGGISRVLQGGRVFEKAAVNISVVYGVMPPEAYRAARPEAAAAAGGEKDGPVPFFAAGVSSVIHPVNPFAPTMHFNYRYFETEAPEDAPGAPRQWWFGGGTDLTPSYIIEE

SEQ ID NO: 81367 - protein, 96 aa, Setaria italica
  Transcript Sequence Number=SeqID_15393
  Gene Ontology: Mol. function=metal ion binding; Biological process =metal ion transport
  Homolog annotation: Hit_ID=Q01II0; Match level="QueryCoverage=76%, HitCoverage=85%, E-value=7e-24, Identity=78%"; Hit description =OSIGBa0159I10.5 protein
  Pfam annotation: Domain name=HMA; Domain location=17-82; Score=29.6; E_value=1.3e-05; Accession=PF00403.18; Description=Heavy-metal -associated domain
PSSLCPPSSRMAPRKVVLKVSSMSDDRVKQKAMETVADIYGIDSIGADVKEQKVTVIGDMDPVEIAKKLKKFGKIDIVSVGPAKEEKKDDKKGGKK

SEQ ID NO: 81368 - protein, 113 aa, Setaria italica
  Transcript Sequence Number=SeqID_15394
  Subcellular localization annotation: CTP_CleavageSite=12; ConfidenceScore=5.12e-01
MALASLLLPSSSASTASKAAGDRADSRRHDHHHHGSKRKKKPPPPSPQPSLSSAPRTPPGARSQRGMAVSASSSKKSPKVAAAAAAKNRPQYQQHRVQSTKKATATAASSSSS

SEQ ID NO: 81369 - protein, 148 aa, Setaria italica
  Transcript Sequence Number=SeqID_15395
  Gene Ontology: Mol. function=hydrolase activity; Biological process =metabolic process
  Homolog annotation: Hit_ID=B9SNK0; Match level="QueryCoverage=89%, HitCoverage=40%, E-value=8e-46, Identity=62%"; Hit description =Gibberellin receptor GID1, putative
  Pfam annotation: Domain name=Abhydrolase_3; Domain location=81-148; Score=-91.4; E_value=0.1; Accession=PF07859.5; Description=alphabeta hydrolase fold
MASEAAASAEPAPQVVDECRGVLFVYSDGTVVRRAQPGFATPVRDDGSVEWKDATFDEAAGLGLRLYRPRERGGRSRLPVFFYYHGGGFCIGSRAWPNCQNYCLRLAADLGALVVAPDYRLAPEHRLPAAIDDGAAAVLWLAAQGRTP

SEQ ID NO: 81370 - protein, 175 aa, Setaria italica
  Transcript Sequence Number=SeqID_15396
  Gene Ontology: Mol. function=DNA-directed DNA polymerase activity; Cellular component=DNA polymerase III complex; Biological process =DNA replication
  Homolog annotation: Hit_ID=B9RAP9; Match level="QueryCoverage=90%, HitCoverage=15%, E-value=3e-41, Identity=54%"; Hit description =Replication factor C / DNA polymerase III gamma-tau subunit, putative
SVASRRSTLGHGTEDTRLRSNDVVGSNFSGCGISYCWSGASKYRELYSDSDGPEQPLLSTDGTEAAFQSNVPYTETPRCLSQKFRPRSFSELIGLNVVAQSLLYSSCKGKVAPMYLFHGPRGTGKTSTARIFAAALNCVSLEEQRPCGFCKECVILFSGKSRDVKELDADKNGFV

SEQ ID NO: 81371 - protein, 176 aa, Setaria italica
  Transcript Sequence Number=SeqID_15397
  Pfam annotation: Domain name=DUF566; Domain location=3-176; Score =19.9; E_value=3.3e-10; Accession=PF04484.4; Description=Family of unknown function (DUF566)
  Subcellular localization annotation: CTP_CleavageSite=12; ConfidenceScore=5.20e-01
IGISHRGRQSSKGMSVPARFLQDAAASRSQRFADPGTPYLPYTSGLAASPRTAPVKKSLLNGFASSPLNRPIRQSSPSKLTGNPSRRMSSPSRARNSVGSGTSSWDHQGRSSSGYGINGEARRRWHGGSKVDCEHLLRILSNRQLQWRCVNAQADAALAAQKLTAEKFLSDAWITT

SEQ ID NO: 81372 - protein, 42 aa, Setaria italica
  Transcript Sequence Number=SeqID_15398
SGYCPLNSWEAMKGLLYMSQFRNVKMEGYMKYFIPHSLIRKN

SEQ ID NO: 81373 - protein, 61 aa, Setaria italica
  Transcript Sequence Number=SeqID_15399
ILIKVCISVPPIMPLQMPCIILDLMDSDSAMVFKKQLLPLNICRIAVHKVLHCRRRIKFLQ

SEQ ID NO: 81374 - protein, 161 aa, Setaria italica
  Transcript Sequence Number=SeqID_15400
  Gene Ontology: Mol. function=aspartic-type endopeptidase activity; Cellular component=membrane; Biological process=RNA-dependent DNA replication
  Homolog annotation: Hit_ID=Q75L76; Match level="QueryCoverage=98%, HitCoverage=29%, E-value=1e-67, Identity=80%"; Hit description =Putative MATE efflux family protein
  Pfam annotation: Domain name=MatE; Domain location=1-157; Score =142.1; E_value=1.8e-39; Accession=PF01554.10; Description=MatE
LETWYYQILVLIAGLLKDPDLALASLSVCMTISGWVLMISVGFNAAASVRVSNELGAGNPKSAAFSVLVVTVLSFILSVIISIVILICRDYISYIFTEGEDVSRAVSQLTPLLAFTLILNGIQPVLSGVAVGCGWQAFVAYVNVGCYYIVGIPLGCLLGST

SEQ ID NO: 81375 - protein, 237 aa, Setaria italica
  misc_feature (125)..(125): Xaa can be any naturally occurring amino acid
  Transcript Sequence Number=SeqID_15401
  Gene Ontology: Mol. function=drug transporter activity; Cellular component=membrane; Biological process=multidrug transport
  Homolog annotation: Hit_ID=Q84LH1; Match level="QueryCoverage=76%, HitCoverage=35%, E-value=3e-81, Identity=88%"; Hit description =Putative ripening regulated protein DDTFR18
  Pfam annotation: Domain name=MatE; Domain location=11-175; Score =127.7; E_value=3.8e-35; Accession=PF01554.10; Description=MatE
DLPGFAGLSIASAVMLALEVWYFQVLILLAGMLPDPQVALDSLTVCTSIQSWVFMISVGFNAAASVRVGNELGAGNPRSAAFSAWMVTALSAFVSAIAGLVTFLLRDKLSYIFTTGEVVSRARSXDLCPLLVGTILLCGIQPVLSGVAVGCGWQAMVAYINIGCYYFIGLPLGVLLGFKFDFGIKGLWGGMIGGTLIQTLILIWITLRTDWNKEVEEARKRLDKWDDTRQPLLADKE

SEQ ID NO: 81376 - protein, 308 aa, Setaria italica
  Transcript Sequence Number=SeqID_15402
  Gene Ontology: Mol. function=drug transporter activity; Cellular component=membrane; Biological process=multidrug transport
  Homolog annotation: Hit_ID=Q84LH1; Match level="QueryCoverage=86%, HitCoverage=52%, E-value=1e-98, Identity=73%"; Hit description =Putative ripening regulated protein DDTFR18
  Pfam annotation: Domain name=MatE; Domain location=2-152; Score =128.4; E_value=2.3e-35; Accession=PF01554.10; Description=MatE
IVMSSTTQIVCGQLGNVQLAAASLGNNGIQVFAYGLMLGMGSAVETLCGQAYGAEKYEMLGVYLQRSTVLLMATGVPLAAMYAFSEPILLLLGQSPEIAGAAAEFAYGLIPQIFAYAANFPIQKFLQAQSIVAPSAYILAASFVLHVALSWLAVYVLGLGLLGASLTLSLTWWVLVLGQFAYIVWSPRFRATWAGFTWAAFADLPGFAGLSIALAVMLALEVWYFQVLILLAGMLPDPQVALDSLTVCTSIQSWVFMISVGFNAAARLVHPLSHCIFHLLGTIFLKKYKTLWIEYASSESPVSCYLTV

SEQ ID NO: 81377 - protein, 512 aa, Setaria italica
  Transcript Sequence Number=SeqID_15403
  Gene Ontology: Mol. function=aspartic-type endopeptidase activity; Cellular component=membrane; Biological process=RNA-dependent DNA replication
  Homolog annotation: Hit_ID=Q75L76; Match level="QueryCoverage=94%, HitCoverage=91%, E-value=0.0, Identity=78%"; Hit description =Putative MATE efflux family protein
  Pfam annotation: Domain name=MatE; Domain location=290-453; Score =163.3; E_value=7.3e-46; Accession=PF01554.10; Description=MatE
  Pfam annotation: Domain name=MatE; Domain location=69-229; Score =152.4; E_value=1.4e-42; Accession=PF01554.10; Description=MatE
  Pfam module annotation: Pfam domain module=MatE::MatE; Domain location=290-453::69-229
MAGGAAGASKLESPLLAAATASHTGSGHGVEAVSGRLESILSDESLPWGRRMSAATLVEMRLLVRLAAPAVVVYMINYLMSMSTQIFSGHLGTLELAAASLGNTGIQVFAYGLMLGMGSAVETLCGQAYGAHKYDMLGVYLQRSTVLLMATGVPLAVLYAFSRPILVLLGESPEIASAAAVFVYGLVPQIFAYAANFPIQKFLQAQSIMAPSAYISAATLAAHLALSYLVVYKLGLGLLGASLMLSVSWWAIVVAQFVYIVTSRRCRLTWTGFSWQAFSGLPSFFKLSLASAVMLCLETWYFQILVLIAGLLKDPELALASLSVCMTISGWVFMISVGFNAAASVRVSNELGAGNPKSAAFSVLVVTVLSFILSVIISVVILLCRDYISYIFTEGEDVSRAVSQLTPLLAFTLILNGIQPVLSGVAVGCGWQAFVAYVNVGCYYIVGIPLGCLLGFYFDLGAAGIWSGMIGGTLMQTLILIWVTFRTNWVKEVEEAQKRLNKWEEKSPLLLD

SEQ ID NO: 81378 - protein, 194 aa, Setaria italica
  Transcript Sequence Number=SeqID_15404
  Gene Ontology: Biological process=cell wall catabolic process
  Homolog annotation: Hit_ID=Q10SU7; Match level="QueryCoverage=98%, HitCoverage=51%, E-value=3e-65, Identity=67%"; Hit description=LysM domain containing protein, expressed
MGYYGLTPTPQENLTNAGTEMATYAKGHHRKARSLSSSFSIENGDANRETDDAEKPIRRRQKADVELTTREDNGGSLLARAGQGLAMRPKPGSRADMNSSQQDLLATWMPSYGDGLQAVKKSSSTPEFQDSDSISIASVWLKSKWNLKPDAFTLTLPLPLFDGIPKPLFDSIPKPLLDNIPNSIAAWRNKAAKD

SEQ ID NO: 81379 - protein, 121 aa, Setaria italica
  Transcript Sequence Number=SeqID_15405
  Homolog annotation: Hit_ID=Q5ZA32; Match level="QueryCoverage=100%, HitCoverage=9%, E-value=2e-42, Identity=71%"; Hit description=WD-40 repeat protein-like
  Subcellular localization annotation: CTP_CleavageSite=41; ConfidenceScore=5.46e-01
LDKLLGNTTPTHLESAASMPPSSEFSTAPAVALPASSSAPPARMLSSKMPRGRLLGPGDRAVHDVDSRLPGEAEPPQLEVTPITKYTSDPGLVLGRQIAVNRTYIVYGLKLGNIRVLNINT

SEQ ID NO: 81380 - protein, 131 aa, Setaria italica
  misc_feature (35)..(35): Xaa can be any naturally occurring amino acid
  Transcript Sequence Number=SeqID_15406
IFGQLKYRGFGKKRSCFMWKPKRSLNGSPVCTVIXRWKPELPASDSDYPCWRTERFFARLPLHQTASKYYNTKTCPKKEKNQFKINIKSVSTQFLTKSMVSAWLLPMHCLKSFSPKLPCHRNTSTIYTPKS

SEQ ID NO: 81381 - protein, 467 aa, Setaria italica
  Transcript Sequence Number=SeqID_15407
  Gene Ontology: Mol. function=protein serine/threonine kinase activity; Cellular component=plasma membrane; Biological process =protein amino acid phosphorylation
  Homolog annotation: Hit_ID=B9RS14; Match level="QueryCoverage=100%, HitCoverage=50%, E-value=2e-96, Identity=35%"; Hit description =Serine-threonine protein kinase, plant-type, putative
  Pfam annotation: Domain name=LRR_1; Domain location=100-123; Score =8.4; E_value=7.4; Accession=PF00560.25; Description=Leucine Rich Repeat
  Pfam annotation: Domain name=LRR_1; Domain location=125-147; Score =3.0; E_value=81; Accession=PF00560.25; Description=Leucine Rich Repeat
  Pfam annotation: Domain name=LRR_1; Domain location=149-171; Score =14.2; E_value=0.55; Accession=PF00560.25; Description=Leucine Rich Repeat
  Pfam annotation: Domain name=LRR_1; Domain location=173-194; Score =6.3; E_value=19; Accession=PF00560.25; Description=Leucine Rich Repeat
  Pfam annotation: Domain name=LRR_1; Domain location=198-220; Score =10.4; E_value=3.2; Accession=PF00560.25; Description=Leucine Rich Repeat
  Pfam annotation: Domain name=LRR_1; Domain location=222-244; Score =18.2; E_value=0.035; Accession=PF00560.25; Description=Leucine Rich Repeat
  Pfam annotation: Domain name=LRR_1; Domain location=246-268; Score =11.7; E_value=1.7; Accession=PF00560.25; Description=Leucine Rich Repeat
  Pfam annotation: Domain name=LRR_1; Domain location=27-49; Score =11.6; E_value=1.8; Accession=PF00560.25; Description=Leucine Rich Repeat
  Pfam annotation: Domain name=LRR_1; Domain location=271-293; Score =2.3; E_value=1.1e+02; Accession=PF00560.25; Description=Leucine Rich Repeat
  Pfam annotation: Domain name=LRR_1; Domain location=295-317; Score =9.0; E_value=5.9; Accession=PF00560.25; Description=Leucine Rich Repeat
  Pfam annotation: Domain name=LRR_1; Domain location=3-25; Score=5.1; E_value=32; Accession=PF00560.25; Description=Leucine Rich Repeat
  Pfam annotation: Domain name=LRR_1; Domain location=319-341; Score =8.5; E_value=7.3; Accession=PF00560.25; Description=Leucine Rich Repeat
  Pfam annotation: Domain name=LRR_1; Domain location=343-363; Score =8.9; E_value=6; Accession=PF00560.25; Description=Leucine Rich Repeat
  Pfam annotation: Domain name=LRR_1; Domain location=366-385; Score =7.0; E_value=14; Accession=PF00560.25; Description=Leucine Rich Repeat
  Pfam annotation: Domain name=LRR_1; Domain location=387-410; Score =8.2; E_value=8.4; Accession=PF00560.25; Description=Leucine Rich Repeat
  Pfam annotation: Domain name=LRR_1; Domain location=412-434; Score =11.8; E_value=1.7; Accession=PF00560.25; Description=Leucine Rich Repeat
  Pfam annotation: Domain name=LRR_1; Domain location=436-458; Score =9.3; E_value=5.1; Accession=PF00560.25; Description=Leucine Rich Repeat
  Pfam annotation: Domain name=LRR_1; Domain location=52-74; Score =14.1; E_value=0.6; Accession=PF00560.25; Description=Leucine Rich Repeat
  Pfam annotation: Domain name=LRR_1; Domain location=76-98; Score =16.4; E_value=0.12; Accession=PF00560.25; Description=Leucine Rich Repeat
  Pfam module annotation: Pfam domain module=LRR_1::LRR_1::LRR_1::LRR _1::LRR_1::LRR_1::LRR_1::LRR_1::LRR_1::LRR_1::LRR_1::LRR_1::LRR _1::LRR_1::LRR_1::LRR_1::LRR_1::LRR_1::LRR_1; Domain location=100 -123::125-147::149-171::...
  Pfam module annotation: Domain location=173-194::198-220::222 -244::246-268::27-49::271-293::295-317::3-25::319-341::343-363::366 -385::387-410::412-434::436-458::52-74::76-98
LTALTALDLSNTSVGGGFPAFLYNCTGIARIDLSNNRLAGKLPADIGRLGGNLTYLALDHNSFTGTIPAAVSKLKNLTYLALNENQLTGTIPPELGDLISLEALKLESNPFDAGMLPESFKSLTKLTTVWLANCSLGGEFPNYVTQMPGMQWLDLSTNRFTGNIPPGIWNLQKLQYLYLFANNLTGDIGINGKIGATELVEVDLSMNQLSGTISESFGSLLKLRYLNLHQNNLTGEIPASIARLPSLEFLWLWDNSLSGELPAELGKQTPLLRDIQIDSNNFVGPIPEGICSNKRLLVLTASDNQLNGLIPSSLASCPTLIWLQLQDNELSGEVPAALWTVPKLLTLFLQNNGQLSGTLPENLYWNISRLSIDNNRFTGRIPATAAKLQKFHASNNLFSGDIPAGFAAGMPLLQELDLSANQLSGAIPESMALLCAVSQMNLSHNQLTGEIPAGLGSIPVLNLLDLS

SEQ ID NO: 81382 - protein, 482 aa, Setaria italica
  Transcript Sequence Number=SeqID_15408
  Gene Ontology: Mol. function=metal ion binding; Cellular component =ribonucleoprotein complex
  Homolog annotation: Hit_ID=Q8S5X9; Match level="QueryCoverage=93%, HitCoverage=69%, E-value=0.0, Identity=86%"; Hit description =Putative RING zinc finger protein
  Pfam annotation: Domain name=IBR; Domain location=78-140; Score=79.7; E_value=1.1e-20; Accession=PF01485.13; Description=IBR domain
RSKRGQHSTISFAAPSFSCLAIYHTFPIPHLGWTGYFIVKINEGQSRRVRCMAPKCNAICDEAVIRKLVIARRPDLAERFERFLLESYIEDNDTVKWCPSVPHCGNAIRVKGDIYCEVECACGCQFCFNCSLQAHSPCSCMMWELWIKKCRDESETVNWITVNTKPCPKCHKPVEKNGGCNLVACICGQAFCWLCGGATGRDHTWSSISGHSCGRFTDDQTKKTEQARRDLYRYMHYHNRYKAHTDSLKQEAKLKNDIQGKISISENKESKIKDYSWVINGLNRLFRSRRVLSYSYPFAFYMFGDEIFKDEMTPEERELKQNLFEDQQQQLEFNVERLSGFLEKDFQNFTDDEVMDTMKHVINLSNVVDRLCKQMYQCIENDLLYPLRTPHNIAPYKSKGLDRASELDISWDSAEQSSQSTKRIQDEHRSQHASTNLGKRAPELHGSSSENRVRPHKRERQDANGGGALFDLNVPAEVADKI

SEQ ID NO: 81383 - protein, 93 aa, Setaria italica
  misc_feature (35)..(35): Xaa can be any naturally occurring amino acid
  misc_feature (55)..(55): Xaa can be any naturally occurring amino acid
  Transcript Sequence Number=SeqID_15409
AGEGAATAWSVRRCCCCSCAAVGTERKMRGGRGSXGGDLRWACAGLAMLLLPADXSCGAKAERTILSGSPLAAAAATESCCCWLVAAKASSFC

SEQ ID NO: 81384 - protein, 164 aa, Setaria italica
  misc_feature (54)..(54): Xaa can be any naturally occurring amino acid
  Transcript Sequence Number=SeqID_15410
  Gene Ontology: Mol. function=catalytic activity; Cellular component =plasma membrane
  Homolog annotation: Hit_ID=Q2R637; Match level="QueryCoverage=93%, HitCoverage=35%, E-value=2e-65, Identity=75%"; Hit description =Probable protein phosphatase 2C 75
KEGEGRRREEEVPGRIAGNGVGNAACLFTRQGRKGTNQDAMVVWENINGRADTXFCGVFDGHGPHGHIVARKVRDTLPLKLCDLIYDDYGESPISNSDGSILEETLSPYADAEDKSPMSGQKQEHREFFCSMKDSFRKAFRVTDKELKLHRNIDSICSGSTAVT

SEQ ID NO: 81385 - protein, 97 aa, Setaria italica
  Transcript Sequence Number=SeqID_15411
  Subcellular localization annotation: CTP_CleavageSite=74; ConfidenceScore=5.56e-01
ADPTPPTAVPPPPPRHHRPPRKPGTQPAPPPSGIPVEPSPASPAPTSGDPLIPTPTSPSPSGTPGSGTPSVPAPATAVDPASPVTNGDRGSNKSYKD

SEQ ID NO: 81386 - protein, 68 aa, Setaria italica
  Transcript Sequence Number=SeqID_15412
PPFIFLAYSRSDAYWHMSKLSELFVIKVHSMLFQELSESYDTLTSGGKPTSARNLHFKSICKLKHYTI

SEQ ID NO: 81387 - protein, 59 aa, Setaria italica
  Transcript Sequence Number=SeqID_15413
HFSSRWLAKGGIGISQGARAAMGWRQRLRPGSRLKGCSGMAAMFQPIDYHGNIREAMDR

SEQ ID NO: 81388 - protein, 56 aa, Setaria italica
  Transcript Sequence Number=SeqID_15414
VSEYVTVYLTYQSSVGFAAINGPVVQNCRFVSSKASILSFVKCYTQALLFYRAPPH

SEQ ID NO: 81389 - protein, 101 aa, Setaria italica
  Transcript Sequence Number=SeqID_15415
  Gene Ontology: Mol. function=nucleotide binding; Biological process =defense response
  Homolog annotation: Hit_ID=A7LM74; Match level="QueryCoverage=62%, HitCoverage=20%, E-value=4e-15, Identity=63%"; Hit description =Jasmonate-induced protein
GVHHDSTVKPHYLDHNGQQCTAGPSGGCGGSARKLELSKFGPWGGDGGESKDIKIPPYRLDSITISSGVIIDSIDFSYTDHDGLYHTTGPWGGHGGNNNTR

SEQ ID NO: 81390 - protein, 75 aa, Setaria italica
  Transcript Sequence Number=SeqID_15416
LQCTRCSCIFFHRWTLLFGYKVQIALVGMQAPNISMFESSMLWILILYHFKKKENQFDHEHQSESVRMTVQNKFQ

SEQ ID NO: 81391 - protein, 87 aa, Setaria italica
  Transcript Sequence Number=SeqID_15417
  Gene Ontology: Mol. function=transferase activity, transferring nitrogenous groups; Biological process=histidine biosynthetic process
  Homolog annotation: Hit_ID=B6TRS1; Match level="QueryCoverage=100%, HitCoverage=20%, E-value=3e-20, Identity=63%"; Hit description =Histidinol-phosphate aminotransferase
  Subcellular localization annotation: CTP_CleavageSite=46; ConfidenceScore=5.50e-01
MDWATRFRIRNPSPAAASHFAGERRRPGGRASFRPMSSAAPVEEPAASEAKRRPSGESFIRRHLRTLAPYQPILPFEVLSARLGRRP

SEQ ID NO: 81392 - protein, 96 aa, Setaria italica
  Transcript Sequence Number=SeqID_15418
  Subcellular localization annotation: CTP_CleavageSite=73; ConfidenceScore=5.34e-01
VVVRGPPPEPRRHHRRRPGARGPGTRRRQRRTMKPQPSYVDAARSLARTVCICRRRLVSPPVSGTRSGLASPRSMMIFVAGDKRAGRAKLNPPGLC

SEQ ID NO: 81393 - protein, 74 aa, Setaria italica
  Transcript Sequence Number=SeqID_15419
PGRPAAQRRGRLEPFLVPASDEDSETSFRVVCVVECKPGQLVAFVFSSATGQWESLTVDAGLQPSCKFSWSSYA

SEQ ID NO: 81394 - protein, 80 aa, Setaria italica
  Transcript Sequence Number=SeqID_15420
ENISKWRRATCSPGRFHGLEMIMYRLCTVFICCQRPYCYFQMLTSGQQIYHRTHLFCQETDNKDKTGKPSIKGKGRKLTG

SEQ ID NO: 81395 - protein, 270 aa, Setaria italica
  misc_feature (106)..(106): Xaa can be any naturally occurring amino acid
  Transcript Sequence Number=SeqID_15421
  Gene Ontology: Mol. function=substrate-specific transmembrane transporter activity; Cellular component=integral to membrane; Biological process=transmembrane transport
  Homolog annotation: Hit_ID=B6SSR3; Match level="QueryCoverage=99%, HitCoverage=52%, E-value=1e-116, Identity=79%"; Hit description =Solute carrier family 2, facilitated glucose transporter member 8
  Pfam annotation: Domain name=Sugar_tr; Domain location=1-270; Score= -81.9; E_value=9.7e-06; Accession=PF00083.16; Description=Sugar (and other) transporter
LATSNQLFICSGCSAAYIIGALLPWRSLVLVGLVPCAVLLVGLFFIPESPRWLANVGREKEFHASLQKFRGRDSDISEESAEIKGYIESIHRLPKAKIQDLFQSKXIYAVTVGVSLMIFQQLGGINALGFYTSYIFSSAGFSGKLGTTLIGIIQIPITLLGALLMDRSGRRALLLVSSSGTFLGCFLTGLSFYFKAQGLYSQLVPTLALCGILVYYAAYSVGMGPVPWVIMSEIFSIDMKAIAGGLVTLVSWIGSFVVSYSFNSLMDWNP

SEQ ID NO: 81396 - protein, 148 aa, Setaria italica
  misc_feature (44)..(44): Xaa can be any naturally occurring amino acid
  Transcript Sequence Number=SeqID_15422
  Gene Ontology: Mol. function=substrate-specific transmembrane transporter activity; Cellular component=integral to membrane; Biological process=transmembrane transport
  Homolog annotation: Hit_ID=B6SSR3; Match level="QueryCoverage=93%, HitCoverage=27%, E-value=5e-55, Identity=76%"; Hit description =Solute carrier family 2, facilitated glucose transporter member 8
FWFCFLFVLSVLTIGAMLGALTSGRLADILGRKMTMRFAAVVGXFGWLTVYFAKDAMMLYAGRVLLGYCTGVLSYVVPVFISEIAPKDIRGGLATSNQLFICSGCSAAYIIGALLPWRSLVLVGLVPCAVLLVGLFFIPESPRWLVRR

SEQ ID NO: 81397 - protein, 97 aa, Setaria italica
  Transcript Sequence Number=SeqID_15423
  Homolog annotation: Hit_ID=Q9ZWA0; Match level="QueryCoverage=87%, HitCoverage=15%, E-value=1e-22, Identity=50%"; Hit description =F11M21.29 protein
  Pfam annotation: Domain name=TPX2; Domain location=43-97; Score=53.0; E_value=1.1e-12; Accession=PF06886.3; Description=Targeting protein for Xklp2 (TPX2)
RERMEREEAQRRIIKAQPILKEDPIPLPEKERKPLTEVQQFALHVDERAVQRSEFDNMIKEKEKTYKRLREENEFAQKIEEEKALKQLRRSMVPHAR

SEQ ID NO: 81398 - protein, 301 aa, Setaria italica
  Transcript Sequence Number=SeqID_15424
  Homolog annotation: Hit_ID=B6SI40; Match level="QueryCoverage=97%, HitCoverage=73%, E-value=1e-89, Identity=59%"; Hit description=mTERF family protein
  Pfam annotation: Domain name=mTERF; Domain location=1-272; Score= -23.0; E_value=1.5e-06; Accession=PF02536.6; Description=mTERF
  Subcellular localization annotation: CTP_CleavageSite=9; ConfidenceScore=5.21e-01
CPSSRRPTFAAVVAADPLLLHSSVKTVGPRLLALRDRLGLSPPQIVRFLLVGSRSLRNCDVLPKLQFWISFYGSFEQVLVAVKRNNSLLEVSLERVIEPKIALFRQFGVRDIAQMCSNNPRLLTFSLERLKDFLLRAEELGVPRTSRMFKYAVSLVASNSKEKVAAKLVLLKRILGGSESDVYTAMSKMPSILSISEENITRKIEFLVNEVGMEPQYILERPILLGYSLKKRLLPRHRVVKALQAKGLLNSNMNLFSLAVIGEEAFRLKFVDCHKDSVPGLAGYYATACDGDVPPEVQLLS

SEQ ID NO: 81399 - protein, 95 aa, Setaria italica
  misc_feature (18)..(18): Xaa can be any naturally occurring amino acid
  Transcript Sequence Number=SeqID_15425
  Gene Ontology: Mol. function=hydrolase activity; Cellular component =cytosol; Biological process=nucleotide biosynthetic process
  Homolog annotation: Hit_ID=B6TEV8; Match level="QueryCoverage=96%, HitCoverage=39%, E-value=3e-44, Identity=95%"; Hit description =Deoxycytidylate deaminase
  Pfam annotation: Domain name=dCMP_cyt_deam_1; Domain location=1-53; Score=-18.5; E_value=0.021; Accession=PF00383.14; Description =Cytidine and deoxycytidylate deaminas
PGSYVVHAEVNAILNTNXHASAAGQKLYVTMFPCNECAKIIIQSGVSEVIYFVEKRIDNSAHVYVASHKLLSMAGVKVRKHQPQMAHIPIKFQEP

SEQ ID NO: 81400 - protein, 46 aa, Setaria italica
  Transcript Sequence Number=SeqID_15426
  Homolog annotation: Hit_ID=B6SUF7; Match level="QueryCoverage=73%, HitCoverage=7%, E-value=4e-11, Identity=97%"; Hit description=WD -repeat domain phosphoinositide-interacting protein 3
MPGYSLAFSNNLQYLAVSSDKGTIHVFNLKINVGSGAGIGLSFAVD

SEQ ID NO: 81401 - protein, 449 aa, Setaria italica
  Transcript Sequence Number=SeqID_15427
  Gene Ontology: Mol. function=metal ion binding
  Homolog annotation: Hit_ID=B6SUF7; Match level="QueryCoverage=79%, HitCoverage=81%, E-value=0.0, Identity=90%"; Hit description=WD -repeat domain phosphoinositide-interacting protein 3
  Pfam annotation: Domain name=WD40; Domain location=262-301; Score =14.8; E_value=0.37; Accession=PF00400.24; Description=WD domain, G -beta repeat
  Pfam annotation: Domain name=WD40; Domain location=307-345; Score =16.3; E_value=0.13; Accession=PF00400.24; Description=WD domain, G -beta repeat
  Pfam module annotation: Pfam domain module=WD40::WD40; Domain location=262-301::307-345
MASPAAAAPAPPNPNPVPDDPPLPPSQEEEDEETPDADTSSPPPPPPAPTTSIEPTPSGDEESESDDSSSVSSAASSVPAASGGAAERPFPAAKDLLHISFNQDYGCFAAGTKSGFRIYNCDPFREIFRRDLAAEGDGSGGGGIGVVEMLFRCNILALVGGGDNPHYPPNKVMIWDDHQSRCIGELSFRSPVRGVRLRRDRIIVVLENKIFVYNFADLKLVHQIETAPNPKGLCAVSQQPGSIVLVCPGVQKGQVRVEHYGARKTKFINAHTSRVACFALSQDGRLIATASTKGTLVRIYNAAEGNLLQEVRRGADRAEIYSLAFSNNLQYLAVSSDKGTIHVFNLKINVGSTANDKPMPAPDPEVPHISPPLSFIKGVLPKYFHSEWSVAQFRLHEGEQYIVAFGHEKNTVAVVGMDGSFYRCQFDPVNGGEMLQLECYNFLKPSDQQ

SEQ ID NO: 81402 - protein, 177 aa, Setaria italica
  misc_feature (23)..(23): Xaa can be any naturally occurring amino acid
  Transcript Sequence Number=SeqID_15428
  Homolog annotation: Hit_ID=B4WGK3; Match level="QueryCoverage=57%, HitCoverage=47%, E-value=5e-11, Identity=37%"; Hit description =TENA/THI-4 family
  Subcellular localization annotation: CTP_CleavageSite=46; ConfidenceScore=5.38e-01
SSSSSSSSSSCWSSTTKGRPAMXSSSEEGAAAVVAEGSAARRFWIAASTREAAFAAYTPFLLSLAAGNLHLDAFRHYIAQDAHFLHAFAHAYEMAEDCADDDDDRATIAALRKAILQELNLHASVLKEWGVDPTKEIPPSAATTKYTDFLLATAAGKVDGAKGSDKMVTPFEKTKIA

SEQ ID NO: 81403 - protein, 85 aa, Setaria italica
  Transcript Sequence Number=SeqID_15429
  Gene Ontology: Mol. function=ATP-dependent helicase activity; Cellular component=nucleus; Biological process=ribosome biogenesis
  Homolog annotation: Hit_ID=Q0DLB9; Match level="QueryCoverage=100%, HitCoverage=14%, E-value=3e-41, Identity=96%"; Hit description=DEAD -box ATP-dependent RNA helicase 17
AHLQDKMGFQTPTRIQAQAIPVAMSGQHMLVKAATGTGKTLAYLAPIVHLLQMREPRVDRTHGTFALVLVPTRELCLQVYGIAQQ

SEQ ID NO: 81404 - protein, 332 aa, Setaria italica
  misc_feature (294)..(294): Xaa can be any naturally occurring amino acid
  misc_feature (319)..(319): Xaa can be any naturally occurring amino acid
  Transcript Sequence Number=SeqID_15430
  Gene Ontology: Mol. function=ATP-dependent helicase activity; Cellular component=nucleus; Biological process=ribosome biogenesis
  Homolog annotation: Hit_ID=Q0DLB9; Match level="QueryCoverage=99%, HitCoverage=54%, E-value=1e-158, Identity=84%"; Hit description=DEAD- box ATP-dependent RNA helicase 17
  Pfam annotation: Domain name=DEAD; Domain location=1-139; Score=66.5; E_value=1e-16; Accession=PF00270.21; Description=DEADDEAH box helicase
  Pfam annotation: Domain name=Helicase_C; Domain location=269-329; Score=35.8; E_value=1.8e-07; Accession=PF00271.23; Description =Helicase conserved C-terminal domain
  Pfam module annotation: Pfam domain module=DEAD::Helicase_C; Domain location=1-139::269-329
MVALVLVPTRELCLQVYGIAQQLVHRFHWIVPGYVMGGENRAKEKARLRKGISILIATPGRLLDHLQHTASFVYSNLRWIVFDEADSILELGFGKAVEDILENLGSRNGAPDQNKNKGEHIRRQNLLLSATLNEKVNRLAKISLKNPVMIGLDDQKKPSGKTNRLGNSHTSLLSDDDEDRILEKRNDILEHAGAVDDFKLPAQLVQRYVKVSCGSRLAVLLTILKSLFERQISQKVVIFLSTCDSVDFHHTVLSQLEWSSGPQLDMDKKQKFLSCKVFRLHGNMEQDDRKRSFXGFGSEKSAILVSTDVAARGLDFPKXKYIIQYDSPGEAS

SEQ ID NO: 81405 - protein, 329 aa, Setaria italica
  Transcript Sequence Number=SeqID_15431
  Gene Ontology: Cellular component=chloroplast
  Homolog annotation: Hit_ID=Q9S7A6; Match level="QueryCoverage=97%, HitCoverage=81%, E-value=1e-71, Identity=45%"; Hit description =F21O3.2 protein
  Pfam annotation: Domain name=DUF760; Domain location=1-329; Score =628.4; E_value=7.1e-186; Accession=PF05542.3; Description=Protein of unknown function (DUF760)
MPDDSEFESVDAPLEPETWEGSFLCGLLKNLPHIFLAAAAKQLQELSNQREDTLNRWEHSIGSKEDCLHRRIAELKEQECQTAIEDIMYMLIVYKFFKIEVPMVPNLSKLISNRRLQLWPPRETDLESIHGPEVLELIREHLTSIIRWVHRNGPKINRSTLRIKRLQFGRIYSASIMYGYFLKSVSIRHHLELTLTRSEELPPPIQFLNAQFTNKQEQEEAVGGSGEVSSSSKPSSVVNPHDLKGYMMGFDPKTLQLCAKIRSCEAANLIERHSWALFGENMEVTQENDEAVILDPSSLKRLLLEAIAFGSFLWDVEDYVDEIYKLSDN

SEQ ID NO: 81406 - protein, 79 aa, Setaria italica
  Transcript Sequence Number=SeqID_15432
QLNKLTEDIRVFKSYDLAHKYDANSSCSTACHVGKLTEIDEGFNSLKVLLVVVFQQIREMLTLVNASIHDLQWEHELQL

SEQ ID NO: 81407 - protein, 140 aa, Setaria italica
  misc_feature (99)..(99): Xaa can be any naturally occurring amino acid
  Transcript Sequence Number=SeqID_15433
  Subcellular localization annotation: CTP_CleavageSite=28; ConfidenceScore=5.03e-01
YPPPLVAMPLCCHPQSIKGGGSPDGKRRCHNIVGTKNGVSTPATTSLDTLISLQARGITSEPLIYRNPTSFEGRKPQRRDGQLLRTHSAFDLMTPSKRXAATKRGARSGHTTNHEEQTTSRDETMTTGRRILQLPMMLSG

SEQ ID NO: 81408 - protein, 58 aa, Setaria italica
  Transcript Sequence Number=SeqID_15434
DCSKYMTAPEFRNSELEYLIDILYVHTTRLAAQCLQLQKEMPSPSSHSYRSRPPINVN

SEQ ID NO: 81409 - protein, 264 aa, Setaria italica
  misc_feature (21)..(21): Xaa can be any naturally occurring amino acid
  Transcript Sequence Number=SeqID_15435
  Homolog annotation: Hit_ID=Q8YX69; Match level="QueryCoverage=68%, HitCoverage=58%, E-value=2e-38, Identity=44%"; Hit description =Alr1346 protein
  Pfam annotation: Domain name=DUF1517; Domain location=3-264; Score =478.9; E_value=7e-141; Accession=PF07466.3; Description=Protein of unknown function (DUF1517)
  Subcellular localization annotation: CTP_CleavageSite=92; ConfidenceScore=5.72e-01
SSRSSSPPSYGYSAPAPRGGXYTSAPFYSPSPFVSVGPAVGIGFGGSGFLMALMGFAAFLYLAGFLSDSPGNGSVLTETQKTTVLKLQVGLLGMARSFQKELDQIAEKADTSTPAGLSYVLTETTLALLRHPDCCISAYSSVDVKRSMDDGEKRFNQLSIEERGKFDEETLVNVNSIKRNKAGSQRSSGFSNEYIVITILVAAEGVYKLPVINSSNDLKTALQNLGGIPSSKILAVEVLWTPQNENDTLSERELLEDYPLLRPL

SEQ ID NO: 81410 - protein, 98 aa, Setaria italica
  Transcript Sequence Number=SeqID_15436
  Homolog annotation: Hit_ID=Q8YX69; Match level="QueryCoverage=72%, HitCoverage=21%, E-value=6e-16, Identity=52%"; Hit description =Alr1346 protein
  Pfam annotation: Domain name=DUF1517; Domain location=1-98; Score =3.5; E_value=8.9e-12; Accession=PF07466.3; Description=Protein of unknown function (DUF1517)
YEETLVNVNSIKRNKAGSQRSSGFSNEYIVITILVAAEGVYKLPVINSSNDLKTALQNLGGIPSSKILAVEVLWTPQNENDTLSERELLEDYPLLRPL

SEQ ID NO: 81411 - protein, 142 aa, Setaria italica
  Transcript Sequence Number=SeqID_15437
  Gene Ontology: Mol. function=ATPase activity, coupled to transmembrane movement of substances; Cellular component=integral to membrane; Biological process=transport
  Homolog annotation: Hit_ID=Q71CZ3; Match level="QueryCoverage=79%, HitCoverage=7%, E-value=3e-49, Identity=84%"; Hit description =Multidrug resistance associated protein MRP2
  Pfam annotation: Domain name=ABC_tran; Domain location=1-105; Score= -9.5; E_value=2.1e-05; Accession=PF00005.19; Description=ABC transporter
FYQNARIEAHGTCSSYEILLTWIAVIENGENWSVGQRQLVCLGRVILKRSKILVLDEATASVDTATDNLIQKTLRQQFLETTVITIAHRITSVLDSDMVLLLNNGVAIEHDTPTKLLEDKSSLFSKLVSEYTMRSTAYIDDE

SEQ ID NO: 81412 - protein, 178 aa, Setaria italica
  Transcript Sequence Number=SeqID_15438
  Gene Ontology: Mol. function=hydrolase activity; Biological process =metabolic process
  Homolog annotation: Hit_ID=B6THR7; Match level="QueryCoverage=100%, HitCoverage=48%, E-value=4e-75, Identity=79%"; Hit description=prMC3
  Pfam annotation: Domain name=Abhydrolase_3; Domain location=1-178; Score=64.6; E_value=3.8e-16; Accession=PF07859.5; Description =alphabeta hydrolase fold
AAVRWLRHQAAVAATRAAAPDELSWWRARCGFDRVFLMGDSAGANVAFHVAARLGQGHLGALHPVTVRGAVIVQPFFGGEARTASEKTMAQPPGSALTLPTSDCYWRLALPAGAGRDHPWCNPLSRAAPRLETLPLPPVLVCVSEQDILRDRNLELCRAMRKAGKSVEQATYGGVGHA

SEQ ID NO: 81413 - protein, 79 aa, Setaria italica
  Transcript Sequence Number=SeqID_15439
  Gene Ontology: Mol. function=protein binding
  Homolog annotation: Hit_ID=B6U5C3; Match level="QueryCoverage=86%, HitCoverage=41%, E-value=6e-27, Identity=83%"; Hit description=AGG2
MVYSDNTQRVFMQEELNELETMEPASTACQDVITSTEGKPDPLLPITSGPENSSWDRWFQRVRSSRSNKWWASRGSDFS

SEQ ID NO: 81414 - protein, 68 aa, Setaria italica
  misc_feature (24)..(24): Xaa can be any naturally occurring amino acid
  Transcript Sequence Number=SeqID_15440
QRPAARPSTDPQHQQHPPPPPGVXRNVGYVGKHRLSAAISRLDQELQSLQVCCAILFAESTNHRRACP

SEQ ID NO: 81415 - protein, 129 aa, Setaria italica
  Transcript Sequence Number=SeqID_15441
  Gene Ontology: Mol. function=protein binding
  Homolog annotation: Hit_ID=B6U5C3; Match level="QueryCoverage=99%, HitCoverage=75%, E-value=2e-33, Identity=60%"; Hit description=AGG2
GGEGAPPQRHVQAQRPAARPSTDPQHQQHPPPPPGVMRNVGYVGKHRLSAAISRLDQELQSLQEELNELETMEPASTACQDVITSTEGKPDPLLPITSGPENSSWDRWFQRVRSSRSNKWWASRGSDFS

SEQ ID NO: 81416 - protein, 70 aa, Setaria italica
  Transcript Sequence Number=SeqID_15442
SNFNCLNLCSAVLWLFLVDHHISVCQKTNKCNGTIRPYTPSPAPFFEHELDYNRRMKPDYFVWLLIVGGA

SEQ ID NO: 81417 - protein, 177 aa, Setaria italica
  Transcript Sequence Number=SeqID_15443
  Homolog annotation: Hit_ID=Q8DLT4; Match level="QueryCoverage=54%, HitCoverage=88%, E-value=6e-12, Identity=39%"; Hit description =Tll0394 protein
  Subcellular localization annotation: CTP_CleavageSite=56; ConfidenceScore=5.90e-01
MSSSTFAGLLLHGRLHSPSPPSKPQPFLALPSNPSRPPASASVSTRPSPARPLLPPAAAASGGERDNRVQELRVPDSWLTPEGAAQESEWLRETLHKWLDDEYCPEAANVDISRTAARSYRESLAAGRSDLGEILLKMAGDLETLSYRDSFHGAFSAANAAVRLITQRMEASSEDGL

SEQ ID NO: 81418 - protein, 57 aa, Setaria italica
  Transcript Sequence Number=SeqID_15444
  Subcellular localization annotation: CTP_CleavageSite=11; ConfidenceScore=5.09e-01
LNSLYDTRKFSVAHVTPRLTFMPQLTLPSNLPTNGFNSHLESQFCPLGIGISMSCLY

SEQ ID NO: 81419 - protein, 223 aa, Setaria italica
  misc_feature (12)..(12): Xaa can be any naturally occurring amino acid
  Transcript Sequence Number=SeqID_15445
  Homolog annotation: Hit_ID=B9SNN8; Match level="QueryCoverage=76%, HitCoverage=52%, E-value=2e-63, Identity=67%"; Hit description =Nucleic acid binding protein, putative
ARRRRRGEGRDXEERRRRRKEKERRKRKEKEKERERRRKEKKKRRKEEKKDLGKKGAVTNSWGKYGIIREVDMWSKRPEFTAWLSEVKQVNLEALSNWEEKQMFKAFMEDHNTATFPSKKYYNLDAYHRKAMEKETKKGLKTSVTERTIFNDEEQRRLELLKERERRKEEEVEALKRSMQAGLAQDMKEQARLREEMNYQYRLGNFQAAAAIQKRLDPDAPLQ

SEQ ID NO: 81420 - protein, 194 aa, Setaria italica
  Transcript Sequence Number=SeqID_15446
  Gene Ontology: Mol. function=carbon-sulfur lyase activity; Cellular component=vacuole
  Homolog annotation: Hit_ID=Q5VQG8; Match level="QueryCoverage=100%, HitCoverage=39%, E-value=2e-93, Identity=83%"; Hit description =Putative alliinase
  Pfam annotation: Domain name=Alliinase_C; Domain location=1-194; Score=143.2; E_value=8.1e-40; Accession=PF04864.5; Description =Allinase, C-terminal domain
YWPQYTPITKRADHDIMLFTVSKSTGHAGTRIGWALVKDRDVAKKMTKFIELNTIGVSKDSQLRAAKVLRAVSDAYELPEAREEHRLFDYGRRKMAERWSMLREAAAASGIFSLPDETSGHCNFAKETASTNPAFAWLRCDREDVEDCASFLRGHKILTRSGSQFGADPRYVRVSMLDRDDAYDIFVRRLASLK

SEQ ID NO: 81421 - protein, 52 aa, Setaria italica
  Transcript Sequence Number=SeqID_15447
LLGMLLAAWLHLFTANVLRVNMFSFLLHGSTQGQGNACYKLCNTILIITGVV

SEQ ID NO: 81422 - protein, 79 aa, Setaria italica
  Transcript Sequence Number=SeqID_15448
  Gene Ontology: Mol. function=DNA binding; Biological process =regulation of transcription
  Homolog annotation: Hit_ID=B6UDE6; Match level="QueryCoverage=100%, HitCoverage=27%, E-value=5e-27, Identity=78%"; Hit description=MYB transcription factor
DQKLLHSPPSLDEYPESTQPSPKKPRMDALSPDSERDTIQPEFESHLIGPWDQEICGKNICGVAFPVEEFKADPGMSKS

SEQ ID NO: 81423 - protein, 138 aa, Setaria italica
  misc_feature (15)..(15): Xaa can be any naturally occurring amino acid
  Transcript Sequence Number=SeqID_15449
  Gene Ontology: Mol. function=DNA binding; Biological process =regulation of transcription
  Homolog annotation: Hit_ID=B6UDE6; Match level="QueryCoverage=96%, HitCoverage=51%, E-value=1e-39, Identity=66%"; Hit description=MYB transcription factor
YIPESPAEGSKDEKXDSSDSLSNTDSAPGLQINEALKMQMEVQKRLHEQLEVQRQLQLRIEAQGRYLQMIIEEQQKLGGSIKASEDQKLLHSPPSLDEYPESTQPSPKKPRMDALSPDSERDTIQPEFEFPILVFGSY

SEQ ID NO: 81424 - protein, 265 aa, Setaria italica
  misc_feature (116)..(116): Xaa can be any naturally occurring amino acid
  Transcript Sequence Number=SeqID_15450
  Gene Ontology: Mol. function=DNA binding; Biological process =regulation of transcription
  Homolog annotation: Hit_ID=Q5IWM2; Match level="QueryCoverage=100%, HitCoverage=100%, E-value=1e-110, Identity=74%"; Hit description=MYB transcription factor
  Pfam annotation: Domain name=Myb_DNA-binding; Domain location=47-98; Score=39.3; E_value=1.6e-08; Accession=PF00249.23; Description=Myb -like DNA-binding domain
MMYHAKNFSVPFAPQRAQNNEHASNIGAIGGSNISNPANPVGSGKQRLRWTSDLHNRFVDAIAQLGGPDRATPKGVLTVMGVPGITIYHVKSHLQKYRLAKYIPESPAEGSKDEKXDSSDSLSNTDSAPGLQINEALKMQMEVQKRLHEQLEVQRQLQLRIEAQGRYLQMIIEEQQKLGGSIKASEDQKLLHSPPSLDEYPESTQPSPKKPRMDALSPDSERDTIQPEFESHLIGPWDQEICGKNICGVAFPVEEFKADPGMSKS

SEQ ID NO: 81425 - protein, 213 aa, Setaria italica
  Transcript Sequence Number=SeqID_15451
  Gene Ontology: Mol. function=binding
  Homolog annotation: Hit_ID=B9RUK2; Match level="QueryCoverage=99%, HitCoverage=71%, E-value=3e-82, Identity=40%"; Hit description =Pentatricopeptide repeat-containing protein, putative
  Pfam annotation: Domain name=PPR; Domain location=130-164; Score =28.6; E_value=2.5e-05; Accession=PF01535.12; Description=PPR repeat
  Pfam annotation: Domain name=PPR; Domain location=165-199; Score =15.4; E_value=0.13; Accession=PF01535.12; Description=PPR repeat
  Pfam annotation: Domain name=PPR; Domain location=29-63; Score=30.7; E_value=5.7e-06; Accession=PF01535.12; Description=PPR repeat
  Pfam annotation: Domain name=PPR; Domain location=64-98; Score=14.6; E_value=0.17; Accession=PF01535.12; Description=PPR repeat
  Pfam module annotation: Pfam domain module=PPR::PPR::PPR::PPR; Domain location=130-164::165-199::29-63::64-98
AIYGKSLEDEKAGSLVQDMQANGVQPNAITYSTILSIWVKAGKLDRAAKLFEKLREAGTEIDPVLYQTMVVAYERAGLVSQAKRLLHDLKEPEGIPKETAIRILASAGRVEEAAWLFRRAANAGEIKDSSVHRAMMDLFAKNRRHRNVVEVFDEMRKLGQLPDSEMIATTMNACGKLKEFDKAAALYQAMREEGCVFSDRVHFQMISLLGAQK

SEQ ID NO: 81426 - protein, 142 aa, Setaria italica
  Transcript Sequence Number=SeqID_15452
  Homolog annotation: Hit_ID=B6TFT3; Match level="QueryCoverage=100%, HitCoverage=100%, E-value=3e-57, Identity=80%"; Hit description=Salt tolerant protein
  Pfam annotation: Domain name=UPF0220; Domain location=1-142; Score =4.3; E_value=1.2e-05; Accession=PF05255.3; Description =Uncharacterised protein family (UPF0220)
MDHNNLLAAWPVVGPGVAGAVFGAGWWFWVDAVVCSAAAVPFLHYLPGFFASFAALMFNCVNREDIGDGYYSPYDDSEWRVKLWLFISYVVSFVSLAGAVGFLVQDALTETGPSAWTGTAGVLQCVCVLVSGLIYWTCHSED

SEQ ID NO: 81427 - protein, 99 aa, Setaria italica
  Transcript Sequence Number=SeqID_15453
  Subcellular localization annotation: CTP_CleavageSite=41; ConfidenceScore=5.51e-01
TGTGGSVNRSGGRTGGNLPPLRPGSPRRHKKFASRRARQTQQETKREEEMEISAAGRIRRGTGALREQSSTGEAGGRGGRSGGEESAEIPGGGRSCKWR

SEQ ID NO: 81428 - protein, 135 aa, Setaria italica
  Transcript Sequence Number=SeqID_15454
  Gene Ontology: Cellular component=membrane; Biological process =intracellular signaling cascade
  Homolog annotation: Hit_ID=Q9LNB1; Match level="QueryCoverage=66%, HitCoverage=19%, E-value=1e-25, Identity=61%"; Hit description =F5O11.7
  Pfam annotation: Domain name=Cornichon; Domain location=1-124; Score =162.3; E_value=1.4e-45; Accession=PF03311.6; Description=Cornichon protein
MVFVWLTAFFLVVALIVLVIYQLMCLADLEFDYINPFDSSSRINKVVMPEFILQALLSVLFLLSGHWAMFLLSVPMVYYNYTLYQRRQHLVDVTEIFNQLGREKKRRLFKIVSLIVLLFLSLFWMIWSVLSEEDE

SEQ ID NO: 81429 - protein, 81 aa, Setaria italica
  Transcript Sequence Number=SeqID_15455
  Subcellular localization annotation: CTP_CleavageSite=36; ConfidenceScore=5.20e-01
MASELTYRGGAAAPGSASNGGEYSPKPSKPLSCLSRAARYAAAEHRPIFALAGMLFAAALFTFSSSTTSTSSPSYPAASAG

SEQ ID NO: 81430 - protein, 104 aa, Setaria italica
  Transcript Sequence Number=SeqID_15456
  Gene Ontology: Mol. function=serine-type endopeptidase activity; Cellular component=cytoplasm; Biological process=proteolysis
  Homolog annotation: Hit_ID=Q9LN30; Match level="QueryCoverage=100%, HitCoverage=14%, E-value=1e-37, Identity=65%"; Hit description =F14O10.2 protein
SDWVTIRVMRVRDREHLPDTLSWVKFSRIAWTRDGLGFFYSRFPAPRDGEALESGIKTDVNLNHEVYYHFLGTDQSQDVLCWRDPDHPKYIYIPEVTEDGKYVI

SEQ ID NO: 81431 - protein, 77 aa, Setaria italica
  Transcript Sequence Number=SeqID_15457
MGYLWRVRLSSFAAGAATASAAGFFLLYKDHLLARATIARQVEDIKEASEKHYEALNKRISALESRKEPGAIKEASD

SEQ ID NO: 81432 - protein, 337 aa, Setaria italica
  Transcript Sequence Number=SeqID_15458
  Gene Ontology: Mol. function=electron carrier activity; Cellular component=extracellular region; Biological process=response to oxidative stress
  Homolog annotation: Hit_ID=B6E1W9; Match level="QueryCoverage=89%, HitCoverage=91%, E-value=1e-137, Identity=76%"; Hit description =Pericarp peroxidase 3
  Pfam annotation: Domain name=peroxidase; Domain location=51-299; Score=482.0; E_value=8.6e-142; Accession=PF00141.15; Description =Peroxidase
MKGAMAALALVPLAVAVLFSSLPSSAASPVQWGKLDPHFYDHSCPQAQQIVASIVGKAHYQDPRMAASLLRLHFHDCFVKGCDASLLLDSSGSIVSEKRSNPNRDSARGFEVIDEIKAALEAACPGTVSCADILALSARDSTVMTGGPGWIVPLGRRDSRGASVQGSNNDIPAPNNTLPTIITKFKLQGLDIVDLVALLGSHTIGDSRCTSFRQRLYNQTGNGLPDFTLDASYAAALRPRCPRSAGDQNLFFLDPVTPFKFDNQYYKNILAYRGLLASDEVLLTGSSATADLVKLYAANQDIFFQHFAQSMVKMGNISPLTGADGEIRKHCRRVNHK

SEQ ID NO: 81433 - protein, 242 aa, Setaria italica
  Transcript Sequence Number=SeqID_15459
  Gene Ontology: Mol. function=protein serine/threonine kinase activity; Biological process=protein amino acid phosphorylation
  Homolog annotation: Hit_ID=Q25AB6; Match level="QueryCoverage=98%, HitCoverage=82%, E-value=2e-95, Identity=67%"; Hit description =B0808H03.2 protein
  Pfam annotation: Domain name=Pkinase; Domain location=1-198; Score= -40.1; E_value=4.2e-06; Accession=PF00069.17; Description=Protein kinase domain
  Pfam annotation: Domain name=Pkinase_Tyr; Domain location=1-198; Score=-90.9; E_value=1.1e-07; Accession=PF07714.9; Description =Protein tyrosine kinase
  Pfam module annotation: Pfam domain module=Pkinase::Pkinase_Tyr; Domain location=1-198::1-198
NTCPTKSLDKYLFDSARKTKLQWQTRYKIIQGIARGILYLHQDSRLTIIHRDLKASNILLDKEMIPKISDFGMARIFGGDQHPANTNRVVGTYGYMSREYAMEGAFSVKSDTYSFGVLLLEIVSGLKISSPHLITDFPNLIVYAWNLWKDGKTEDLVDSSVKENCPLDEVSRCIHIGLLCVQDSSDDRPLMSAIVSMLENKTTQLPIPTRPVYYARRDAEPGRNYNRALSLNGMSFTELEGR

SEQ ID NO: 81434 - protein, 88 aa, Setaria italica
  Transcript Sequence Number=SeqID_15460
  Gene Ontology: Mol. function=oxidoreductase activity, acting on single donors with incorporation of molecular oxygen, incorporation of two atoms of oxygen; Cellular component=nucleus; Biological process=oxidation reduction
  Homolog annotation: Hit_ID=B6TEH4; Match level="QueryCoverage=98%, HitCoverage=29%, E-value=3e-27, Identity=69%"; Hit description =Gibberellin 20 oxidase 2
GYVAPSAANPLYEAFGLLDAAAPADVDAFCARLDAPPHLRATVKSYAERMHGVIVDVAGKLASSLGLEEHSFGEWPCQFRINRYNYTE

SEQ ID NO: 81435 - protein, 135 aa, Setaria italica
  Transcript Sequence Number=SeqID_15461
  Gene Ontology: Mol. function=oxidoreductase activity, acting on single donors with incorporation of molecular oxygen, incorporation of two atoms of oxygen; Cellular component=nucleus; Biological process=oxidation reduction
  Homolog annotation: Hit_ID=B6TEH4; Match level="QueryCoverage=79%, HitCoverage=36%, E-value=3e-45, Identity=82%"; Hit description =Gibberellin 20 oxidase 2
LGPFLALPSPDLDRNLVPVEWKKNLWRRATVKSYAERMHGVIVDVAGKLASSLGLEEHSFGEWPCQFRINRYNYTKAPVGSSGAQRQPDSGFLTVLQEDECVGGLEVLDPATGEFVPVDPVAGSFLINIGDVGTV

SEQ ID NO: 81436 - protein, 134 aa, Setaria italica
  Transcript Sequence Number=SeqID_15462
  Gene Ontology: Mol. function=oxidoreductase activity, acting on single donors with incorporation of molecular oxygen, incorporation of two atoms of oxygen; Cellular component=nucleus; Biological process=oxidation reduction
  Homolog annotation: Hit_ID=B6TEH4; Match level="QueryCoverage=97%, HitCoverage=43%, E-value=2e-63, Identity=87%"; Hit description =Gibberellin 20 oxidase 2
  Pfam annotation: Domain name=2OG-FeII_Oxy; Domain location=1-85; Score=55.3; E_value=2.4e-13; Accession=PF03171.12; Description=2OG -Fe(II) oxygenase superfamily
FPGVQTHTDSGFLTVLQEDECVGGLEVLDPATGEFVPVDPVAGSFLINIGDVGTAWSNGRLHNVRHRVQCVAPVPRFSIAMFLLAPKDDRVSAPEAFVDADHPRRYREFKYDDYRRLRLSTGERAGEALARLAV

SEQ ID NO: 81437 - protein, 132 aa, Setaria italica
  Transcript Sequence Number=SeqID_15463
  Homolog annotation: Hit_ID=UPI00001634E0; Match level="QueryCoverage =75%, HitCoverage=8%, E-value=1e-21, Identity=56%"; Hit description =pentatricopeptide (PPR) repeat-containing protein
  Pfam annotation: Domain name=DUF1685; Domain location=5-91; Score =90.6; E_value=5.7e-24; Accession=PF07939.3; Description=Protein of unknown function (DUF1685)
GRRDARPVLLASDGGGAGQDDGVGRSRSLTDDDLEELKGCADLGFGFSYDEIPELRGTLPALELCYSMSQRLLDDKHHQADSAPDAAFAAATPATPPVTNWKISSPGDSPDEVKARLKYWAQAVACTVRLCS

SEQ ID NO: 81438 - protein, 64 aa, Setaria italica
  misc_feature (57)..(57): Xaa can be any naturally occurring amino acid
  Transcript Sequence Number=SeqID_15464
  Gene Ontology: Mol. function=binding
  Homolog annotation: Hit_ID=B9RD93; Match level="QueryCoverage=76%, HitCoverage=3%, E-value=5e-11, Identity=71%"; Hit description=Beta -tubulin cofactor d, putative
SHDHTSGNAVEPIEGHNSTYTLYFSTDMQKALSGIVPAIEKARLYRGKGGEIMRSAXVSRFISC

SEQ ID NO: 81439 - protein, 452 aa, Setaria italica
  Transcript Sequence Number=SeqID_15465
  Gene Ontology: Mol. function=binding; Cellular component=microtubule; Biological process=beta-tubulin folding
  Homolog annotation: Hit_ID=B9RD93; Match level="QueryCoverage=100%, HitCoverage=36%, E-value=1e-179, Identity=67%"; Hit description=Beta- tubulin cofactor d, putative
  Pfam annotation: Domain name=HEAT; Domain location=302-338; Score =22.4; E_value=0.0018; Accession=PF02985.14; Description=HEAT repeat
  Pfam annotation: Domain name=HEAT; Domain location=344-380; Score =15.5; E_value=0.22; Accession=PF02985.14; Description=HEAT repeat
  Pfam annotation: Domain name=HEAT; Domain location=98-132; Score=1.4; E_value=33; Accession=PF02985.14; Description=HEAT repeat
  Pfam annotation: Domain name=NUC130_3NT; Domain location=167-210; Score=-2.3; E_value=0.098; Accession=PF08158.4; Description =NUC1303NT domain
  Pfam module annotation: Pfam domain module=HEAT::HEAT::HEAT::NUC130 _3NT; Domain location=302-338::344-380::98-132::167-210
ITARLTPTLSEEVISSILQLFSPGEGDGSWHGGCLALAELSRRGLLLPSSFPDVIPVIIKALHYDVRRGPHSIGSHVRDAAAYVCWAFGRAYTNYDMKAVLEQLAPHLLTVACYDREVNCRRAASAAFQENVGRQGTFPHGIDIVNTTDYFALASRSNSYLNVAVSVAQYKEYLYPFADELLCNKITHWEKSLRELAAQALSLLVQYDMDYFGGHALEKLVPCTLSSDLCTRHGATLAAGEVALRLYQLGFTFSTDMQKALSGIVPAIEKARLYRGKGGEIMRSAVSRFISCISIAGISLNEKIKKSLLETLNENLRHPNSQIQCAAVDALKNFIPTYLVSSGEKIANDIISKYVALLDDPNLAARRGAALALGILPYKFLVLKWMPVMSKLCSSCTIEDKPDDPDAEARVNSVRGLISVCETLTASFDQSSDGGDSIYAYIKDYVMQVFIR

SEQ ID NO: 81440 - protein, 399 aa, Setaria italica
  Transcript Sequence Number=SeqID_15466
  Gene Ontology: Mol. function=binding; Cellular component=microtubule; Biological process=beta-tubulin folding
  Homolog annotation: Hit_ID=B9RD93; Match level="QueryCoverage=100%, HitCoverage=31%, E-value=1e-124, Identity=54%"; Hit description=Beta- tubulin cofactor d, putative
VMQALFRALDDYAVDNRGDVGSWVREAAMDALERCTFILCRRDIVALRTLPASGLESELSEMEVNASSTTHRLFDSGIAQDLVAGIAKQAVEKIDKMREIAIKTLQRILYHQEHLIPFIPRRELLEEIIPSSTDLEWAVPTVSYPRLVKLLQVSCYSKAVLSGLVIATGGLQESLKKASTSALVGYLEDSTINTDCEGKSREYMLSCDLLWVLQRYRKCDRVITPTLKTIEALFSKKVFLNREGYSEFYSGLVDSVGSELKGSKDFTKLCAGLSILGYISSQSDGTCTKAFSQLLTFLGHRYPKIRKAAADQVYLVLLQNDDLIPSENIDKTQELLAETCWEGNLEEARCKRSQINEMAGFRIATSLKSENQETRAAVQNAVSTDENKSYSSLVDFSGY

SEQ ID NO: 81441 - protein, 94 aa, Setaria italica
  Transcript Sequence Number=SeqID_15467
MSESLSTETLGGFILMTSFSNSSTISLLRLIRDPQAIIVVDGVGNGGTGAGEGRQKGCVSFAARESECAYLVVVCLSLSLALFSGGGKLSPQLT

SEQ ID NO: 81442 - protein, 53 aa, Setaria italica
  Transcript Sequence Number=SeqID_15468
DLCDFPIYLLLITLLGNVYSKKNTPFQAILSYPARSNSFSLYIAFVCFIINQL

SEQ ID NO: 81443 - protein, 97 aa, Setaria italica
  Transcript Sequence Number=SeqID_15469
  Gene Ontology: Mol. function=protein serine/threonine kinase activity; Biological process=protein amino acid phosphorylation
  Homolog annotation: Hit_ID=B9V0L1; Match level="QueryCoverage=86%, HitCoverage=10%, E-value=4e-38, Identity=85%"; Hit description=S -domain receptor-like protein kinase
SSCCVAYFPVQAISKLHEGDVQSLVDPELHGDFSLDEAERVCKVACWCIQDNESDRPTMGEVVRVLEGLQELDMPPMPRLLAAITESSNVASMYSSS

SEQ ID NO: 81444 - protein, 64 aa, Setaria italica
  Transcript Sequence Number=SeqID_15470
LVRQTKPPLNNKFWLKGYPQVHSHMLWLLHFTHLKVNLEMHISGAINCKMHQLCLPPLMLQPFC

SEQ ID NO: 81445 - protein, 281 aa, Setaria italica
  misc_feature (222)..(222): Xaa can be any naturally occurring amino acid
  misc_feature (247)..(247): Xaa can be any naturally occurring amino acid
  Transcript Sequence Number=SeqID_15471
MENLGELVKELGLYMIELGILIARACDIVIGGGQLEQSITDFGTAKARLIHYHSELDNIIIREKENSIKKKCSLKKVAVKPYQLGSQRSGSPCPCCIKSEEGTPKMAIKDNDPRDTSVQGQATEISLLNLWQEWHYDFGILTVLTAPLFLSGSEGEKCLVNQEYHHPDGHTHLQLCNGRKIFSVRCSPESFIVQVGEAADILSRGKLKSTLHSILKSNPVVXNETSITSNGSTGSCDEDVCMQEILXKIPPLSSRLREGMTFAEFSRQTTKQYYGGIQQNN

SEQ ID NO: 81446 - protein, 401 aa, Setaria italica
  Transcript Sequence Number=SeqID_15472
  Homolog annotation: Hit_ID=B4FSQ8; Match level="QueryCoverage=100%, HitCoverage=100%, E-value=0.0, Identity=93%"; Hit description=Lysine ketoglutarate reductase trans-splicing related 1
  Pfam annotation: Domain name=DUF707; Domain location=95-387; Score =793.6; E_value=1.3e-235; Accession=PF05212.4; Description=Protein of unknown function (DUF707)
MAKLATLGRSVLRFPNESMRLVMVTIIGAVLGFFIGISFPSVSITKLHFPASFVSYIEDKNSGLTTQAILNHAWTSARNARGNGTEPTSNSSLKIYVPTNPKGAERLAPGIVVPESDFHLRRLWGEPSEDLPFKPKYLVTFTVGIAQKENINRAVKKFSDNFAILLFHYDGRVTEWDEFEWSKRAIHISVRKQTKWWYAKRFLHPDIVSAYEYIFIWDEDLGVEHFNAEEYIKLVKKHNLEISQPGLEPDRGLTWQMTKRRGDREVHKDTEERPGWCSDPHLPPCAAFVEIMAPVFSRDAWRCVWHMIQNDLVHGWGLDFALRKCVEPAHEKIGVVDSQWIVHQVVPSLGNQGQSENGKAPWEGVRARCRKEWGTFQTRMAEAEKAYYKMMGITPPNSTLV

SEQ ID NO: 81447 - protein, 98 aa, Setaria italica
  misc_feature (26)..(26): Xaa can be any naturally occurring amino acid
  Transcript Sequence Number=SeqID_15473
  Gene Ontology: Mol. function=signal transducer activity; Cellular component=plasma membrane; Biological process=regulation of transcription, DNA-dependent
  Homolog annotation: Hit_ID=O64511; Match level="QueryCoverage=93%, HitCoverage=26%, E-value=5e-16, Identity=44%"; Hit description =Protein TWIN LOV 1
DAFVSLTGYSREEILGCNCRVLNGPXNQHICSEQACTVDLLSYRKDGSSFRDLLHVSPIRDASGKVAFHIWVHLDVGAKHDFNGLTPEVWQLGALTAT

SEQ ID NO: 81448 - protein, 168 aa, Setaria italica
  Transcript Sequence Number=SeqID_15474
  Gene Ontology: Mol. function=signal transducer activity; Cellular component=plasma membrane; Biological process=regulation of transcription, DNA-dependent
  Homolog annotation: Hit_ID=B9S2C2; Match level="QueryCoverage=97%, HitCoverage=82%, E-value=4e-45, Identity=48%"; Hit description=Twin lov protein, putative
  Pfam annotation: Domain name=PAS_3; Domain location=84-166; Score =13.5; E_value=0.005; Accession=PF08447.3; Description=PAS fold
FAVAGLEAEEPCVASDSEKEKATNTANSIVSALNRYSKLTSLVVSGKRCDSVGIPALSSSLNLSVGRIKQSFVLTHSCLPDMPIIYASDAFVSLTGYSREEILGCNCRVLNGPGTSLEVFEEINQHICSEQACTVDLLSYRKDGSSFRDLLHVSPIRDASGKVAFHIW

SEQ ID NO: 81449 - protein, 50 aa, Setaria italica
  Transcript Sequence Number=SeqID_15475
SVGCRPGVGCFAACREEARVDEDFPCASHAGKVFVDMDKRGQCDLPLLVA

SEQ ID NO: 81450 - protein, 75 aa, Setaria italica
  Transcript Sequence Number=SeqID_15476
  Gene Ontology: Mol. function=signal transducer activity; Biological process=regulation of transcription, DNA-dependent
SIRKDGSSFRDLLHVSPIRDASGKVAFHIWVHLDVGAKHDFNGLTPEVWQLGAVGAVRVAVRGLSASGSLLRPSQ

SEQ ID NO: 81451 - protein, 66 aa, Setaria italica
  Transcript Sequence Number=SeqID_15477
  Gene Ontology: Mol. function=protein dimerization activity; Cellular component=nucleus; Biological process=regulation of transcription, DNA-dependent
  Homolog annotation: Hit_ID=P23923; Match level="QueryCoverage=100%, HitCoverage=19%, E-value=6e-15, Identity=65%"; Hit description =Transcription factor HBP-1b(c38)
MADVSPRTETSTDDTDDNHGLEPGPGALVAASDSSDRSKDKHEDQKTLRRLAQNREAARKSRLRKK

SEQ ID NO: 81452 - protein, 330 aa, Setaria italica
  Transcript Sequence Number=SeqID_15478
  Gene Ontology: Mol. function=protein dimerization activity; Cellular component=nucleus; Biological process=regulation of transcription, DNA-dependent
  Homolog annotation: Hit_ID=P23923; Match level="QueryCoverage=100%, HitCoverage=100%, E-value=1e-136, Identity=74%"; Hit description =Transcription factor HBP-1b(c38)
  Pfam annotation: Domain name=bZIP_1; Domain location=42-94; Score =27.5; E_value=5.4e-05; Accession=PF00170.13; Description=bZIP transcription factor
  Pfam annotation: Domain name=bZIP_2; Domain location=42-92; Score =21.4; E_value=0.0029; Accession=PF07716.7; Description=Basic region leucine zipper
  Pfam module annotation: Pfam domain module=bZIP_1::bZIP_2; Domain location=42-94::42-92
MADVSPRTETSTDDTDDNHGLEPGPGALVAASDSSDRSKDKHEDQKTLRRLAQNREAARKSRLRKKAYVQQLENSRLKLTQLEQELQRARQQGIFISSSVDQSHSMSGNGALAFDMEYARWLEEHNRQISELRAGVTAHASDSDLRSVVDKIMSHYDEIFRLKGNAAKADVFHVLSGMWKTPAERCFLWLGGFRPSEVLKLLSTQLEPLTEQQLSGIGNLQQSSQQAEDALSQGMEALQQSLAETLAGSLSSSGSTGNVANYMGQMAMAMGKLGTLENFLRQADNLRLQTLQQMQRILTTRQAARALLVISDYSSRLRALSSLWLARPKE

SEQ ID NO: 81453 - protein, 228 aa, Setaria italica
  misc_feature (50)..(50): Xaa can be any naturally occurring amino acid
  Transcript Sequence Number=SeqID_15479
  Gene Ontology: Mol. function=metal ion binding
  Homolog annotation: Hit_ID=Q53MN0; Match level="QueryCoverage=99%, HitCoverage=37%, E-value=5e-50, Identity=55%"; Hit description=PHD -finger family protein, expressed
  Pfam annotation: Domain name=PHD; Domain location=3-44; Score=5.1; E _value=0.0074; Accession=PF00628.21; Description=PHD-finger
DVGEEEKLAVCSRCNDGAEHTYCMRVMMEDVPESEWLCEDCQTAVESEKXKKLEKSQVKVGTSKGQSFEREMNKPAIAAKSRSSSDNELEAENAGNKEPEKKGNDMVKKRMEDDAAITSTIRDTISETGGAYMGPDSRKRMLSSRESSFGYDADKGKQPSQVGTSLASNAPKNQAPQPRGQLTKSTSFNNSKVPKVKQLLNEVPQKPKSFKESWSSTIKKEGPISMTT

SEQ ID NO: 81454 - protein, 772 aa, Setaria italica
  misc_feature (14)..(14): Xaa can be any naturally occurring amino acid
  misc_feature (24)..(24): Xaa can be any naturally occurring amino acid
  Transcript Sequence Number=SeqID_15480
  Gene Ontology: Mol. function=heat shock protein binding; Cellular component=plasma membrane
  Homolog annotation: Hit_ID=Q0WQ57; Match level="QueryCoverage=91%, HitCoverage=81%, E-value=5e-74, Identity=49%"; Hit description =Auxilin-like protein
  Pfam annotation: Domain name=TolA; Domain location=301-665; Score= -86.3; E_value=0.00013; Accession=PF06519.3; Description=TolA protein
KSSSARYDDGVFGXAAAAPAYDDXFATGTRSAAPPPPAYDDDDFLGGFGSAPRAEEKGRPVAVDDDLLGGFGRKPVAAEEEEGSGGAGFDDLIPGFAGSSPPRSRKANDDNKMKPPVPTSKPTASMADDPFVVLETASASGSAYTSPGRSADPLEDLDKPANSEGKAADSTAPDDSLFEEPVAFDQAPKSDPLFTSEINGHAKDRNPPSVARDSSPLHHSMDRNPARQSSIEDLSNIMPKSQSARYSDIHGNYTEDQSPRSTESEDDIWLTVSEIPLFTQPTTAPPPSRSPPLLKQKPQGANTNGKVNGHVRRSSQNHNHHTDLPKQPEVSSVDDLEGFAMGKPPAYDKTVFDEDFERSSSDHEERDRQERLEQEREMKLREEMERERRRLEKERELEQQRERERGRQAVERATKEARERAAAEARAEAEREARQRAQRAAVQRAQQEARERAAAAAKERAARVATEAKERAAAEAKERAAAEAKEREWAAARERAAAERAAAERAQQEARKRAERAAVERAAAEARERQAAAAAAAAREKQSTPDDLESFFGVDARASSAPKQRAPTPTVDSMFGSGAQGRGTANGSQRAASTSASVRKAPSASIFGDDLSDLFGAPASSDVFQDVEGESEERRRARLERHQRTRERAAKALAEKNERDMQVQREQAERDRIGDSLDFEIKRWSAGKEGNLRALLSTLQYILWPECGWQAVSLTDLITGAAVKKQYRKATLCIHPDKVQQKGATLQQKYIAEKVFDLLKESWNKFNSEELF

SEQ ID NO: 81455 - protein, 148 aa, Setaria italica
  Transcript Sequence Number=SeqID_15481
  Homolog annotation: Hit_ID=Q6K796; Match level="QueryCoverage=62%, HitCoverage=2%, E-value=2e-44, Identity=87%"; Hit description =Vacuolar protein sorting 13C protein-like
YDGIKLLETFSRFRTRVDVSHLRPIVPVKEDRRAWWRYAMLAGLRQKKLCYWFSWERTRHLCQLRRRYVQLYATLLQQAPNVDIFEIREIEKILDMKVIILWRLLGHAKVETVKSKESLHRKGASKKRWWPFGWNSAGLPSEDATHQE

SEQ ID NO: 81456 - protein, 96 aa, Setaria italica
  Transcript Sequence Number=SeqID_15482
  Gene Ontology: Mol. function=transferase activity; Biological process= response to stress
  Homolog annotation: Hit_ID=B6U5G4; Match level="QueryCoverage=95%, HitCoverage=38%, E-value=1e-24, Identity=61%"; Hit description =Glutathione S-transferase GSTU6
PADPYHRAVARFWAAYVDGKLHGVMVAALTGATEEERAAATADTFAALETLEGAFAECSGGKGFFAGDAPGYLDVAFGAFIGWLRAWDRITGAATR

SEQ ID NO: 81457 - protein, 238 aa, Setaria italica
  Transcript Sequence Number=SeqID_15483
  Gene Ontology: Mol. function=transferase activity; Biological process= response to stress
  Homolog annotation: Hit_ID=B6U5G4; Match level="QueryCoverage=95%, HitCoverage=96%, E-value=2e-89, Identity=72%"; Hit description =Glutathione S-transferase GSTU6
  Pfam annotation: Domain name=GST_C; Domain location=106-209; Score =24.0; E_value=0.00033; Accession=PF00043.17; Description=Glutathione S-transferase, C-terminal domain
  Pfam annotation: Domain name=GST_N; Domain location=11-84; Score =80.5; E_value=6.2e-21; Accession=PF02798.12; Description=Glutathione S-transferase, N-terminal domain
  Pfam module annotation: Pfam domain module=GST_C::GST_N; Domain location=106-209::11-84
MAAAAGGGADGQLKVLGAWPSPFANRVRVALHLKGLEYENVEEDLTNKSELLLASNPVHKKVPVLLHGGRPVPESLLILEYLDDAFPAAGPTLLPADPYHRAVARFWAAYVDGKLHGVMVAALTGATEEERAAATADTFAALETLEGAFAECSGGKGFFAGDAPGYLDVAFGAFIGWLRAWDRITGVTLLDAGRIPLLAAWAERFAALDAAKGVIPEPEHIAEFAKVLQARAAAGASN

SEQ ID NO: 81458 - protein, 137 aa, Setaria italica
  Transcript Sequence Number=SeqID_15484
  Gene Ontology: Cellular component=plasma membrane
  Pfam annotation: Domain name=DUF662; Domain location=1-136; Score =311.0; E_value=2.5e-90; Accession=PF04949.5; Description=Family of unknown function (DUF662)
EQASSRSALSLFKEKEEEIERKKLEVRDKVFSMLGRVEEETKRLAFIRQELEVMADPTRREVDAIRKRIDKVNKQLKPLGKTCLRKEKEYKMCLDAYNEKSNEKATLVNRLMELVSESERLRMKKLEELNKTIESLY

SEQ ID NO: 81459 - protein, 169 aa, Setaria italica
  misc_feature (153)..(153): Xaa can be any naturally occurring amino acid
  Transcript Sequence Number=SeqID_15485
  Gene Ontology: Mol. function=RNA-directed DNA polymerase activity; Cellular component=ribosome; Biological process=RNA-dependent DNA replication
  Homolog annotation: Hit_ID=Q7XDX1; Match level="QueryCoverage=84%, HitCoverage=41%, E-value=4e-27, Identity=42%"; Hit description =Transposon protein, putative, Pong sub-class
ARSDRRLNWSIEEDIRLVRAWLLNSIDPVDGNDKKSDQYWSDGTSTYNSTTKCDRMRNCNQLKLRWEHIERLVTEFNGCYTRITKVHRSGMSDDQKMDQALQLYASEHSDKPFTMIHVWRILRHEKKWSAYVKKLNNEKDKSASPNPGPVVDXEDVPKQTNLICLLSLP

SEQ ID NO: 81460 - protein, 86 aa, Setaria italica
  Transcript Sequence Number=SeqID_15486
  Gene Ontology: Mol. function=zinc ion binding; Cellular component =intracellular
  Homolog annotation: Hit_ID=B9RJ95; Match level="QueryCoverage=100%, HitCoverage=19%, E-value=4e-09, Identity=39%"; Hit description =Nucleic acid binding protein, putative
  Subcellular localization annotation: CTP_CleavageSite=65; ConfidenceScore=5.64e-01
KKPLSEVSSVSKQLQLQRGGSSLSSSSSSGGGSFRASMQLRRLSGCYECHMVVDPGSGSGSSSMRATTVCPCPDCGEIFVRQESLQ

SEQ ID NO: 81461 - protein, 60 aa, Setaria italica
  Transcript Sequence Number=SeqID_15487
MHQPRARYPPGYGSGGGGRGGGGGNGGGGGGGGGGGNHNYYGRNPQPQPQHHHHYQHQQP

SEQ ID NO: 81462 - protein, 98 aa, Setaria italica
  Transcript Sequence Number=SeqID_15488
  Gene Ontology: Mol. function=catalytic activity; Biological process =cellular metabolic process
  Homolog annotation: Hit_ID=B4FED4; Match level="QueryCoverage=100%, HitCoverage=29%, E-value=1e-38, Identity=72%"; Hit description =Dihydroflavonol-4-reductase
NASFVRIFDLAASIANTKPPKFHIPLWLLAIYGWISVLVARITGKPPLISYPGVDCLRHQWAYSCDKAKKELGYSPRSLTEGLAETLLWLKNDKLIKF

SEQ ID NO: 81463 - protein, 80 aa, Setaria italica
  Transcript Sequence Number=SeqID_15489
LFSSIQCSLWDSELYVMQSLYIMKCFACIVASLELTVLVAYLYCWSSESSICQCSNQCDSSLPCRNVTSNFIDNFIKYVS

SEQ ID NO: 81464 - protein, 56 aa, Setaria italica
  Transcript Sequence Number=SeqID_15490
  Subcellular localization annotation: CTP_CleavageSite=47; ConfidenceScore=5.11e-01
PNQHPARRAGDSLGKSTPRRFPRNPGVHSRGRQPAGGTEDSVRRGILLSHRHASPT

SEQ ID NO: 81465 - protein, 540 aa, Setaria italica
  Transcript Sequence Number=SeqID_15491
  Gene Ontology: Mol. function=nucleic acid binding; Cellular component= nucleolus; Biological process=angiogenesis
  Homolog annotation: Hit_ID=B9SMB7; Match level="QueryCoverage=40%, HitCoverage=34%, E-value=2e-60, Identity=53%"; Hit description =Nucleic acid binding protein, putative
  Pfam annotation: Domain name=RRM_1; Domain location=277-346; Score =70.8; E_value=5e-18; Accession=PF00076.14; Description=RNA recognition motif. (a.k.a. RRM, RBD, o
  Pfam annotation: Domain name=RRM_1; Domain location=378-451; Score =57.7; E_value=4.4e-14; Accession=PF00076.14; Description=RNA recognition motif. (a.k.a. RRM, RBD, o
  Pfam module annotation: Pfam domain module=RRM_1::RRM_1; Domain location=277-346::378-451
  Subcellular localization annotation: CTP_CleavageSite=55; ConfidenceScore=5.28e-01
KAVSAKKQKAAPPAKAVPPPKVDAKKAKKQPPPKKAESSSSGSEEEESESEEEVKVQTKKALPAKTVKQESSDDGSSDETSESDEEPAKKPAAKPSATIAKNGSKKGKQESSSDESGSDDESSEDDEAPAKPKAPAVAAKKEDSSESESESDSEDEDKSKTAKVAQPAKRAASKMSDDSDSDDSDSDDSDEEPPQKKQKDTAPSAAAKATAAKKETSSDDESDDESDEDSEEDEEDEEPAKTPKKEAPALTSGKQSATKEPKTPMDTQSQATGSKTLFMANVPFRAELEDVKEFFEAAGEVVDVRFPVYEDGSRKGFCYVEFVSAEAAKKACEEMSGQEMQGRAVRLDFAQERNAYTPRSGNDTGSFQKPVRGASSSVFIRGFDKNLEEDKIRSSLEQHFGECGEITRVSIPTDYETGAVKGIAYLDFKDQDSMSKALELSGSDIGGYELFVDEAKPKGDGQRGGGRSGGRSGGRFGDRSGGRRGGGGRFGDRSGGRDSGGRFGRGGGGRGGNRGGGRGFGNRPSFGAASAGKKTTFGDD

SEQ ID NO: 81466 - protein, 158 aa, Setaria italica
  Transcript Sequence Number=SeqID_15492
  Gene Ontology: Mol. function=electron carrier activity; Cellular component=chloroplast envelope; Biological process=oxidation reduction
  Homolog annotation: Hit_ID=B6TAN0; Match level="QueryCoverage=100%, HitCoverage=33%, E-value=1e-64, Identity=75%"; Hit description =Monodehydroascorbate reductase, cytoplasmic isoform 2
  Pfam annotation: Domain name=Pyr_redox; Domain location=41-135; Score= 91.0; E_value=4.3e-24; Accession=PF00070.19; Description=Pyridine nucleotide-disulphide oxidore
RASKLEEFGVSGSDAENVCYLRNIVDADKLVRVMRSSPGGNAIVIGGGYIGMECAAALVANKIKVTIVFPGKYCMDRLFTQKIAEFYENYYTSKGVTFIKGTAVSSLEVSSGMVTTAILRDGRPLPADMVVVGIGARANTALFEGQLTLEKGGIKVNG

SEQ ID NO: 81467 - protein, 247 aa, Setaria italica
  misc_feature (83)..(83): Xaa can be any naturally occurring amino acid
  misc_feature (106)..(106): Xaa can be any naturally occurring amino acid
  Transcript Sequence Number=SeqID_15493
  Gene Ontology: Mol. function=protein serine/threonine kinase activity; Biological process=protein amino acid phosphorylation
  Homolog annotation: Hit_ID=Q60DQ2; Match level="QueryCoverage=87%, HitCoverage=31%, E-value=7e-61, Identity=56%"; Hit description =Protein kinase domain containing protein, expressed
  Pfam annotation: Domain name=Pkinase; Domain location=1-214; Score= -46.3; E_value=9.8e-06; Accession=PF00069.17; Description=Protein kinase domain
  Pfam annotation: Domain name=Pkinase_Tyr; Domain location=1-212; Score=-91.5; E_value=1.2e-07; Accession=PF07714.9; Description =Protein tyrosine kinase
  Pfam module annotation: Pfam domain module=Pkinase::Pkinase_Tyr; Domain location=1-214::1-212
RCFGGCLDIDVPMLAYEFVSNGTLSKFLHGDDRTSPIPLDLRLKIATQSADALAYLHSSISRTTLHGDVKSANILLDDQHNAXADFGASAQKSMEESEFIMFVQGXLGYLDPESFISHQLTEKSDVYSFGVVLLELITRKRAMFADKFNEKKSLSYIFLLMFRHNKHRVMIDTEILDEAVMEVLEKLAQLAVRCLCPSGDDRPTMKEVAERLQMLRRLHMDASSDCEDSHYANNHGGSPSLVRGIGK

SEQ ID NO: 81468 - protein, 147 aa, Setaria italica
  Transcript Sequence Number=SeqID_15494
  Gene Ontology: Mol. function=nucleic acid binding; Biological process= response to cadmium ion
  Homolog annotation: Hit_ID=A8JH82; Match level="QueryCoverage=80%, HitCoverage=12%, E-value=1e-11, Identity=34%"; Hit description =SWI/SNF chromatin remodeling complex component
NDNQAVDRAYRMGQTKDVIVYQLVTCAAIEEHTYREQILKIETSFGILGEQPCMKSICEKEGLVLTLPPFGFKFCKTHRELVRIYGLEMNIVLSDLGLHHEAVIAAHYHSLLFSVKEDEVDDYEMEVLDPKQGKSKSKEIKKRDEVI

SEQ ID NO: 81469 - protein, 420 aa, Setaria italica
  misc_feature (76)..(76): Xaa can be any naturally occurring amino acid
  misc_feature (119)..(119): Xaa can be any naturally occurring amino acid
  misc_feature (197)..(197): Xaa can be any naturally occurring amino acid
  Transcript Sequence Number=SeqID_15495
  Gene Ontology: Mol. function=nucleic acid binding; Cellular component= condensed chromosome kinetochore; Biological process=response to cadmium ion
  Homolog annotation: Hit_ID=B9RRF4; Match level="QueryCoverage=89%, HitCoverage=33%, E-value=1e-64, Identity=38%"; Hit description=ATP binding protein, putative
  Pfam annotation: Domain name=Helicase_C; Domain location=254-359; Score=53.2; E_value=1e-12; Accession=PF00271.23; Description =Helicase conserved C-terminal domain
  Pfam annotation: Domain name=SNF2_N; Domain location=1-173; Score= -103.1; E_value=0.008; Accession=PF00176.15; Description=SNF2 family N-terminal domain
  Pfam module annotation: Pfam domain module=Helicase_C::SNF2_N; Domain location=254-359::1-173
MFSKMEEELALSEDGETWDYLFMDEGHRAKNRHKIIITGTPIQNNLEEFHTLMDICKPLLLEDHDSFHVKYILPIXRGKHRDAEPHLKSKYVQLSSRLAKLTNPFILRRTKELLKAEGXLTSNKYEYTIWLQLSPCQVNYYSTLVTSDLLRIQGNALTATKIARDICRHPCLLMQNYSPEEPTNEKDNAVALKIKTXLFKIFPPHDLCEDDCNISSKINFILYLAHKLVIEEEHKVLVFSQSPHMLKILEQALGSVIDKEKIVRMDGSTKRRDRNRMRMAFQCQQSRKESPNSESSGSSISKSSDLDLSKVCEPWIFLMTTRVGGVGLNLTAATRVIIADPSENPSDDNQAVDRAYRMGQTKDVIVYQLVTCAAIEEHTYREQILKIETSFGILGEQPCMKSICEKVSQTYFSLKTILGT

SEQ ID NO: 81470 - protein, 182 aa, Setaria italica
  Transcript Sequence Number=SeqID_15496
  Homolog annotation: Hit_ID=B6TK80; Match level="QueryCoverage=80%, HitCoverage=38%, E-value=1e-13, Identity=34%"; Hit description=F-box domain containing protein
SGRTVKDEKLKDEEESSLRVICTVRFENKFIAFFFSSANQKWGLITYHSSSSFGYRRCYAHGCFFWVVDSNGYALMLDTRQMKFSIIDLPPNNDVSNIFAFVEAGEGRLGLLTLVGSTIDLSCKIWRNNGAGAEGWQHCKMIPLPKDCGGINYIWYIMGAAERYLNLLALHMVHRESPAQYF

SEQ ID NO: 81471 - protein, 120 aa, Setaria italica
  Transcript Sequence Number=SeqID_15497
  Gene Ontology: Mol. function=electron carrier activity; Biological process=oxidation reduction
  Homolog annotation: Hit_ID=B4F9F6; Match level="QueryCoverage=64%, HitCoverage=15%, E-value=5e-38, Identity=96%"; Hit description =Lysine-specific histone demethylase 1
IVFERFPELKLEGLEDQVLQWCVCRLEAWFAADADEISLKNWDQERVLTGGHGLMVNGYYPVIEALAQGLDIRLNQRFCFSTDLLLLDCTLAKHGAKLWLISRILLAITVLCRNHDDVVF

SEQ ID NO: 81472 - protein, 487 aa, Setaria italica
  Transcript Sequence Number=SeqID_15498
  Gene Ontology: Mol. function=electron carrier activity; Biological process=oxidation reduction
  Homolog annotation: Hit_ID=B4F9F6; Match level="QueryCoverage=100%, HitCoverage=100%, E-value=0.0, Identity=88%"; Hit description=Lysine- specific histone demethylase 1
  Pfam annotation: Domain name=Amino_oxidase; Domain location=33-454; Score=340.7; E_value=2.8e-99; Accession=PF01593.16; Description =Flavin containing amine oxidoreductase
  Pfam annotation: Domain name=DAO; Domain location=25-361; Score=2.2; E_value=8.1e-06; Accession=PF01266.16; Description=FAD dependent oxidoreductase
  Pfam annotation: Domain name=FAD_binding_2; Domain location=25-447; Score=-147.8; E_value=0.039; Accession=PF00890.16; Description=FAD binding domain
  Pfam module annotation: Pfam domain module=Amino_oxidase::DAO::FAD _binding_2; Domain location=33-454::25-361::25-447
MDPNGLKTGGLLLPTIERRCTTPPSVIVIGGGISGVAAARALSNSSFKVTVLESRDRIGGRVHTDYSFGCPIDMGASWLHGVCNENSLAPLIGYLGLRLYRTSDDNSVLYDHDLESYALFDKDGNQVPKETVDKVGETFERILEETVKVRDEQEHDMPLLQAISIVFERFPELKLEGLEDQVLQWCVCRLEAWFAADADEISLKNWDQERVLTGGHGLMVNGYYPVIEALAQGLDIRLNQRVTKITRQYNGVKVTTEDGTNYFADACIITVPLGVLKANIIKFEPELPPWKSSAIADLGVGIENKIAMHFDRVFWPNVEVLGITGPTPKACGYFLNLHKATGNPVLVYMAAGRFAQEVEKLSDKEAVDLVVSHLKKMLPDATEPTQYLVSRWGSDPNSLGSYSCDLVGKPADVCVRFSAPVENLYFAGEAASADHSGSVHGAYSSGLAAAEDCRKRLLTLKGVPDLVQVAAWEEVAGAVAPLQICRT

SEQ ID NO: 81473 - protein, 115 aa, Setaria italica
  misc_feature (31)..(31): Xaa can be any naturally occurring amino acid
  Transcript Sequence Number=SeqID_15499
  Gene Ontology: Mol. function=protein serine/threonine kinase activity
  Homolog annotation: Hit_ID=Q84XZ4; Match level="QueryCoverage=100%, HitCoverage=16%, E-value=6e-23, Identity=56%"; Hit description =Mitogen-activated protein kinase
TPPQIYKKVTAGKLPDAFYRVQDDDARRFIXGRCLVAASKRPSAAELLMDPFLLDGHHHSTPCAVMPPSSSLPAAPHSSTCSTSNVDEDAEPPGPIRTDMTITGKLNAEEDTIFL

SEQ ID NO: 81474 - protein, 72 aa, Setaria italica
  Transcript Sequence Number=SeqID_15500
SISCDNISEYLSIDSNSLAYCFLMLCLSQGLSIYHSLLNIKSFPIIISVKILDTHYLCGLPRVGQSHKHFNS

SEQ ID NO: 81475 - protein, 42 aa, Setaria italica
  Transcript Sequence Number=SeqID_15501
GVHMMLSYDKQWLSFEYNSYVCSHVNITTNDYVAYISSSSLL

SEQ ID NO: 81476 - protein, 186 aa, Setaria italica
  misc_feature (27)..(27): Xaa can be any naturally occurring amino acid
  Transcript Sequence Number=SeqID_15502
  Homolog annotation: Hit_ID=Q8W0T8; Match level="QueryCoverage=85%, HitCoverage=15%, E-value=2e-60, Identity=72%"; Hit description=Gb protein
RSPARLIETTPPTLPRAAAAAAQASPXGMGTREVYEEKLRSGAHLHRDPTINPGLGSPRCPRCLSLLNPTAGEGDWAITSVLHDATAVAGSGAGALLSAVHGFNTGIPFVQKHVKGPKWLQLLVGVPPLLLFSGASAVFGAYALPRFAQLTVTSYYAASSGSHYAVSQITRQIESAHFSESDEKSR

SEQ ID NO: 81477 - protein, 82 aa, Setaria italica
  misc_feature (39)..(39): Xaa can be any naturally occurring amino acid
  Transcript Sequence Number=SeqID_15503
  Gene Ontology: Mol. function=electron carrier activity; Biological process=metabolic process
  Homolog annotation: Hit_ID=B6U880; Match level="QueryCoverage=100%, HitCoverage=16%, E-value=2e-33, Identity=82%"; Hit description=NADPH adrenodoxin oxidoreductase
CAEETVASILEDDIKGVLKPPSDSKKHGRTGLVEILKQXNVRFVPFSGWEKIDSKEKMAGQLRNKPREKITTWDELQKAASE

SEQ ID NO: 81478 - protein, 158 aa, Setaria italica
  Transcript Sequence Number=SeqID_15504
  Gene Ontology: Mol. function=electron carrier activity; Cellular component=mitochondrial inner membrane; Biological process=metabolic process
  Homolog annotation: Hit_ID=B6U880; Match level="QueryCoverage=93%, HitCoverage=30%, E-value=4e-62, Identity=79%"; Hit description=NADPH adrenodoxin oxidoreductase
KFRTKLTNERLVLATYDLDKNEEEMRNSRIQRRVYELLSKAASAHKDNSYNDQKELHFVFFRRPIKFIPSENGSTVGAVQLEKTALKGDEVTGKQVAVGTGEFEDLKCGLVLKSIGYKSLPVQGLPFDKNRGVVTNLRGRVLSSESETTTVNQVVRSR

SEQ ID NO: 81479 - protein, 428 aa, Setaria italica
  misc_feature (50)..(50): Xaa can be any naturally occurring amino acid
  Transcript Sequence Number=SeqID_15505
  Gene Ontology: Mol. function=electron carrier activity; Cellular component=mitochondrial matrix; Biological process=metabolic process
  Homolog annotation: Hit_ID=B6U880; Match level="QueryCoverage=100%, HitCoverage=85%, E-value=0.0, Identity=88%"; Hit description=NADPH adrenodoxin oxidoreductase
PFGLVRSGVAPDHPETKIVVNQFSRVAANGSCSFFGNVTLGRDISLSELXKQYHVVVLAYGAESDRSLGIPGEDLKGIHSAREFVWWYNGHPDMCDLSPDLKNTESAVILGQGNVALDVARILLRCKTELATTDIADYALDALRGSTIRKVYLVGRRGPVQAACTAKELREILGLKNVRICINEAVLATSPADEEEMRNSRIQRRVYELLSKAASAHKDNSYNDQKELHFVFFRRPIKFIPSENGSTVGAVQLEKTALKGDEVTGKQVAVGTGEFEDLKCGLVLKSIGYKSLPVQGLPFDKNRGVVPNLRGRVLSSESETTTVESGLYVVGWLKRGPTGIVATNLHCAEETVASILEDDIKGVLRPPSDSKKHGRTGLVEILKQNNVRFVPFSGWEKIDSKEKMAGQLRNKPREKITTWDELQKAANE

SEQ ID NO: 81480 - protein, 458 aa, Setaria italica
  Transcript Sequence Number=SeqID_15506
  Gene Ontology: Mol. function=transferase activity
  Homolog annotation: Hit_ID=B6UFI8; Match level="QueryCoverage=100%, HitCoverage=66%, E-value=1e-154, Identity=66%"; Hit description =Glycosyltransferase
  Pfam annotation: Domain name=DUF563; Domain location=220-458; Score =260.5; E_value=4e-75; Accession=PF04577.6; Description=Protein of unknown function (DUF563)
DAAGIGSLVSGGADTSKQQLDLGVQDPDALSKEGSKAEVLEKDDGDASPSGPDSGRNAPLEDTRRDETFVGDSGDAARGGASPAAANPAAVGGRDEVPAKDGDATAALLPPVSSEEAANSTQESGVLEDEELQVQDAVAKTPSKKSNVSAAAAATTTTASSNGGSPSTVHSDPAVLPAPVQQIPPTTQEVKALVADQQIPAAPVVKQADSETPAVREWKPLCDVTSNRRIDWCELDGDVRVLGANASVTLVAPPGADERTFREESWSIKPYPRKADPNAMRHIRVLTVRSVSGEAPAPACTDRHDGVPALVFSDRGYAGNYFHAYTDVILPLFLTARQYAGEVLLLVTDFQMWWLGKYLPVFKSLSNYEPIDLDHDPRVHCFSHVQVGLTNHDDFSIDPRRAPNGYSMLDFTKFMRTTYGLPRDVAWPAAANGTAGRRRPRVLLIARARTRRFVNTDE

SEQ ID NO: 81481 - protein, 129 aa, Setaria italica
  misc_feature (108)..(108): Xaa can be any naturally occurring amino acid
  Transcript Sequence Number=SeqID_15507
  Gene Ontology: Mol. function=transcription regulator activity; Cellular component=nucleus; Biological process=regulation of transcription
  Homolog annotation: Hit_ID=B6SSA5; Match level="QueryCoverage=97%, HitCoverage=49%, E-value=1e-29, Identity=61%"; Hit description=DNA binding like
  Pfam annotation: Domain name=HLH; Domain location=3-50; Score=49.9; E_ value=1e-11; Accession=PF00010.18; Description=Helix-loop-helix DNA -binding domain
GKRKSIIVERDRRRKLNEKLYALRSVVPNITKMDKASIIKDAIEYIQQLQAEERQVLQEVRAFESAGGGAPPPEEGFEHDEGLLLLQAERTKKMKRARSVPSIVAAAXAPAPAVEVQELRVSEVGERLL

SEQ ID NO: 81482 - protein, 111 aa, Setaria italica
  Transcript Sequence Number=SeqID_15508
  Gene Ontology: Mol. function=sequence-specific DNA binding; Cellular component=nucleus; Biological process=regulation of transcription, DNA-dependent
  Homolog annotation: Hit_ID=B6TWI7; Match level="QueryCoverage=92%, HitCoverage=26%, E-value=6e-49, Identity=91%"; Hit description=GATA zinc finger family protein
  Pfam annotation: Domain name=GATA; Domain location=31-66; Score=74.1; E_value=5e-19; Accession=PF00320.19; Description=GATA zinc finger
  Subcellular localization annotation: CTP_CleavageSite=20; ConfidenceScore=5.10e-01
KKRGRKPKHLPPNPSAAGAVASQPAPGDRRCSHCGVQKTPQWRAGPEGAKTLCNACGVRYKSGRLLPEYRPACSPTFVSTIHSNSHRKVLEMRRKKESGMVATAAPAVASF

SEQ ID NO: 81483 - protein, 385 aa, Setaria italica
  Transcript Sequence Number=SeqID_15509
  Gene Ontology: Mol. function=ATP-dependent helicase activity; Cellular component=intracellular; Biological process=RNA processing
  Homolog annotation: Hit_ID=Q8LMR2; Match level="QueryCoverage=98%, HitCoverage=19%, E-value=0.0, Identity=91%"; Hit description =Endoribonuclease Dicer homolog 1
  Pfam annotation: Domain name=Helicase_C; Domain location=191-271; Score=63.9; E_value=6.2e-16; Accession=PF00271.23; Description =Helicase conserved C-terminal domain
  Pfam annotation: Domain name=dsRNA_bind; Domain location=343-385; Score=-9.3; E_value=0.02; Accession=PF03368.6; Description=Double stranded RNA binding domain
  Pfam module annotation: Pfam domain module=Helicase_C::dsRNA_bind; Domain location=191-271::343-385
FTIGKLRDAGSRDELRLVYGVSERTESDGAANLIQKLRAINYALGELGQWCAYKVAQSFLTALQNDERANYQVDVKFQESYLKKVVDLLHCQLTEGAAMKSENNDVEMHNAENHKPNDLEEGELPDSHAVSVGEHVDEVIGAAVADGKVTPRVQALIKILLKYQQTEDFRAIIFVERVVTALVLPKVFAELPSLGFIRCASLIGHNNNQEMRSGQMQDTIEKFRDGRVTLLVATSVAEEGLDIRQCNVVIRFDLAKTVLAYIQSRGRARKPGSDYILMLERGNLSHEAFLKHARSSEEALRKEAIQRTDLSHLDGTSMLSPVDTPDSMYQVESTGAVVSLNSAVGLIHFYCSQLPSDRYSILRPEFIMQKHEKPEGSAEYSCKLQ

SEQ ID NO: 81484 - protein, 236 aa, Setaria italica
  misc_feature (228)..(228): Xaa can be any naturally occurring amino acid
  misc_feature (233)..(233): Xaa can be any naturally occurring amino acid
  Transcript Sequence Number=SeqID_15510
  Gene Ontology: Mol. function=phosphopantetheine binding
  Homolog annotation: Hit_ID=Q6ZI81; Match level="QueryCoverage=100%, HitCoverage=30%, E-value=8e-66, Identity=54%"; Hit description =Putative T-complex protein 11
LLRERIQHLGGEAGIERMESALSETRSKFFQAKEGTSSIATTVANIASPSVACSPGQSTVSEIRENSNMDAEKTNRVVNCLFGSSSSPSDSSKGGKLTLSCAVPEKMPTENEQIVNEILHGIHGSFADISDGTGTVEGDFKAKVKETMEKAFWDVVEDSMRGDMPDYSYLVSLVKEVKEALQELAPTGWKEEISENINLEILTQLLASGSQDRQYLGQILQYSLNKLXRKLSXPDK

SEQ ID NO: 81485 - protein, 122 aa, Setaria italica
  Transcript Sequence Number=SeqID_15511
  Gene Ontology: Biological process=phosphatidylserine biosynthetic process
  Homolog annotation: Hit_ID=Q5N8Q3; Match level="QueryCoverage=94%, HitCoverage=30%, E-value=2e-42, Identity=73%"; Hit description =Phosphatidylserine synthase I-like
MEAKQRARHGEERRPSAAADGEEYDPWTAWLYKPHTISVLLVGACLLIWASGALDPEGAAAHSSVTSIKRGVWAMIAVFLAYCTLQAPSTILIRPHPAVWRLVHGLAIVYLVALTFPETRKR

SEQ ID NO: 81486 - protein, 683 aa, Setaria italica
  Transcript Sequence Number=SeqID_15512
  Gene Ontology: Mol. function=ATPase activity, coupled to transmembrane movement of substances; Cellular component=integral to membrane; Biological process=transport
  Homolog annotation: Hit_ID=Q8GU69; Match level="QueryCoverage=100%, HitCoverage=95%, E-value=0.0, Identity=63%"; Hit description=MDR -like ABC transporter
  Pfam annotation: Domain name=ABC_membrane; Domain location=117-392; Score=166.5; E_value=7.9e-47; Accession=PF00664.15; Description=ABC transporter transmembrane region
  Pfam annotation: Domain name=ABC_tran; Domain location=467-652; Score= 211.6; E_value=2.1e-60; Accession=PF00005.19; Description=ABC transporter
  Pfam annotation: Domain name=BCCT; Domain location=116-427; Score= -446.7; E_value=0.082; Accession=PF02028.9; Description=BCCT family transporter
  Pfam module annotation: Pfam domain module=ABC_membrane::ABC _tran::BCCT; Domain location=117-392::467-652::116-427
VEKGSHHELVTDPEGAYSQLIRLQEASHASEGANYQNKSSTKDDSWIYAGKQTPTNQSATIRSPQNNSRNHSLSVSFSVPLEINVQDRSSKNVDEEIEQEVPLSRLASLNKPEIPVLILGSIASAISGVIFPIFAILLSNVIKAFYEPPLILRKDAEFWSSMFLVFGAVYFLSLPLGSYLFSVAGCKLIRRIRLMTFQKVVNMEIEWFDYPENSSGAIGARLSADAAKVRGLVGDALQLAVQNSATLIAGLVIAFISNWQLSLIILALIPLIGLNGWIQMKFIQGFSADAKLMYEEASQVANDAVSSIRTVVSFSAEEKVMDLYKKKCEGPLRAGIRTGIINGIGFGVSIFLLFGVYAASFYAGARLVEDGKTTFPKVFMVFLALSMAAIGVSHTSTLTSDSSKAKSAVSSIFTIMDRKSRIDPGDDAGVTLEPLSGVIEFQHVRFRYPTRPDVQIFQDLCLTIQSGKTVALVGESGSGKSTAIALLQRFYDPDAGHILLDGVDIQKFQLRWLRQQMGLVSQEPSLFNDTIRANIAYGKDGQATESDVVAAAQLANAHKFISSLHQGYDTMVGERGAQLSGGQKQRVAIARAIVKDPKILLLDEATSALDAESERVVQDALDRVMVNRTTVIVAHRLSTIQSADVIAVVKNGMIIEKGRHDTLINVEGGAYASLVALHSAAPS

SEQ ID NO: 81487 - protein, 726 aa, Setaria italica
  Transcript Sequence Number=SeqID_15513
  Gene Ontology: Mol. function=hydrolase activity, acting on glycosyl bonds; Cellular component=vacuole; Biological process=glycosaminoglyc an metabolic process
  Homolog annotation: Hit_ID=Q9FNA3; Match level="QueryCoverage=99%, HitCoverage=90%, E-value=0.0, Identity=68%"; Hit description=Alpha-N- acetylglucosaminidase
  Pfam annotation: Domain name=NAGLU; Domain location=15-724; Score =1507.7; E_value=0; Accession=PF05089.4; Description=Alpha-N -acetylglucosaminidase (NAGLU)
NSSCFRISNVVDNSGKGGAEILIQGTTGVELVSGLHWYLKYWCGVHISWDKTGGAQLASVPSPGSLPRVKGEGVKIERPVPWNYYQNVVTSSYSFVWWDWKRWEKEIDWMALQGINLPLAFTGQEAIWQKVFKSFNVTDRDLDDFFGGPAFLAWARMGNLHGWGGPLSQNWLDQQLALQKKILSRMIEFGMVPVLPSFSGNVPAVFSKLFPSANITQLGDWNTVDADPRWCCTYLLGPSDALFIEVGQAFIKQQIKEYGDVTNIYNCDTFNENTPPTNEPAYISSLGSAIYEAMSRGNKNAVWLMQGWLFYSDAAFWKEPQMKALLHSVPIGKMIVLDLFADVKPIWKMSSQFYGVPYIWCLLHNFGGNIEMYGILDSIASGPIDARTSYNSTMIGVGMCMEGIEQNPVVYELTSEMAFRNKKVEVEDWLKTYSNRRYGQANAEIEKAWRYLYHTIYNCTDGIADHNKDYIVEFPDISPSSFSTQLSKRRGMSISSNHRRFFLSEVSGSLPHPHLWYSTKEAIKALELFLNAGNDFSKSITYRYDLVDLTRQCLSKLANEVYLDAMRSYQKKDSNGLNSHARKFLEIIADIDTLLAADDNFLLGPWLESAKSLAMTESERKQYEWNARTQVTMWYDNTETEQSKLHDYANKFWSGLLKSYYLPRASKYFAYLTRSLQENRSFQLEEWRKDWISYSNEWQSGKELYGVKATGDALAIARSLYRKYFS

SEQ ID NO: 81488 - protein, 134 aa, Setaria italica
  Transcript Sequence Number=SeqID_15514
  Gene Ontology: Mol. function=microtubule motor activity; Cellular component=microtubule associated complex; Biological process =microtubule-based movement
EELDPEPEGREPGVGKVTVEYGIGYSEAPEQMIDCGGVVPCLLKEITSPAKASKAPSKVSQAEGAADKKKEGSASRPGDAKKTKRRLQPAAGMMLKEFTGAADLDVDTKREGRGKSSSSVASGRSDELIRLLKT

SEQ ID NO: 81489 - protein, 186 aa, Setaria italica
  misc_feature (166)..(166): Xaa can be any naturally occurring amino acid
  Transcript Sequence Number=SeqID_15515
  Gene Ontology: Mol. function=microtubule motor activity; Cellular component=microtubule associated complex; Biological process =microtubule-based movement
PKGKIDTDNITKVSEEDEAQHKFLNSELRRVSRSEAIMTNFARALWTVLKQYKHKVLESENAAESMKKLIRDQDIQIMELKKELDVQNSRCSCKNVPITEDTSVDQDDSVLSGPAGRSFVSQSNKPDLGSYDAPVDNFHLVEDISKELRCHGPENSSTACSLKGIXSCDTSSISLLDEQELSSRGS

SEQ ID NO: 81490 - protein, 337 aa, Setaria italica
  Transcript Sequence Number=SeqID_15516
  Gene Ontology: Mol. function=microtubule motor activity; Cellular component=microtubule associated complex; Biological process =microtubule-based movement
FSLLYTKITNNFVPPLQLVEDISKELRCHGPENSSTACSLKGESVSCDTSSISLLDEQELSSRGLKVQVQAIHKKLDSSESFTQQTSPHTGGVTPSSSHSDNQSDQNTERVSLSPQFTSCSKKATIEHVREKKATIEQSEEETGELNKITVEDMQHDINTREVEHLDCLSSSQKVNSDTEDVSSSQSSLELPVATQKKLEELDPEPERREPGVGKDCPDPRYFEAPEQMIDCGGVVPCLLKEITSPAKASKAPSKVSQAEGAADKKKEGSASRPGDAKKTKRRLQPAAGMMLKEFTGAADLDVDTKREGRGKSSSSVASGRSDELIRLLKTRPVRRA

SEQ ID NO: 81491 - protein, 171 aa, Setaria italica
  Transcript Sequence Number=SeqID_15517
  Homolog annotation: Hit_ID=B6SPJ2; Match level="QueryCoverage=100%, HitCoverage=28%, E-value=2e-66, Identity=75%"; Hit description =Selenium-binding protein-like
  Pfam annotation: Domain name=PPR; Domain location=123-157; Score =47.2; E_value=6.5e-11; Accession=PF01535.12; Description=PPR repeat
  Pfam annotation: Domain name=PPR; Domain location=22-56; Score=47.8; E_value=4.4e-11; Accession=PF01535.12; Description=PPR repeat
  Pfam module annotation: Pfam domain module=PPR::PPR; Domain location =123-157::22-56
KLGLVRTVAREVFDGMPERNLISWNAMMSGYVKAGRFLDALEVFDEMRARGVEGNGFVAATAAVACTGAGTLARGREVHRWVARSEIRNDDKLATAVVDMYCKCGCVEEARRVFEALPAKGLTTWNCMIGGLAVHGRGEDAVEVFARMERKGVAPDDVTLVNVLTACAHAG

SEQ ID NO: 81492 - protein, 209 aa, Setaria italica
  Transcript Sequence Number=SeqID_15518
  Homolog annotation: Hit_ID=A8NFQ5; Match level="QueryCoverage=87%, HitCoverage=46%, E-value=2e-15, Identity=33%"; Hit description=TraB family protein
  Pfam annotation: Domain name=TraB; Domain location=23-204; Score= -35.0; E_value=7.4e-07; Accession=PF01963.9; Description=TraB family
GALVRVPRRRFGPVPAWRPPDFVEPEEVWILGTSHLSPESVADVERVLRAVQPDNVVVELCRSRAGIMYVSDASDEPLLKSNMFSLGGAKFFGAVNRSINLGGQSALALRLLLAVFSSKISSGANRPFGEEFRAARKVSEDMGAQLVLGDRPIEITLERAWKSLTWDQKTNLVISLFRGITATTDTPDGKTAVSPYELYEKLSTSYPSL

SEQ ID NO: 81493 - protein, 175 aa, Setaria italica
  misc_feature (51)..(51): Xaa can be any naturally occurring amino acid
  Transcript Sequence Number=SeqID_15519
  Gene Ontology: Mol. function=nucleotidyltransferase activity; Cellular component=intracellular; Biological process=DNA repair
  Homolog annotation: Hit_ID=B9RY76; Match level="QueryCoverage=99%, HitCoverage=14%, E-value=1e-63, Identity=67%"; Hit description =Terminal deoxycytidyl transferase rev1, putative
SNYYELHFIGTWRNRYRKRFSNLLEAKSIKSNADHSGNKKTIIHIDMVILXSPMDCFFVSVVIRNVPDLHDKPVAVCHSDNPKGTAEISSANYPARNYGIKAGMFVRDAKARCPHLKIVPYKFDAYEEVADQFYGILHKHCSKVQALSCDEAFLDMTDCLHDDPEEVTRRIRSEI

SEQ ID NO: 81494 - protein, 60 aa, Setaria italica
  Transcript Sequence Number=SeqID_15520
MVLGGTVRTYSLHGSIRVHFRCKSTNNFYFLKLHVILRKAERCWFLKLAYGIESYWPAPS

SEQ ID NO: 81495 - protein, 385 aa, Setaria italica
  Transcript Sequence Number=SeqID_15521
  Gene Ontology: Mol. function=iron-sulfur cluster binding; Cellular component=mitochondrion; Biological process=lipoate biosynthetic process
  Homolog annotation: Hit_ID=Q93XV6; Match level="QueryCoverage=84%, HitCoverage=88%, E-value=1e-151, Identity=79%"; Hit description =Lipoic acid synthase
  Pfam annotation: Domain name=Radical_SAM; Domain location=137-303; Score=83.7; E_value=6.5e-22; Accession=PF04055.13; Description =Radical SAM superfamily
  Subcellular localization annotation: CTP_CleavageSite=46; ConfidenceScore=5.56e-01
MHGRRHLAASLARALTQAPSRSISSTPSLLQTLESSVPSPPSGPPSAGRLAELRARLQADAPSLGDFTYSVEVGTRKRPLPKPKWMKETVPGGAKYAAIKAKLRELKLHTVCEEARCPNLGECWSGGETGTATATIMILGDTCTRGCRFCNVKTSRTPPPPDPDEPSNVAQAIASWGLEYIVITSVDRDDLPDQGSGHFAETVQKLKALKPEMLIEALVPDFRGDPSCVEKVATSGLHVFAHNIETVEELQRSVRDHRANFKQSIDVLKMAKEYAPPGTLTKTSIMLGCGETPDQVISTMEKVRAAGVDVITFGQYMRPSKRHMPVSEYVTPEAFEKYRALGVEMGFRYVASGPMVRSSYKAGEFYIKAMIEADRAKTSPADLSS

SEQ ID NO: 81496 - protein, 934 aa, Setaria italica
  misc_feature (346)..(346): Xaa can be any naturally occurring amino acid
  Transcript Sequence Number=SeqID_15522
  Gene Ontology: Mol. function=histone acetyltransferase activity; Cellular component=nucleus; Biological process=regulation of transcription, DNA-dependent
  Homolog annotation: Hit_ID=Q9XHY7; Match level="QueryCoverage=98%, HitCoverage=72%, E-value=0.0, Identity=74%"; Hit description =Probable histone acetyltransferase HAC-like 3
  Pfam annotation: Domain name=DUF906; Domain location=355-616; Score =595.0; E_value=7.9e-176; Accession=PF06010.4; Description=Domain of Unknown Function (DUF906)
  Pfam annotation: Domain name=PHD; Domain location=281-347; Score =15.5; E_value=0.00052; Accession=PF00628.21; Description=PHD-finger
  Pfam annotation: Domain name=zf-TAZ; Domain location=834-916; Score =18.5; E_value=0.0003; Accession=PF02135.8; Description=TAZ zinc finger
  Pfam module annotation: Pfam domain module=DUF906::PHD::zf-TAZ; Domain location=355-616::281-347::834-916
ESRKGKIISRVSDCEDLCREKYSSLSTPRAQYQCCFMTDCDPCDPERERVGRSEQTSNSTVSKPSSTVSDESYGKRPAKRLKADVPSLVNVNQAESPKEQKPVVNENHAYGETVQSEITELPTKSPCSSSGDINADTNNTLEQGSEDVHNMDVVAEEELHCVKGDIEMKDSKTVALDQTANQVNLSSRRKGGASILYALTAEELRDHLSSLINQHTCLSKVISQEIQLIEGLPDQNTCSFCGMERLLFEPPPRFCALCFKIINSTGCYYAEVENGKDKTSICSKCHHLSSSRAKYVKRFNYAETDAEAEWWVQCDKCKAWQHEICALFNRKCEGAKAEYTCAKCFXKEKDSGDIHALESSTVLGAQELPRTKLSDHIEQRLSERLEQDRQQRASASAKGAEEVPRVEGLAVRVVSSADRVLQVQPRFHDFFKQEKYPGEFPYKSKAILLFQKIEGVDVCLFAMYVQEYGSDCPSPNQRHVYLAYIDSVKYFRPEIKSASGEALRTFVYHEILIGYLDYCKKRGFVSCSIWACPSTKRDDYVLYCHPTVQKMPKSDKLRSWYQNLIKKAVKEGVVVERNTLYDFFLQPANECKANISAACLPYCENDFWPGEAERLLEKKDDKTSQKQETQVGRLLRVAKRDDRKGNLEDILLVHKLGERMRTMKEDFMMLCLQQFCKHCHQPIVSGRSWVCTSCKNFHLCDKCHAEEQNTAQKDRHPATTKQKHAFERIEVESLPETDDGDPIMESKYFDSRIDFLKHCQDNQFQFDTIRRAKHSTMMILYYLHNSTCSACHCAVDQCLVWRCLECLGCTFCDPCYKQNGESLHIHELRQIDASKTMQMNAIQDYVEGLVHASRCFDPCNCTLQVCLTLKKLFFHGVRCDIRARNWGGCNKCVFMWKLLLWHSKHCNDANCMVPRCRDIKAYMTEKIKLGGPVL

SEQ ID NO: 81497 - protein, 249 aa, Setaria italica
  Transcript Sequence Number=SeqID_15523
  Gene Ontology: Mol. function=calmodulin binding; Cellular component =integral to membrane; Biological process=cell death
  Homolog annotation: Hit_ID=B6TXU3; Match level="QueryCoverage=89%, HitCoverage=44%, E-value=1e-115, Identity=87%"; Hit description=MLO -like protein 4
  Pfam annotation: Domain name=Mlo; Domain location=1-249; Score=47.9; E_value=2.4e-20; Accession=PF03094.7; Description=Mlo family
SRFLIRLAEEMKARRTKVMRRQSTFVFHHASHPWSKNKVLIWMLCFLRQFKGSIKRSDYLALRLGFVTYHKLPHSYDFHKYMVRSMEDDYNGTIGISWPLWAYAIVCILVNVHGINIYFWLSFLPVILVLLVGTELQHVVAQLALEVAEATAPYVGTQLKLRDDLFWFGKPRVLWWLIQFISFQNAFELATFLWSLWELSAQTCFMKHYYMIAIRLISGLLVQFWCSYSTLHEELCILYCRRAGISLCS

SEQ ID NO: 81498 - protein, 223 aa, Setaria italica
  Transcript Sequence Number=SeqID_15524
  Gene Ontology: Mol. function=iron-sulfur cluster binding; Cellular component=integral to membrane; Biological process=cell death
  Homolog annotation: Hit_ID=B6TXU3; Match level="QueryCoverage=100%, HitCoverage=44%, E-value=1e-100, Identity=81%"; Hit description=MLO -like protein 4
  Pfam annotation: Domain name=Mlo; Domain location=1-212; Score= -165.7; E_value=6.7e-11; Accession=PF03094.7; Description=Mlo family
LINFLGLFLFWSMFMLVLLVGTELQHVVAQLALEVAEATAPYVGTQLKLRDDLFWFGKPRVLWWLIQFISFQNAFELATFLWSLWELSAQTCFMKHYYMIAIRLISGLLVQFWCSYSTLPLNVIISQMGSKFKKSLVSENVRESLHSWCKRVKDRNRHNPLFSRNGTVTTRSVCSLDTTYETDHETNTVGTLSRTVSATSLDDNLTVGTVDDDDEPSGIEKDV

SEQ ID NO: 81499 - protein, 303 aa, Setaria italica
  Transcript Sequence Number=SeqID_15525
  Gene Ontology: Mol. function=iron-sulfur cluster binding; Cellular component=integral to membrane; Biological process=iron-sulfur cluster assembly
  Homolog annotation: Hit_ID=B6TXU3; Match level="QueryCoverage=99%, HitCoverage=64%, E-value=1e-158, Identity=83%"; Hit description=MLO -like protein 4
  Pfam annotation: Domain name=Mlo; Domain location=1-302; Score=213.9; E_value=4.1e-61; Accession=PF03094.7; Description=Mlo family
AEGRSLAETPTWSVATVTTLMVAACFLIERSLSRFAKWLRKTKRKAMLAALEKIREELMLLGVISLLLSQTSRFISEICVPSSLFTSRFYMCSESDYKDLLQNKGANQTALAKTMFGGQSMHVCGEGHEPFVSYEGLEQLHRFLFILGITHVLYSFVTVVLSMIKIYSWRKWETLAGPIAAEEMKARRTKVMRRQSTFVFHHASHPWSKNKVLIWMLCFLRQFKGSIKRSDYLALRLGFVTYHKLPHSYDFHKYMVRSMEDDYNGTIGISWPLWAYAFVCILVNVHGINIYLALEVAEATAPY

SEQ ID NO: 81500 - protein, 69 aa, Setaria italica
  Transcript Sequence Number=SeqID_15526
AVLFVITKKKPRKHVDGHSLTSQQFTRPDTLCNKKKNPLHVFRGLHGMPIHRGDYTFLPHVPGKLFGVL

SEQ ID NO: 81501 - protein, 108 aa, Setaria italica
  Transcript Sequence Number=SeqID_15527
  Gene Ontology: Cellular component=nuclear pore; Biological process =transport
  Homolog annotation: Hit_ID=Q8LLD0; Match level="QueryCoverage=93%, HitCoverage=9%, E-value=1e-23, Identity=49%"; Hit description =Putative nucleoporin 96
LKNSMQEESAMDDLDPLEKKNESCKSFFGRLNDSLLVWGSKLPVESRACYSKMAEELCELFMNAPGEAMNLHMGCFQTMLNAPVPDDRKSSYLQEAVTLFTEILCSDS

SEQ ID NO: 81502 - protein, 854 aa, Setaria italica
  misc_feature (62)..(62): Xaa can be any naturally occurring amino acid
  Transcript Sequence Number=SeqID_15528
  Gene Ontology: Mol. function=structural constituent of nuclear pore; Cellular component=nuclear pore; Biological process=transport
  Homolog annotation: Hit_ID=B9SMV0; Match level="QueryCoverage=98%, HitCoverage=78%, E-value=0.0, Identity=55%"; Hit description =Nucleoporin, putative
MDEAAVRQPIAELREREPPSNGYEIELSHSLPAHLGLDPAKMQEMRMAMFYNEEDDEYMEDXGFPSDERYLSRERMNVDSPTSSGKGSRLRSVSPLHMSSQKVGRRSMPARKEPLALLEYSMNSSELGPSTQGMLMSGQNKGFPVKMTKVKGFKLQAEQETPVAGKMYTNCVVDAALLMGRSFRVGWGPNGMLVHSGSLVNSPGTGLSSVIHIEKVASDKVVRDDKNKIKEDLAELVFSDPMDLHKSLDHEFLETESDLFRLKLQKVVANRLVLPDICRSYIDIIERQLEISDLSMSSRVLLMHQVTVWELIRVLFSERANGNQLEPTGDDGQEGMVLDRKEGSVNIDLEALPLVRRADFSNWLQDSVCHRVQGEVGSLSDARYLELILLLLTGRQLDSAAEVAASRGDVRLAILLSQAGGSMSNRSDLSQQLDLWKMNGLDFNYIEEDRLKVYELLAGNIQAAFLDSPIDWKRYLGLIMWYQLQPDTSLDIIIHSYHHLLTEGKVPYPVPVYIDEGPLDEALQWSPGDRFDISFYLMLLHANQDEKFGLLKTMFSAFSSSYDTLDYHMIWHQRSILEAIGAFSSDDLHLLDLSFVYQLLCLGKCHWAIYVIVHMPYLDDAPYIHEKLIREVLSQYCESWSKDDAQRQYIVELGIPEEWMHEALALYHEYYGDRQGALENFIRCGNWKKAHTIFMTSVAHTMFLSSNHQEIWEITSALENHKSEIADWDLGAGIYIDFYILKNSMQEESAMDDLDPLEKKNESCKSFFGRLNDSLLVWGSKLPVESRACYSKMAEELCELFMNAPGEAMNLHMGCFQTMLNAPVPDDRKSSYLQEAVSVFTEILCSDSAVWGLS

SEQ ID NO: 81503 - protein, 331 aa, Setaria italica
  Transcript Sequence Number=SeqID_15529
  Gene Ontology: Cellular component=plasma membrane
VTMLTSTSSTSLPEEMFTCTLELQSSCKGHQRDSISPLYLKPGTGESQLFYLESQGDVILVEVQDNNRVVIGRAKIQVSSVTDTQQDEIIRWWPLYLEDQECVGKIQLCMNLSMSSNNSGSEKMLQGGPAVDTIIYDMVLEAAMRAQSFNSKMLHISGSWKWLLDEFSDYYGVSDAYRKLRYLSYIMNVAIPTKDCLELIYELLLPVMKAREDRTLTRQERSIMLDCEDRIKSLLAAVFENYKSLDEHSATGLSDLFGPISDCAAPALAPAVQIFSVLNDILSKEAQDILRSYLQTAAAKRCRRHMIETDEFLSSNNDSLLTDPMAISAAY

SEQ ID NO: 81504 - protein, 85 aa, Setaria italica
  misc_feature (7)..(7): Xaa can be any naturally occurring amino acid
  misc_feature (79)..(79): Xaa can be any naturally occurring amino acid
  Transcript Sequence Number=SeqID_15530
  Homolog annotation: Hit_ID=O04530; Match level="QueryCoverage=100%, HitCoverage=15%, E-value=1e-29, Identity=67%"; Hit description =F20P5.12 protein
AGHTAVXLKDENGTLWVAESGYENKKGDEIISMTPWDEWWGMALKDDSNPQIALLPLHPDVRARFNESAAWVFCQKHVXKPYGYH

SEQ ID NO: 81505 - protein, 264 aa, Setaria italica
  Transcript Sequence Number=SeqID_15531
SSLSMEAGPNRDKITKSISDALQLSKIYGFSGTEFGHVVIMFVLAVTTKLIDSILEDCGFPSGMEEGQESVYAIEGPQPMDLDVKRVSTENQNEHREQLRRKNTAMALDVLHMMVADRKIQSFLRLIFLNMPEKFSSLSQRLSSIEAHKVALERLLPSGHKINDLLLDIRRVCNANYQPNNKRIVDVLGNMRSGGSLLGQLTGAGRAACWIIFDIYVENAIDGKHLSGISAIEVLKEMTKTLQVLNEASWQETFKALGFRPSSR

SEQ ID NO: 81506 - protein, 99 aa, Setaria italica
  Transcript Sequence Number=SeqID_15532
QLQTNCFKFIMKEAELMYQLLQCKFDSTNLISFSNQIRRSALNLMMYNVDKSTAVPAAAAMVGLAREAKIAHYVLAREDFEHYLDYEVCDMIREGTTKV

SEQ ID NO: 81507 - protein, 631 aa, Setaria italica
  Transcript Sequence Number=SeqID_15533
  Gene Ontology: Mol. function=ARF guanyl-nucleotide exchange factor activity; Cellular component=intracellular; Biological process =regulation of ARF protein signal transduction
  Homolog annotation: Hit_ID=B9S916; Match level="QueryCoverage=94%, HitCoverage=40%, E-value=0.0, Identity=70%"; Hit description=Pattern formation protein, putative
  Pfam annotation: Domain name=Sec7; Domain location=284-471; Score =352.9; E_value=6.2e-103; Accession=PF01369.12; Description=Sec7 domain
GAEEMENGKSDFVCLNSSGDEVGDGSGVVQDKAMLEPFGVPCMVEILQFLCSLLNIAEDIDVNPKMNPIDFDEDVPLFALGLINSAIELSASSIHRHQKVMAFVQDELFRNLMHFGLSMSPLILSTVCSIVFTLFYHLRHELKLQIEAFFSCVILRLAQSRYGASYQQQEVALEALVDFCRQKEFMAEMYANMDCDLQCSNIFEELANLLSKSAFPVNSPLSALNVLALDGLVAVIQAMAERSNSAPQHHEQTVPEISEYFPFWQLKCESGNDPDQWVKFVHQQKSIKRKLMVGVEHFNRDKKKGFEFLQGAHLLPVKLDPHNVALFFRYTPGLDKNLLGDYLGNHDDFSIRVLHEFARTFDFKEMNLDAALRLFLETFRLPGESQKIQRILEAFSERYYEQSPQIFVNIDAALVLSYSVILLNTDQHNVRVKKKMTEEDFIRNNRRINGGNDLPREFLSEIYYSICRNEIRTIPEQGAGCSEMSFSRWVDLIWKSKRTSAYIACDSCPFLDHDMFSIMAEPTVAAISVVFDNVEHEEVLTGCIDGFLSVAKLAAFYHLNDVLNNLFVALCKFTTLLSSTDIDDPVTAFGEDTKARMATEAVFTITTAYGDHIRSGWRNIVDCILKLCLKY

SEQ ID NO: 81508 - protein, 690 aa, Setaria italica
  Transcript Sequence Number=SeqID_15534
  Gene Ontology: Mol. function=ARF guanyl-nucleotide exchange factor activity; Cellular component=intracellular; Biological process =regulation of ARF protein signal transduction
  Homolog annotation: Hit_ID=B9S916; Match level="QueryCoverage=97%, HitCoverage=46%, E-value=0.0, Identity=65%"; Hit description=Pattern formation protein, putative
DAFSRWVDLMWRSKRTSMYIACDSYPFLDHDMFSVMAGPAVAAISVVFDNVEHEEVLTGCIDGFLSVAKLAAFYHHNDVLNDLVVALCKFTTLLSSSYIDDPVTAFGEDTKARMATEAVFTIATTYGDHIRSGWRNIVDCILRLHKIGLLPGRLTGDTTDDQEATSDSLPSKLASSSAPPQVLPITTPWKSYGLMGRFSQLLYLDAEEPRSQPTEEQLAAQRNASETVKKCQIGTIFTESKFLQADSLSNLARALIQAAGRPQKITSSLDDEGIAVFCLELLITVTLNNRDRIVLLWQDVYEHITHIVQSTVMPCNLVEKAVFGLLHICQRLLPYKENLVDDLLRSLQLILKLDARVADAYCENITLEVTRLVKANATHIKSQMGWRTIISLLCITARHPDASDAGFEALVFIMSEGAHLSPANFILSVEASRQFAESRLGSAERSIHALNLMADSVNCLTRWSREVREAGGDADRILEGIAEMWLRLVQGLRKVCGDQREEVRNHALLSLHRCLVVDGILVSSSTWLMAFDIIFQLLDELLEIAQSYSPKDFRNMEVSLLHAVKLLCKVFLQSLKDLSAQGSFGKLWLEVLDMIEKFMKVKVRGRRTEKLQEAIPELLKNILMVMKASGILSKTSTSENSLSEATWLQVNKIAPSLRSEIFPDNEGDSTTQGEENKLDTPAQSNQSANQ

SEQ ID NO: 81509 - protein, 122 aa, Setaria italica
  Transcript Sequence Number=SeqID_15535
  Gene Ontology: Mol. function=calcium ion binding
  Homolog annotation: Hit_ID=B9SII2; Match level="QueryCoverage=72%, HitCoverage=60%, E-value=2e-28, Identity=69%"; Hit description =Programmed cell death protein, putative
NFKKFGRGQPMSFEEFLALNKFLQKVQSVFSTLERGRGFLSLEEVYEALIKLGFSLDSPAFYTVCESFDKSKKGMVHLDEFISLCIFVQSARNMFNSFDTSKQGRVSLDFNQFVYCTANCRI

SEQ ID NO: 81510 - protein, 395 aa, Setaria italica
  Transcript Sequence Number=SeqID_15536
  Gene Ontology: Mol. function=catalytic activity; Biological process =positive regulation of fibroblast proliferation
  Homolog annotation: Hit_ID=A7J147; Match level="QueryCoverage=100%, HitCoverage=86%, E-value=1e-171, Identity=74%"; Hit description =Farnesyltransferase beta subunit
  Pfam annotation: Domain name=Prenyltrans; Domain location=103-146; Score=39.8; E_value=1.1e-08; Accession=PF00432.13; Description =Prenyltransferase and squalene oxidase re
  Pfam annotation: Domain name=Prenyltrans; Domain location=151-194; Score=54.5; E_value=4.1e-13; Accession=PF00432.13; Description =Prenyltransferase and squalene oxidase re
  Pfam annotation: Domain name=Prenyltrans; Domain location=199-242; Score=38.3; E_value=3.1e-08; Accession=PF00432.13; Description =Prenyltransferase and squalene oxidase re
  Pfam annotation: Domain name=Prenyltrans; Domain location=303-347; Score=28.9; E_value=2e-05; Accession=PF00432.13; Description =Prenyltransferase and squalene oxidase re
  Pfam annotation: Domain name=Prenyltrans; Domain location=52-95; Score=54.8; E_value=3.2e-13; Accession=PF00432.13; Description =Prenyltransferase and squalene oxidase re
  Pfam module annotation: Pfam domain module=Prenyltrans::Prenyltrans::P renyltrans::Prenyltrans::Prenyltrans; Domain location=103-146::151 -194::199-242::303-347::52-95
MLELWRDQHIEYLTHGLRHLGPAFHVLDANRPWLCYWMVHPLALLDEVLDDDLEDDIVDFLARCQDKDGGYGGGPGQLPHLATTYAAVNTLVTIGSERALSSINRDNLYKFMLRMKDESGAFRMHDGGEIDVRASYTAISVASLVNILDVELAKGVGDFIARCQTYEGGIAGEPDVEAHGGYTFCGLAALILLNEAEKLDLPSLIDWVAFRQGVECGFQGRTNKLVDGCYSFWQGAAIALTQKLVMIVDEQLKSSYSCKNPSWDDACGTTSSGCTSEKSSSDVDYAKFGYDFVQRSNQVGPLFHNIALQQYILLCAQVLEGGLRDKPGKNRDHYHSCYCLSGLSVSQYSAMTDSDSCPLPQQVLGPYSNLLEPIHPLYNVVLDKYHTAYEFFSKE

SEQ ID NO: 81511 - protein, 36 aa, Setaria italica
  Transcript Sequence Number=SeqID_15537
FSFKLMCLVVDYVSTFGRHDNRASKSPKSRHIINHQ

SEQ ID NO: 81512 - protein, 75 aa, Setaria italica
  Transcript Sequence Number=SeqID_15538
  Gene Ontology: Mol. function=translation elongation factor activity; Cellular component=cytoplasm; Biological process=translational elongation
  Homolog annotation: Hit_ID=B9FBM7; Match level="QueryCoverage=85%, HitCoverage=14%, E-value=3e-29, Identity=98%"; Hit description =Elongation factor 1-alpha
  Pfam annotation: Domain name=GTP_EFTU_D3; Domain location=1-58; Score= 42.1; E_value=2.1e-09; Accession=PF03143.9; Description=Elongation factor Tu C-terminal domain
KELEKEPKFLKNGDAGMVKMIPTKPMVVETFSEYPPLGRFAVRDMRQTVAVGVIKSVEKKDPTGAKVTKAAAKKK

SEQ ID NO: 81513 - protein, 83 aa, Setaria italica
  Transcript Sequence Number=SeqID_15539
  Gene Ontology: Mol. function=translation elongation factor activity; Cellular component=cytoplasm; Biological process=translational elongation
  Homolog annotation: Hit_ID=B9FBM7; Match level="QueryCoverage=86%, HitCoverage=16%, E-value=5e-34, Identity=98%"; Hit description =Elongation factor 1-alpha
  Pfam annotation: Domain name=GTP_EFTU_D3; Domain location=1-66; Score= 63.7; E_value=6.7e-16; Accession=PF03143.9; Description=Elongation factor Tu C-terminal domain
TKIDRRSGKELEKEPKFLKNGDAGMVKMIPTKPMVVETFSEYPPLGRFAVRDMRQTVAVGVIKSVEKKDPTGAKVTKAAAKKK

SEQ ID NO: 81514 - protein, 103 aa, Setaria italica
  Transcript Sequence Number=SeqID_15540
  Gene Ontology: Mol. function=translation elongation factor activity; Cellular component=cytoplasm; Biological process=translational elongation
  Homolog annotation: Hit_ID=B9FBM7; Match level="QueryCoverage=84%, HitCoverage=20%, E-value=2e-41, Identity=94%"; Hit description =Elongation factor 1-alpha
  Pfam annotation: Domain name=GTP_EFTU_D3; Domain location=1-86; Score= 104.3; E_value=4e-28; Accession=PF03143.9; Description=Elongation factor Tu C-terminal domain
LVIYPNLNTSHIAVKFAELITKIDRRSGKELEKEPKFLKNGDAGMVKMIPTKPMVVETFSEYPPLGRFAVRDMRQTVAVGVIKSVEKKDPTGAKVTKAAAKKK

SEQ ID NO: 81515 - protein, 126 aa, Setaria italica
  Transcript Sequence Number=SeqID_15541
  Gene Ontology: Mol. function=translation elongation factor activity; Cellular component=cytoplasm; Biological process=translational elongation
  Homolog annotation: Hit_ID=B9FBM7; Match level="QueryCoverage=91%, HitCoverage=26%, E-value=4e-59, Identity=94%"; Hit description =Elongation factor 1-alpha
  Pfam annotation: Domain name=GTP_EFTU_D3; Domain location=1-109; Score=203.4; E_value=6.3e-58; Accession=PF03143.9; Description =Elongation factor Tu C-terminal domain
GRTTASFTSQVIIMNHPGQIGNGYAPVLDCHTSHIAVKFAELITKIDRRSGKELEKEPKFLKNGDAGMVKMIPTKPMVVETFSEYPPLGRFAVRDMRQTVAVGVIKSVEKKDPTGAKVTKAAAKKK

SEQ ID NO: 81516 - protein, 129 aa, Setaria italica
  Transcript Sequence Number=SeqID_15542
  Pfam annotation: Domain name=Hin1; Domain location=1-110; Score=-8.9; E_value=0.01; Accession=PF07320.5; Description=Harpin-induced protein 1 (Hin1)
PVAINISAALKVRVRNPDFFALDYSRLDVDIGYRGARLGRVTSGGGRVRARAVSYVDADLQLDGIRVVEDAIYLLEDLARGSVPFDTVVEVEGHLHLLFLSVPVKGRISCVVHVNPHNQTIVHQDCYPE

SEQ ID NO: 81517 - protein, 83 aa, Setaria italica
  Transcript Sequence Number=SeqID_15543
  Subcellular localization annotation: CTP_CleavageSite=52; ConfidenceScore=5.65e-01
FFVVLLQPALAPARAMAAATASTAATLLPGPVVGSAASAPSTSRRRRLLAFRCQSTSVDKEQEQPPKPKQRNMLDNASNLLTN

SEQ ID NO: 81518 - protein, 61 aa, Setaria italica
  Transcript Sequence Number=SeqID_15544
  Subcellular localization annotation: CTP_CleavageSite=46; ConfidenceScore=5.25e-01
MDLDADMIPTSPSADSSPSSSDLDTESTGSFFHDRSTTLGTLMGVSAFGGGAQQRRAARVP

SEQ ID NO: 81519 - protein, 117 aa, Setaria italica
  misc_feature (57)..(57): Xaa can be any naturally occurring amino acid
  Transcript Sequence Number=SeqID_15545
  Gene Ontology: Mol. function=electron carrier activity; Cellular component=integral to membrane; Biological process=oxidation reduction
  Homolog annotation: Hit_ID=B6SWK0; Match level="QueryCoverage=95%, HitCoverage=22%, E-value=2e-44, Identity=78%"; Hit description =Cytochrome P450 CYP90B14v2
ELVGAMMASITSELLFFLPFILLALLTFYTTTVAKCHGAHRWRPTKKKRPNLPPGAXGWPLVGETFGYLRPHPATSVGRFMEQHVARYGKIYRSSLFGERTVVSADAGLNRYILAER

SEQ ID NO: 81520 - protein, 35 aa, Setaria italica
  Transcript Sequence Number=SeqID_15546
  Gene Ontology: Mol. function=protein serine/threonine kinase activity; Biological process=protein amino acid phosphorylation
  Homolog annotation: Hit_ID=Q5JJY4; Match level="QueryCoverage=97%, HitCoverage=5%, E-value=2e-09, Identity=94%"; Hit description =Probable protein phosphatase 2C 4
QVTRSIGDDDLKPAVTAQPEVIETALSDDDEFLVG

SEQ ID NO: 81521 - protein, 150 aa, Setaria italica
  Transcript Sequence Number=SeqID_15547
  Gene Ontology: Mol. function=protein serine/threonine kinase activity; Cellular component=protein serine/threonine phosphatase complex; Biological process=protein amino acid phosphorylation
  Homolog annotation: Hit_ID=Q5JJY4; Match level="QueryCoverage=100%, HitCoverage=22%, E-value=2e-77, Identity=93%"; Hit description =Probable protein phosphatase 2C 4
  Pfam annotation: Domain name=PP2C; Domain location=1-133; Score=18.6; E_value=5.8e-07; Accession=PF00481.13; Description=Protein phosphatase 2C
AGDCRAILSRAGKPFPMTKDHVASCPKERERVTKAGTEVKWQIDTWRVGAAALQVTRSIGDDDLKPAVTAQPEVIETALSDDDEFLVMASDGLWDVVSNEDVLSIIKDTVKEPGMCSKRLATEAAERGSKDNITVIVVFLRPVSTAERIY

SEQ ID NO: 81522 - protein, 234 aa, Setaria italica
  misc_feature (13)..(13): Xaa can be any naturally occurring amino acid
  Transcript Sequence Number=SeqID_15548
  Gene Ontology: Mol. function=protein serine/threonine kinase activity; Cellular component=protein serine/threonine phosphatase complex; Biological process=protein amino acid phosphorylation
  Homolog annotation: Hit_ID=Q5JJY4; Match level="QueryCoverage=97%, HitCoverage=34%, E-value=1e-110, Identity=82%"; Hit description =Probable protein phosphatase 2C 4
  Pfam annotation: Domain name=PP2C; Domain location=42-234; Score =87.2; E_value=5.9e-23; Accession=PF00481.13; Description=Protein phosphatase 2C
HYQEALNWFNQGXFVKRSEKSYLTENLWSGSSNQSSEYHPTLSWGSFATCGRRETMEDTHFMLPNVSEEKDVFAFGIFDGHRGSAAAEFSVRAVPGFLKQFGRDTSPTDALAEAFVRTDIAFREELILHQKSKRIIRKDWHPGCTAVTALVVSNKLFVANAGDCRAILSRAGKPFPMTKDHVASCPKERERVTKAGTEVKWQIDTWRVGAAALQVTRSIGDDDLKPAVVDLSVV

SEQ ID NO: 81523 - protein, 164 aa, Setaria italica
  Transcript Sequence Number=SeqID_15549
  Gene Ontology: Mol. function=transferase activity, transferring groups other than amino-acyl groups
  Homolog annotation: Hit_ID=Q00M88; Match level="QueryCoverage=76%, HitCoverage=26%, E-value=4e-22, Identity=41%"; Hit description=N -hydroxycinnamoyl/benzoyltransferase 2
AGCSVSIDCDGQGVDILHAVADGVAVADAIPPDADVPRLVHSFFPSDGAVNHDSQPLPLFVVQVTELADGVFIGFAYNHALSDGTAFWDFLNVWAGIARARLPLLSGGKEAASWDFQPPLLERWSPDSVPGPVVLPFPDLTGLIDRLSPQPLRERMLHFSGESL

SEQ ID NO: 81524 - protein, 86 aa, Setaria italica
  Transcript Sequence Number=SeqID_15550
LDFSRVICLALVAATSSCLAAWISQCAAILTHSVQEACLMKTTCKMGPRCQDQSDLRLHIEISSILGDVSALFNNLNPILILCYIN

SEQ ID NO: 81525 - protein, 66 aa, Setaria italica
  Transcript Sequence Number=SeqID_15551
KAANWKSLSFVLMEACVYRHGHSKCIIMLLILVIANLWIMCSSSTQKQVLPPGFSGSEMDYIDNNG

SEQ ID NO: 81526 - protein, 144 aa, Setaria italica
  Transcript Sequence Number=SeqID_15552
  Gene Ontology: Mol. function=heat shock protein binding; Biological process=protein folding
  Homolog annotation: Hit_ID=B9SW58; Match level="QueryCoverage=90%, HitCoverage=20%, E-value=2e-41, Identity=61%"; Hit description=Heat shock protein binding protein, putative
  Pfam annotation: Domain name=DnaJ; Domain location=66-127; Score =106.7; E_value=7.7e-29; Accession=PF00226.23; Description=DnaJ domain
MECNRDEAKRAKDIAKKKFEAKDLQGARKFALKAQALFPDLEGIAQMIATFEIYLASEVKVAGEKDWYSILSVTTAADDETIKKQYRKLVLLLHPDKNKQVGAEGAFQMVKEAYTVLSDKTKRAVYDQKRNVRAFQQRTKQEGT

SEQ ID NO: 81527 - protein, 488 aa, Setaria italica
  Transcript Sequence Number=SeqID_15553
  Gene Ontology: Mol. function=metalloendopeptidase activity; Cellular component=cytoplasm; Biological process=proteolysis
  Homolog annotation: Hit_ID=Q6K200; Match level="QueryCoverage=99%, HitCoverage=99%, E-value=0.0, Identity=63%"; Hit description =Putative met-10+ protein
  Pfam annotation: Domain name=Met_10; Domain location=118-425; Score =280.3; E_value=4.4e-81; Accession=PF02475.8; Description=Met-10+ like-protein
MEKLDESKFEQRLELWALRIPRELASAVTRLLRSGYLLDKPRVKPVVEDPENDKNRLVVLSERILKPDLSDMPQQMHDSLKQLCSVDVVPYALTLGYSYWSADHILKQILPAGVEVPSSFETIGHVAHLNISDDLLPYKDVIAKVIYDKNYPRIQTVVNKVGTITNEFRVPKFEILAGKNDMVTEVKQYGATFRLDYGLVYWNSRLEHEHIRLVSLFKKGDVICDMFAGIGPFSIPAAQKGCVVYANDLNPDSVHYLRTNAKINKVEDYIFSYNMDARVFMKSLMSVPGSETRSDSQVAADECYPKGGVPANEYSSSNGNHNDVRDDGQNSANDSSLASTIAKKRQQTSKEGEPDCQDGDASQTKQRNNKRVKGSGPPPTKPWEHIDHVLMNLPASALQFLDCFDGLVQKKHWTGSLPWIHCYCFIRSTESEESILSEAQNKLNAKIAEPIFHRVRDVAPNKAMYCLSFKLPMECLKDDTENHIQSVA

SEQ ID NO: 81528 - protein, 101 aa, Setaria italica
  Transcript Sequence Number=SeqID_15554
  Homolog annotation: Hit_ID=B6U7W3; Match level="QueryCoverage=69%, HitCoverage=12%, E-value=3e-18, Identity=68%"; Hit description =Nitrate and chloride transporter
PPRGQETSRTLFCFLYLSIALASFLLVMIVVQKQVPFSREAYGLAATPLLILLLMPLGVVVKQEYKIFRERQLDAALLAAGPPPTITVAGAANDNIQMSTD

SEQ ID NO: 81529 - protein, 227 aa, Setaria italica
  misc_feature (85)..(85): Xaa can be any naturally occurring amino acid
  Transcript Sequence Number=SeqID_15555
  Gene Ontology: Mol. function=metal ion transmembrane transporter activity; Cellular component=membrane; Biological process=metal ion transport
  Homolog annotation: Hit_ID=B9HF71; Match level="QueryCoverage=94%, HitCoverage=54%, E-value=2e-48, Identity=50%"; Hit description =Magnesium transporter (Fragment)
  Pfam annotation: Domain name=CorA; Domain location=1-218; Score=60.7; E_value=5.3e-15; Accession=PF01544.10; Description=CorA-like Mg2+ transporter protein
PFELKVLVVCLEHTCKCLESETLALEKEAYPALDELTSKVSRLNLEHVRHIKNRLVALSGRVQKVRDELEHLLDDDMDMSEMYLXRKLAFQGFTETLSRVDSNKDAPTDHDEKEEEDSDDEIETGHESSAYVKPDIEELEMLVEAYFVQIDGTLNKLYNLREYVDDTEDYINIMLDEKQNQLLQMGVLLTTATVVVTAGIVVVSLFGMNIHIELMKDPETDEEARMK

SEQ ID NO: 81530 - protein, 58 aa, Setaria italica
  Transcript Sequence Number=SeqID_15556
  Homolog annotation: Hit_ID=B6TUW2; Match level="QueryCoverage=70%, HitCoverage=25%, E-value=1e-12, Identity=90%"; Hit description =Polcalcin Jun o 2
  Pfam annotation: Domain name=efhand; Domain location=30-58; Score =19.8; E_value=0.012; Accession=PF00036.24; Description=EF hand
PALEAAGGALVGADELARAIGAVGGASAEDCAAIVECLDGDGDGAITIEEFRFMADLL

SEQ ID NO: 81531 - protein, 84 aa, Setaria italica
  misc_feature (10)..(10): Xaa can be any naturally occurring amino acid
  Transcript Sequence Number=SeqID_15557
  Gene Ontology: Mol. function=asparagine-tRNA ligase activity; Cellular component=cytoplasm; Biological process=tRNA aminoacylation for protein translation
  Homolog annotation: Hit_ID=B6SVU1; Match level="QueryCoverage=88%, HitCoverage=12%, E-value=2e-34, Identity=93%"; Hit description =Asparaginyl-tRNA synthetase, cytoplasmic 3
FLKVGELIGXGAKGEERLDALKQRILDAGLPLEPYEWYLDLRRFGSVKHSGFGLGFERMILFATGMENIRDVIPFPRYPGRADL

SEQ ID NO: 81532 - protein, 555 aa, Setaria italica
  Transcript Sequence Number=SeqID_15558
  Gene Ontology: Mol. function=asparagine-tRNA ligase activity; Cellular component=cytoplasm; Biological process=tRNA aminoacylation for protein translation
  Homolog annotation: Hit_ID=B6SVU1; Match level="QueryCoverage=97%, HitCoverage=95%, E-value=0.0, Identity=91%"; Hit description =Asparaginyl-tRNA synthetase, cytoplasmic 3
  Pfam annotation: Domain name=WHEP-TRS; Domain location=224-278; Score= -6.4; E_value=0.089; Accession=PF00458.12; Description=WHEP-TRS domain
  Pfam annotation: Domain name=tRNA-synt_2; Domain location=134-551; Score=205.5; E_value=1.4e-58; Accession=PF00152.12; Description=tRNA synthetases class II (D, K and N)
  Pfam annotation: Domain name=tRNA_anti; Domain location=37-116; Score= 54.1; E_value=5.3e-13; Accession=PF01336.17; Description=OB-fold nucleic acid binding domain
  Pfam module annotation: Pfam domain module=WHEP-TRS::tRNA-synt _2::tRNA_anti; Domain location=224-278::134-551::37-116
MAADAAASLCDDLEPATVRTRIRDVLAAGAARAGERVVVGGWVRTGREQGKGSFAFLELSDGSCAATLQVIVDATVHPLARLTATGTSVLVEGDIKEPPEGTKQNVELKVSRVLEVGEVDAAAYPLPKGKVKLTLEKLRDVVHLRSRTNTIGAVARIRHQLACATHRFFDENGFLYVHTPIITTSDCEGAGEMFQVTTLFSQAEKTEKELKENPAPSDSEIEAAKVLVKEKGDAVAQLKAAKASKQDISAAVDVLHRAKENVSKLEERSKLKPGIPRRDDGSIAFENDFFKRQAFLTVSGQLQVETYACALSSVYTFGPTFRAENSHTSRHLAEFWMVEPELAFANLQDDMNCAEKYVQYLCKWLLEHCREDMEFMVKNYDKSAIERLELVSSTPFVRISYTKAVELLKNVTDKKFDNKVEWGIDLASEHERYLTEDIFKKPVIVYNYPKGIKAFYMRLNDDDKTVAAMDVLVPKVGELIGGSQREERLDALKQRILDAGLPLEPYEWYLDLRRFGSVKHSGFGLGFERMILFATGMENIRDVIPFPRYPGRADL

SEQ ID NO: 81533 - protein, 69 aa, Setaria italica
  Transcript Sequence Number=SeqID_15559
VFLRLNQPIYVVGVYKMSVFCLFFCSMTAAMLMVLSLDGLQFANPILQFVLRNISCTLGKHSFIGLCTS

SEQ ID NO: 81534 - protein, 155 aa, Setaria italica
  Transcript Sequence Number=SeqID_15560
  Gene Ontology: Mol. function=transcription regulator activity; Cellular component=nucleus; Biological process=regulation of transcription
GGGLSAPTQDLNNEQYCSEKSTVAPTAHFSTQSAGETSIDDISSQKATSTPKNWADDSTPSKQPPWLSMSTSDSGDRTLSKNENNTLHEDTRSLSNAYSQGLLNRLTQALKRSGVDPSQASISVEINMDKREPSNMHDNLKEQDNECEETIHVTK

SEQ ID NO: 81535 - protein, 124 aa, Setaria italica
  misc_feature (17)..(17): Xaa can be any naturally occurring amino acid
  misc_feature (28)..(28): Xaa can be any naturally occurring amino acid
  Transcript Sequence Number=SeqID_15561
  Gene Ontology: Mol. function=transcription regulator activity; Cellular component=nucleus; Biological process=regulation of transcription
MVSQNISQVQGGGLSAXQQDLNNEQYCXREKSVAPTAHFSTQSAGETSIDDISSQKATSTPKNWADDSTPSKQPPWLSMSTSDSGDRTLSKNENNTLHEDTRSLSNAYSQGSVPKLAVACRMLI

SEQ ID NO: 81536 - protein, 107 aa, Setaria italica
  Transcript Sequence Number=SeqID_15562
RRELPSFFIAPPPPFGGSVIGAPIGSINPSGWCYLLLALLPGNGFCHREPTTMNSEYSGQMGQNSLRPQVFFLSFVILTFYLALLRPATAQITAPWKLMLSRLSGAA

SEQ ID NO: 81537 - protein, 86 aa, Setaria italica
  Transcript Sequence Number=SeqID_15563
KSDEKPRTRKRRRVGRGGDGGPGETRRRHLYLVLDDWSSGYSIRKVDLSPSDRCCRRCGGRRHQPCLPPSLFRFEASAPCGVIMSP

SEQ ID NO: 81538 - protein, 176 aa, Setaria italica
  Transcript Sequence Number=SeqID_15564
  Gene Ontology: Mol. function=dolichyl pyrophosphate Glc1Man9GlcNAc2 alpha-1,3-glucosyltransferase activity; Cellular component =endoplasmic reticulum membrane; Biological process=protein amino acid glycosylation
  Homolog annotation: Hit_ID=Q9FF17; Match level="QueryCoverage=64%, HitCoverage=21%, E-value=9e-39, Identity=66%"; Hit description =Probable dolichyl pyrophosphate Man9GlcNAc2 alpha-1,3-glucosyltransfe rase
  Pfam annotation: Domain name=Alg6_Alg8; Domain location=47-176; Score= -305.4; E_value=0.034; Accession=PF03155.7; Description=ALG6, ALG8 glycosyltransferase family
IHRDQRRLPMAKPKKPRASAPDPPAAAARLPWHPPAPPVPTALLISLAALLVRVLVSMGPYSGQGAAPKFGDYEAQRHWMELTLHLPPSDWYRNTSDNDLAYWGLDYPPLSAYQSLLHGRIINASLPDAVALRSSRGYESPESKLLMRWTVLSSDLLVFFPAALWFVWAYIKGGIG

SEQ ID NO: 81539 - protein, 76 aa, Setaria italica
  Transcript Sequence Number=SeqID_15565
  Gene Ontology: Mol. function=heat shock protein binding
  Homolog annotation: Hit_ID=B6TPQ8; Match level="QueryCoverage=100%, HitCoverage=25%, E-value=1e-34, Identity=92%"; Hit description=Heat shock protein binding protein
  Pfam annotation: Domain name=DnaJ; Domain location=12-76; Score=45.0; E_value=2.9e-10; Accession=PF00226.23; Description=DnaJ domain
MAAMGQEEDDIDHYEVLCLPSGEEGAALTIEQIEKAYRTQSRQRHPDKRPDDPNATADFQRLSSSYKLLRDESLRR

SEQ ID NO: 81540 - protein, 184 aa, Setaria italica
  misc_feature (77)..(77): Xaa can be any naturally occurring amino acid
  Transcript Sequence Number=SeqID_15566
  Gene Ontology: Mol. function=ATP-dependent helicase activity; Biological process=DNA recombination
  Homolog annotation: Hit_ID=B9SXL4; Match level="QueryCoverage=70%, HitCoverage=17%, E-value=4e-23, Identity=42%"; Hit description=DNA helicase, putative
  Subcellular localization annotation: CTP_CleavageSite=36; ConfidenceScore=5.27e-01
NFQQSLPSRTVKLTCGLFRNLFLRNTKNKKSQSSSSSNELSEKALADFSQIVDYCESSSCRRKKIIESFGEKVQPTXLCQRSCDACKHPNLVSSRLEELRRVPNCRFNKVSLVFQSSLVNPAHLDTEFWNREDGASISGEDISDSDDGNEVLSNIAISKIPSKAGLDAKFKALERAVKLSLFIL

SEQ ID NO: 81541 - protein, 522 aa, Setaria italica
  Transcript Sequence Number=SeqID_15567
  Gene Ontology: Mol. function=ATP-dependent helicase activity; Cellular component=nucleoplasm; Biological process=DNA recombination
  Homolog annotation: Hit_ID=B9SXL4; Match level="QueryCoverage=91%, HitCoverage=63%, E-value=1e-115, Identity=46%"; Hit description=DNA helicase, putative
  Pfam annotation: Domain name=Helicase_C; Domain location=45-121; Score=87.5; E_value=4.7e-23; Accession=PF00271.23; Description =Helicase conserved C-terminal domain
SQSQRYKDLLDDVYSDISNLLKSSGNVCSIIYCLERAACDDLCMHLSQQGISSAAYHAGLNSKVRSSVLDDWLSSRTQVVVATVAFGMGIDRQDVRIVCHFNLPKSMESFYQESGRAGRDQQPSRSVLYYGLDDRRRMEFILRNTKNKKSQSSSSSNELSEKALADFSQIVDYCESSSCRRKKIIESFGEKVQPTLCQRSCDACKHPNLVSSRLEELRRVPNCRFNKVSLVFQSSLVNPAHLDTEFWNREDVASISGEDISDSDDGNEVLSNIAISKIPSKAGLDAKFKALERAENAYYQGKGQTKQQGQGGGLVDKKSISQALRDACCKRLLGALGQAKLRLGNLPCDETASATHLEKECFKKYEKVGKTFYNSQIAATVRWLSSATFNQMHDRFHFLIDQDTDHGASSSPNIVPESPPAATEVVGARPGETSNYKTNDKPQNIHDLEKMKHSDELAKTAAASAGNMELPAIPSFREFLSQKGKDRLKSSSNSSAGSQPSGIRRKSSDLVERQEASKKMKP

SEQ ID NO: 81542 - protein, 365 aa, Setaria italica
  misc_feature (136)..(136): Xaa can be any naturally occurring amino acid
  Transcript Sequence Number=SeqID_15568
  Gene Ontology: Mol. function=ATP-dependent helicase activity; Cellular component=intracellular; Biological process=DNA recombination
  Homolog annotation: Hit_ID=Q9FT72; Match level="QueryCoverage=89%, HitCoverage=45%, E-value=1e-139, Identity=70%"; Hit description=DNA Helicase
  Pfam annotation: Domain name=DEAD; Domain location=76-246; Score =109.4; E_value=1.2e-29; Accession=PF00270.21; Description=DEADDEAH box helicase
  Pfam annotation: Domain name=Helicase_C; Domain location=312-365; Score=4.3; E_value=0.02; Accession=PF00271.23; Description=Helicase conserved C-terminal domain
  Pfam annotation: Domain name=ResIII; Domain location=72-242; Score= -34.1; E_value=0.039; Accession=PF04851.7; Description=Type III restriction enzyme, res subunit
  Pfam module annotation: Pfam domain module=DEAD::Helicase_C::ResIII; Domain location=76-246::312-365::72-242
TSIDGIAIGTSRNTRSGWAVYYPRDRDSTEPHTSVTSQLKGVLPIKGASAASVRNKKAPKELENVLNQYFGYSGFRGKQLEAIEAVLSGRDCFCLMPTGGGKSMCYQIPALVRTGIVLVISPLIALMENQVASLKXGIPAEFLSSTQTAHTKQAIHEDLDSGTPSLKLLYVTPELVATPGFMAKLKKLYHRGLLGLVAIDEAHCISTWGHDFRPSYRKLSSLRKQFPDIPLLALTATAVPKVQKDVISSLCLQNPVILRASFNRPNIFYEVRYKDLLDDVYSDISNLLKSSGNVCSIIYCLERAACDDLCMHLSQQGISSAAYHAGLNSKVRSSVLDDWLSSRTQVVVATVAFGMGIDRQDVRIV

SEQ ID NO: 81543 - protein, 449 aa, Setaria italica
  Transcript Sequence Number=SeqID_15569
  Gene Ontology: Mol. function=heat shock protein binding; Cellular component=chloroplast; Biological process=protein folding
  Homolog annotation: Hit_ID=Q948S9; Match level="QueryCoverage=97%, HitCoverage=100%, E-value=0.0, Identity=81%"; Hit description=DNAJ homologue
  Pfam annotation: Domain name=DnaJ; Domain location=91-152; Score =137.7; E_value=3.6e-38; Accession=PF00226.23; Description=DnaJ domain
  Pfam annotation: Domain name=DnaJ_C; Domain location=315-437; Score =214.2; E_value=3.5e-61; Accession=PF01556.10; Description=DnaJ C terminal region
  Pfam annotation: Domain name=DnaJ_CXXCXGXG; Domain location=219-302; Score=105.2; E_value=2.3e-28; Accession=PF00684.11; Description=DnaJ central domain (4 repeats)
  Pfam module annotation: Pfam domain module=DnaJ::DnaJ_C::DnaJ _CXXCXGXG; Domain location=91-152::315-437::219-302
MALVQFSGALVPQLGEKPRVLPASPVVARVAYAADARFLSPKTGIRGRGKHLVSSSYSLHSQTSSERLNHVPSSRCRQKRGSRFVVRAEADFYSILGVSRNASKSEIKSAYRKLARSYHPDVNKDPGAEQKFKDISNAYEVLSDDEKRSIYDKYGEAGLKGAGMGTGDYSNPFDLFESLFEGFGGMGGMGGGRAARNRPMQGDDETYNLVLNFKEAVFGVEKEIEITRLEGCNTCDGSGAKPGTKPTTCKTCGGQGQVVSSTRTPLGIFQQVSTCNTCGGTGEFSTPCNTCGGDGRVRRTKRISLKVPAGVDSGSRLRVRSEGNAGRRGGPPGDLYVFIDVLSDPVLKRDGTNILYTCKVSYIDAILGTTVKVPTVDGMVDLKIPSGTQPGTTLVMSKKGVPLLGKSNARGDQLVRVQVEIPKRLSSDERKLIEELADLNKAQTANSRR

SEQ ID NO: 81544 - protein, 197 aa, Setaria italica
  misc_feature (57)..(57): Xaa can be any naturally occurring amino acid
  misc_feature (76)..(76): Xaa can be any naturally occurring amino acid
  Transcript Sequence Number=SeqID_15570
  Gene Ontology: Mol. function=3-beta-hydroxy-delta5-steroid dehydrogenase activity; Cellular component=endoplasmic reticulum; Biological process=steroid biosynthetic process
  Homolog annotation: Hit_ID=B6TKP9; Match level="QueryCoverage=92%, HitCoverage=27%, E-value=7e-34, Identity=41%"; Hit description =Sterol-4-alpha-carboxylate 3-dehydrogenase, decarboxylating
ADLTSFVSLQFIFGDGKNRDDFVYVENVVHGHICADKTLSTMEGAKTSGGKVCSYNXSMINSDSLTSIYVLSLPFXTFRPYFITNMEPMNMWDFLYMVQEELGYKRLFKIRIPLLIIKPISYLVEWGYKVFYHYGMCQPHILTPARIKYTTLNRTFSCNKAIEELGYKPTVTIMDGLKATVESYIQLKNKNISRERK

SEQ ID NO: 81545 - protein, 376 aa, Setaria italica
  Transcript Sequence Number=SeqID_15571
  Gene Ontology: Mol. function=3-beta-hydroxy-delta5-steroid dehydrogenase activity; Cellular component=endoplasmic reticulum; Biological process=steroid biosynthetic process
  Homolog annotation: Hit_ID=Q7Y0G5; Match level="QueryCoverage=94%, HitCoverage=74%, E-value=1e-124, Identity=61%"; Hit description=NAD dependent epimerase/dehydratase family protein, expressed
  Pfam annotation: Domain name=3Beta_HSD; Domain location=24-296; Score= 298.0; E_value=2.1e-86; Accession=PF01073.11; Description=3-beta hydroxysteroid dehydrogenaseisomerase family
  Pfam annotation: Domain name=Epimerase; Domain location=23-266; Score= 62.9; E_value=1.2e-15; Accession=PF01370.13; Description=NAD dependent epimerasedehydratase family
  Pfam annotation: Domain name=NAD_binding_4; Domain location=25-248; Score=33.3; E_value=1.4e-11; Accession=PF07993.4; Description=Male sterility protein
  Pfam annotation: Domain name=NmrA; Domain location=23-266; Score= -102.2; E_value=0.025; Accession=PF05368.5; Description=NmrA-like family
  Pfam annotation: Domain name=Polysacc_synt_2; Domain location=25-302; Score=-193.6; E_value=0.069; Accession=PF02719.7; Description =Polysaccharide biosynthesis protein
  Pfam annotation: Domain name=adh_short; Domain location=21-155; Score= -46.4; E_value=0.016; Accession=PF00106.17; Description=short chain dehydrogenase
  Pfam module annotation: Pfam domain module=3Beta_HSD::Epimerase::NAD _binding_4::NmrA::Polysacc_synt_2::adh_short; Domain location=24 -296::23-266::25-248::23-266::25-302::21-155
MGSLHDGGSNNGGRQEEARRRWCAVTGGRGFMARHLVAALLRSGEWHVRVTDLAADIVLGPGENEGLLGDALRDGRAVYASADVCNLDQLIEAFEGVDVVFHTAAADSSKNNLQLHYKVNTEGTKNVIDACMICKVKRLIHTSSIAVVFDGVHGLLNVNESLPYPDKFPDAYAQTKAEAEKLVMKANGINDLLTCCIRPASIFGPGDIVIPTLDRCGQTHFIIGDGKNRDDFVYVENVVHGHICADKTLSTMEGAQPSGGKAYFITNMEPMNMWDFLYMLHEELGYKRLFKIRIPLVVIKPVSYLVEWAYNVLLHHYGFCPPQVLTPTRIKYLTLHRTFSCNRAAEELGYKPIVTLMDGLKIAVKSYIRLRNTNSY

SEQ ID NO: 81546 - protein, 307 aa, Setaria italica
  Transcript Sequence Number=SeqID_15572
  Gene Ontology: Mol. function=histone-lysine N-methyltransferase activity; Cellular component=nucleus; Biological process=regulation of transcription, DNA-dependent
  Homolog annotation: Hit_ID=Q8L819; Match level="QueryCoverage=96%, HitCoverage=57%, E-value=1e-152, Identity=86%"; Hit description=SET domain-containing protein SET102
  Pfam annotation: Domain name=SET; Domain location=65-194; Score =187.3; E_value=4.2e-53; Accession=PF00856.20; Description=SET domain
MQILYFLTFWRHKRQKEEDIAVCECQYDILDPESPCGDRCLNFLTNTECTPGYCRCGVYCKNQRFQKCQYARTRLVKTEGRGWGLVADENIMAGQFVIEYCGEVISWKEAKRRSQAYETQGLKDAYIIYLNADESIDATRKGSLARFINHSCQPNCETRKWNVLGEVRVGIFAKQDIPFGTELLYDYNFEWFGGVMVRCLCGAGSCSGFLGAKSRGFQEATYLWEDDDDRFSVENIPLYDSADDEPTSINKEILLGNDGPIAPYVNSNTVQNTENRGTASTNEFAPTIAEQFTASSNELAPNWTSLV

SEQ ID NO: 81547 - protein, 98 aa, Setaria italica
  misc_feature (70)..(70): Xaa can be any naturally occurring amino acid
  Transcript Sequence Number=SeqID_15573
  Gene Ontology: Mol. function=nucleotide binding; Cellular component =intracellular; Biological process=small GTPase mediated signal transduction
  Homolog annotation: Hit_ID=B6TGE5; Match level="QueryCoverage=100%, HitCoverage=51%, E-value=6e-42, Identity=82%"; Hit description=ADP -ribosylation factor
  Pfam annotation: Domain name=Arf; Domain location=1-98; Score=58.6; E_ value=2.4e-14; Accession=PF00025.13; Description=ADP-ribosylation factor family
MGQAIRKLFDSFFSTREMRVVMLGLDAAGKTTILYRLHMGEVLSTVPTVGFNVEKVQYKNVVFTVWDVGXRKLRSLWKMYLSNSDALIYVVDSLDRER

SEQ ID NO: 81548 - protein, 190 aa, Setaria italica
  Transcript Sequence Number=SeqID_15574
  Gene Ontology: Mol. function=protein dimerization activity
  Homolog annotation: Hit_ID=B9SDY5; Match level="QueryCoverage=61%, HitCoverage=15%, E-value=6e-37, Identity=61%"; Hit description=DNA binding protein, putative
  Pfam annotation: Domain name=hATC; Domain location=28-118; Score =27.9; E_value=3.7e-05; Accession=PF05699.6; Description=hAT family dimerisation domain
SNGIFSGMLDCIERLVSDVKIQDKIQRELNMYRSETAGDFRRQMAIRSRRTLPPAEWWYTYGGACPNLTRLAVRILSQTCSARGCDRAHIPFEQVHDERLNSFERQRMHDLTFVQYNLRLQQRQQRKVKAFDPVSVDYVDIVDDWVVDTPALFSGPVEQPNWMEINQSVSRIAPREPNEDEFESFIEGVD

SEQ ID NO: 81549 - protein, 279 aa, Setaria italica
  Transcript Sequence Number=SeqID_15575
  Gene Ontology: Mol. function=protein dimerization activity
  Homolog annotation: Hit_ID=B9S4Y0; Match level="QueryCoverage=88%, HitCoverage=28%, E-value=2e-69, Identity=48%"; Hit description=DNA binding protein, putative
  Pfam annotation: Domain name=DUF659; Domain location=1-60; Score= -45.4; E_value=0.00016; Accession=PF04937.7; Description=Protein of unknown function (DUF 659)
QSKYNKTNSEIHAAAGKKLGETFPTLFWSPCSFQCIDGMLEDFSKVGAISEIISNAKAITGFFYNSAFALNLMKKYLHGKDLLVPAETRASMNFVTLKNMYGLKEALQAMVNSDEWIHFLLPKKGGIEVSNLVNSLQFWSSCAAVVHITEPLVHLLKLVGSTKRPAMGYIYAGLYQAKAAIKKELVSKNDYMAYWNIIDWRWDNQTPRPLHSAGFFLNPLFFDGIRGDVSNGIFSGMLDCIERLVSDVKIQDKIPCCLTPVHVELSLDRPRPKQQSRKS

SEQ ID NO: 81550 - protein, 101 aa, Setaria italica
  misc_feature (86)..(86): Xaa can be any naturally occurring amino acid
  Transcript Sequence Number=SeqID_15576
  Homolog annotation: Hit_ID=B6T3P8; Match level="QueryCoverage=100%, HitCoverage=36%, E-value=7e-38, Identity=79%"; Hit description=CUE domain containing protein
ELFVREMMSSSDIDDARARASRALEAFEKSIMDRVGPEAVQNLHRENVMLKEQLAIILRENAVLKRGVAIQHERQKEFDARTQEVXSLKQLVLQYQEQLKT

SEQ ID NO: 81551 - protein, 135 aa, Setaria italica
  Transcript Sequence Number=SeqID_15577
  Homolog annotation: Hit_ID=B6T3P8; Match level="QueryCoverage=97%, HitCoverage=48%, E-value=4e-33, Identity=61%"; Hit description=CUE domain containing protein
  Pfam annotation: Domain name=CUE; Domain location=45-87; Score=24.9; E_value=0.00033; Accession=PF02845.8; Description=CUE domain
  Subcellular localization annotation: CTP_CleavageSite=5; ConfidenceScore=5.00e-01
MSAVVCGKRSSSIFGDELIPSPSSPPSPPHHHHPSKRARCSPARRREALLHHLLPLFPDMDPQLLERALEASGDDLDSAIKSLTELRLESAEAILSATVGASENGLSAALKLSAEGTVSNGRVVTEHPPANDINK

SEQ ID NO: 81552 - protein, 163 aa, Setaria italica
  Transcript Sequence Number=SeqID_15578
  Homolog annotation: Hit_ID=B6T3P8; Match level="QueryCoverage=97%, HitCoverage=58%, E-value=1e-67, Identity=78%"; Hit description=CUE domain containing protein
VVSCTVSNGRVVTEHPPAIDINKTNNHSSEWVELFVREMMSSSDIDDARARASRALEAFEKSIMDRVGPEAVQNLHRENVMLKEQLAIILRENAVLKRGVAIQHERQKEFDARTQEVDSLKQLVLQYQEQLKTLEINNYALRVHLKQAQQNNSMPGRFPPDVF

SEQ ID NO: 81553 - protein, 78 aa, Setaria italica
  Transcript Sequence Number=SeqID_15579
FCNSIISHTFCMNWTEIISLPPLHLSLLPPPSSELWYLACSPCCRPSSMVSPVVLPPPSALLAIPLPFLPHRDPPEFL

SEQ ID NO: 81554 - protein, 79 aa, Setaria italica
  Transcript Sequence Number=SeqID_15580
VFYLVTSSMFSATASPRATTSANHALESESDSDSESLYEVEGGSCERGTKSMETKRIRRYDEIKLVMKLCKLVTNPEQQ

SEQ ID NO: 81555 - protein, 89 aa, Setaria italica
  Transcript Sequence Number=SeqID_15581
  Gene Ontology: Mol. function=protein dimerization activity; Cellular component=nucleus; Biological process=regulation of transcription, DNA-dependent
  Homolog annotation: Hit_ID=B6TPC6; Match level="QueryCoverage=68%, HitCoverage=21%, E-value=1e-23, Identity=86%"; Hit description=Light- inducible protein CPRF-2
CEFRVTIDVLPYNQVEQLKGENATLFKQLSEANQQFTTAVTDNRILKSDVEALRVKVKMAEDMVARSAMSCGFRCTFGSWLPIILVISK

SEQ ID NO: 81556 - protein, 60 aa, Setaria italica
  misc_feature (25)..(25): Xaa can be any naturally occurring amino acid
  Transcript Sequence Number=SeqID_15582
  Gene Ontology: Mol. function=peptidase activity
  Homolog annotation: Hit_ID=B6UH94; Match level="QueryCoverage=90%, HitCoverage=26%, E-value=5e-18, Identity=61%"; Hit description =Cysteine-type peptidase
MSMCEKDQNLPWGYDLFRDPFAPPXHPDETQLHSSQLTYDLYNPSVGIYHPGSADAHEHE

SEQ ID NO: 81557 - protein, 133 aa, Setaria italica
  Transcript Sequence Number=SeqID_15583
  Gene Ontology: Mol. function=peptidase activity
  Homolog annotation: Hit_ID=B6UH94; Match level="QueryCoverage=55%, HitCoverage=24%, E-value=4e-34, Identity=90%"; Hit description =Cysteine-type peptidase
IAICLFFSHYPRCYEGNELVVSGCAVSVFFFCVSDSISNCGPIICVCFVQHVPKINGEIPSVDEATMDHERLTERLKLYELIEHKVKGDGNCQFRALSDQLYQTPDHHEFVREQIINQLKTNRDAYERNSYPN

SEQ ID NO: 81558 - protein, 156 aa, Setaria italica
  misc_feature (76)..(76): Xaa can be any naturally occurring amino acid
  Transcript Sequence Number=SeqID_15584
  Gene Ontology: Mol. function=peptidase activity
  Homolog annotation: Hit_ID=B6UH94; Match level="QueryCoverage=82%, HitCoverage=40%, E-value=9e-59, Identity=87%"; Hit description =Cysteine-type peptidase
  Pfam annotation: Domain name=OTU; Domain location=28-147; Score=92.6; E_value=1.4e-24; Accession=PF02338.11; Description=OTU-like cysteine protease
LIGDSHYNLHASHSQFSYPIWKYTILISIDSNCTPPILQFRALSDQLYQTPDHHEFVREQIINQLKTNRDAYDGDXYVPMAYDDYLEKVARNGEWGDHVTLQAAADKYGVKIFVMTSFKDTCYIEIQPKVQKSNKVVLLSFWAEVHYNSIYPQNGE

SEQ ID NO: 81559 - protein, 128 aa, Setaria italica
  misc_feature (82)..(82): Xaa can be any naturally occurring amino acid
  Transcript Sequence Number=SeqID_15585
  Gene Ontology: Mol. function=peptidase activity
  Homolog annotation: Hit_ID=B6UH94; Match level="QueryCoverage=96%, HitCoverage=41%, E-value=2e-65, Identity=95%"; Hit description =Cysteine-type peptidase
  Pfam annotation: Domain name=OTU; Domain location=7-119; Score=133.8; E_value=5.4e-37; Accession=PF02338.11; Description=OTU-like cysteine protease
IRNNKVKGDGNCQFRALSDQLYQTPDHHEFVREQIINQLKTNRDAYDGYVPMAYDDYLEKVARNGEWGDHVTLQAAADKYGXKIFVMTSFKDTCYIEIQPKVQKSNKVVLLSFWAEVHYNSIYPQNGE

SEQ ID NO: 81560 - protein, 545 aa, Setaria italica
  misc_feature (207)..(207): Xaa can be any naturally occurring amino acid
  Transcript Sequence Number=SeqID_15586
  Gene Ontology: Mol. function=binding; Cellular component=chloroplast; Biological process=regulation of transcription, DNA-dependent
  Homolog annotation: Hit_ID=Q852B8; Match level="QueryCoverage=100%, HitCoverage=85%, E-value=0.0, Identity=56%"; Hit description =Pentatricopeptide, putative, expressed
  Pfam annotation: Domain name=PPR; Domain location=103-137; Score =28.4; E_value=2.9e-05; Accession=PF01535.12; Description=PPR repeat
  Pfam annotation: Domain name=PPR; Domain location=138-172; Score =17.5; E_value=0.056; Accession=PF01535.12; Description=PPR repeat
  Pfam annotation: Domain name=PPR; Domain location=173-207; Score =21.8; E_value=0.0029; Accession=PF01535.12; Description=PPR repeat
  Pfam annotation: Domain name=PPR; Domain location=209-243; Score =29.1; E_value=1.8e-05; Accession=PF01535.12; Description=PPR repeat
  Pfam annotation: Domain name=PPR; Domain location=244-278; Score=5.9; E_value=1.8; Accession=PF01535.12; Description=PPR repeat
  Pfam annotation: Domain name=PPR; Domain location=279-313; Score =21.9; E_value=0.0027; Accession=PF01535.12; Description=PPR repeat
  Pfam annotation: Domain name=PPR; Domain location=34-67; Score=24.2; E_value=0.00055; Accession=PF01535.12; Description=PPR repeat
  Pfam annotation: Domain name=PPR; Domain location=350-384; Score=5.6; E_value=1.9; Accession=PF01535.12; Description=PPR repeat
  Pfam annotation: Domain name=PPR; Domain location=68-102; Score=34.1; E_value=5.5e-07; Accession=PF01535.12; Description=PPR repeat
  Pfam annotation: Domain name=TPR_4; Domain location=1-23; Score=1.1; E_value=32; Accession=PF07721.6; Description=Tetratricopeptide repeat
  Pfam annotation: Domain name=TPR_4; Domain location=172-197; Score =7.1; E_value=6.1; Accession=PF07721.6; Description=Tetratricopeptide repeat
  Pfam annotation: Domain name=TPR_4; Domain location=33-58; Score=8.5; E_value=4.2; Accession=PF07721.6; Description=Tetratricopeptide repeat
  Pfam module annotation: Pfam domain module=PPR::PPR::PPR::PPR::PPR::PP R::PPR::PPR::PPR::TPR_4::TPR_4::TPR_4; Domain location=103-137::138 -172::173-207::209-243::244-278::279-313::34-67::350-384::68-102::1 -23::172-197::33-58
YLGLMEAHTHVGATAEAVAVLRQMQADGCAPTAATYRVLLDLYGRQGRFDGVRELFREMRTAVPPDTATYNVLFRVFGDGGFFKEVVELFHDMLQTGVEPDMVTCENVMAACGRGGLHEDAREVLEYMSREGMVPTADAYTGLVEALGHAAMYEEAYVAFNMMTEIGSLPTIETYNALANAYAKGGLFQEAEAIFSRMTNNAGIQKXKDSFDALIEAYCQGAQLDDAVKAYMEMRKSRFNPDERSLEGVLNAYCIAGVIDESKEQFEELQSSVAVPSIIAYCMMLSLYARNDRWTDAYDLLEEMKTNRASSTHQVIASLIKGEYDDSSNWQMVEYALENSTLEGCDYSIRFFNALLDVLWWFGQKARAARVLDQAVKFGLFPELYRDTKLVWSLDVHRMSVGGALVAVSVWLNKLYDRLKGDEDLPQLASVVVLRGEMEKSTITRGLPTAKVVYSFLNDTLSASFHFPKWNKGRIICLKSQLKKLQSAIDSSNGSATAGFIPMTNSHLPSPGSKIYTREAQADNGTGHLPDEPLVEEKESELLAL

SEQ ID NO: 81561 - protein, 155 aa, Setaria italica
  Transcript Sequence Number=SeqID_15587
  Gene Ontology: Mol. function=exonuclease activity; Cellular component= intracellular
  Homolog annotation: Hit_ID=Q2QWN8; Match level="QueryCoverage=84%, HitCoverage=21%, E-value=2e-61, Identity=85%"; Hit description =Exonuclease family protein, putative, expressed
  Subcellular localization annotation: CTP_CleavageSite=45; ConfidenceScore=5.43e-01
RQSPRTSAASPPAATMSTPSGNGGSSSAYFDVYGRNAKPDVVFKEAALNSTLNLQDVQGLVTWVIGDGMLPSWVFVKNKPLIPKVILLYVPGLDAALYMSQTRLLSSLKELCGNPKPVLAPSCIPDERHTIDALLTCRVKRKRDVKTSNQSAKPD

SEQ ID NO: 81562 - protein, 310 aa, Setaria italica
  Transcript Sequence Number=SeqID_15588
  Gene Ontology: Mol. function=zinc ion binding
LGSEVRRISIPRNPRREPVGVQALPVPPQNPGSSARLQPNILNCPPPIPLSTPASSTYQGHQVTNPDCAPMNNGCGPLPRTPSVAASSHLQSTRDMRNTSSHQPSRVVGLPAPHLMGARPSPGQAGGVNTYRPTPMQQTPTVDPLRHTRMTMNQTALAAVGQTTAAAHVKPTQADVQSRHFPMQQIQVPRLQTVPRAATPPSLQRAPPHLQPSSVPSAAPSIHPPSLQRAPPHLQPPSVPPTAPSTPQAGSSDGLPPELPVDENWCPTGQMRGSLTGNAYSSALRRYLGPNEQQQGQAHPPSASGARRPH

SEQ ID NO: 81563 - protein, 30 aa, Setaria italica
  Transcript Sequence Number=SeqID_15589
PSVVSMYQYIFLWDEDLEVDNFNPRRYSVT

SEQ ID NO: 81564 - protein, 81 aa, Setaria italica
  Transcript Sequence Number=SeqID_15590
PLHNSCVIICNQGRAAGLDMRTKIRRKSRSELRDFQKRWDRATREDRTWVDPFSRSRRKRRNRNPQLIGSLHSYTISHLDH

SEQ ID NO: 81565 - protein, 142 aa, Setaria italica
  Transcript Sequence Number=SeqID_15591
  Homolog annotation: Hit_ID=B4FAK0; Match level="QueryCoverage=90%, HitCoverage=29%, E-value=2e-35, Identity=54%"; Hit description =Lysine ketoglutarate reductase trans-splicing related 1
  Pfam annotation: Domain name=DUF707; Domain location=1-122; Score= -34.4; E_value=3.8e-12; Accession=PF05212.4; Description=Protein of unknown function (DUF707)
MAPVFSKSAWQCVWHLIQNDLIHGWGIDYKFGYCAQGDRTKNIGVVDSEFIVHRGVQTLGGSTTTKDGTRGKKAQQLRQKDAQVQKTRGRAAGLDMRTKIRRKSRSELRDFQKRWDRAAREDRTWVDPFARSRRKRRNRNPQ

SEQ ID NO: 81566 - protein, 281 aa, Setaria italica
  Transcript Sequence Number=SeqID_15592
  Homolog annotation: Hit_ID=Q8H767; Match level="QueryCoverage=82%, HitCoverage=65%, E-value=7e-79, Identity=59%"; Hit description =Lysine ketoglutarate reductase trans-splicing related 1
  Pfam annotation: Domain name=DUF707; Domain location=52-280; Score =422.5; E_value=6.9e-124; Accession=PF05212.4; Description=Protein of unknown function (DUF707)
MKLRLHLLVLCVIIVFLVYNMANFQHKQTSLEAKSRPFDTVTVFDRAAVKVSQKAVARIGYLPHGIVESNSDMELKPLWLTTSAESQFQQKSKQNDQFLIAIAAGINQKKTVDAIIKKFLPENFTAMLFHYDGNVNGWNDLPWSKSVIHIAASNQTKWWFAKRFLHPSVVSMYQYIFLWDEDLEVDNFNPRRYLNIVKSEGLEISQPGLDSKLSEIHHRITVRKRTGSFHRRVSRANKECSREGPPCSGWVEGMAPVFSKSAWQCVWHLIQNDLIHRWGLN

SEQ ID NO: 81567 - protein, 285 aa, Setaria italica
  misc_feature (21)..(21): Xaa can be any naturally occurring amino acid
  Transcript Sequence Number=SeqID_15593
  Gene Ontology: Mol. function=ammonia ligase activity; Cellular component=cytoplasm; Biological process=phenylpropanoid metabolic process
  Homolog annotation: Hit_ID=A3AVL7; Match level="QueryCoverage=98%, HitCoverage=39%, E-value=1e-133, Identity=82%"; Hit description =Phenylalanine ammonia-lyase
  Pfam annotation: Domain name=PAL; Domain location=1-122; Score= -284.9; E_value=0.024; Accession=PF00221.11; Description =Phenylalanine and histidine ammonia-lyase
STSTNNGLPSNLAGSRNLSLXFGLKGVEIAMASYCSELQYLANPVTNHVQSAEQHTQDVNSLGLISARKTAEAVEILKLMSSTFMIALCQAVDLRHLEENLKSAVKNCVKTVALKVLTTSPDGEHCSARFSEKTLLAAIDRKAVYSYCDDPCSASSSLMMTIRAVLVDHALANGEAENEARAPIFSKITKFEEELREALPREMEKTRVAFETGTAPIGNRIKESRSYPLYRFIREDLGAVYLTGEKLKSAGEECNKVFLALSEGKLIDPMLGCLKEWNGEPLPIC

SEQ ID NO: 81568 - protein, 62 aa, Setaria italica
  Transcript Sequence Number=SeqID_15594
  Gene Ontology: Mol. function=catalytic activity; Cellular component =plasma membrane; Biological process=metabolic process
  Homolog annotation: Hit_ID=Q5ZA27; Match level="QueryCoverage=98%, HitCoverage=22%, E-value=3e-29, Identity=96%"; Hit description =Neutral invertase-like protein
CPSKICYPAMEDDEWRIITGSDPKNTPWSYHNGGSWPTLLWQFTLACIKMGRPELARKAIAV

SEQ ID NO: 81569 - protein, 106 aa, Setaria italica
  Transcript Sequence Number=SeqID_15595
  Gene Ontology: Mol. function=hydrolase activity, acting on glycosyl bonds; Biological process=metabolic process
  Homolog annotation: Hit_ID=Q5ZA27; Match level="QueryCoverage=100%, HitCoverage=38%, E-value=8e-52, Identity=90%"; Hit description =Neutral invertase-like protein
  Pfam annotation: Domain name=Invertase_neut; Domain location=1-106; Score=-243.7; E_value=0.00017; Accession=PF04853.4; Description =Plant neutral invertase
AHMDFRFFSLGNLWAIASSLTTPKQAEGILSLIEEKWDDLVANMPLKICYPAMEDDEWRIITGSDPKNTPWSYHNGGSWPTLLWQVRLAHCNVGRPELARKAIAVA

SEQ ID NO: 81570 - protein, 102 aa, Setaria italica
  Transcript Sequence Number=SeqID_15596
  Gene Ontology: Mol. function=catalytic activity; Biological process =metabolic process
  Homolog annotation: Hit_ID=B6VCS4; Match level="QueryCoverage=71%, HitCoverage=21%, E-value=4e-33, Identity=91%"; Hit description =Putative beta-fructofuranosidase (Fragment)
AAYKTLLSNYCYHASSFCYFNPIYLLAGLWWIILLRAYCKITGDNDLLERVDVQTGIQLILSLCLSDGFDMFPTLLVTDGSCMIDRRMGIHGHPLEIQVSRT

SEQ ID NO: 81571 - protein, 625 aa, Setaria italica
  Transcript Sequence Number=SeqID_15597
  Gene Ontology: Mol. function=catalytic activity; Cellular component =plasma membrane; Biological process=metabolic process
  Homolog annotation: Hit_ID=A7LH71; Match level="QueryCoverage=76%, HitCoverage=71%, E-value=0.0, Identity=84%"; Hit description=Neutral invertase
  Pfam annotation: Domain name=GDE_C; Domain location=187-578; Score= -201.4; E_value=0.00023; Accession=PF06202.6; Description=Amylo-alpha- 1,6-glucosidase
  Pfam annotation: Domain name=Invertase_neut; Domain location=133-605; Score=1281.2; E_value=0; Accession=PF04853.4; Description=Plant neutral invertase
  Pfam module annotation: Pfam domain module=GDE_C::Invertase_neut; Domain location=187-578::133-605
  Subcellular localization annotation: CTP_CleavageSite=64; ConfidenceScore=5.69e-01
MNGQTPMGLAAAAAAAVRPCSRRLLSSASTATSKTAAGTATPLFPRLPHPHHPPCGRRLPFLVSAASQSQASQTGPDAPPTHIPSDPRAAVSGNLPFFDRVLFPDSFPLETPAAKEDEDAAAAHADEAVAPAPPVREETETEREAWRLLRRAVVSYCGEPVGTVAAEDPECTETLNYDQVFIRDFVPSALAFLMRGETEIVRNFLLHTLQLQSWEKTVDCYSPGQGLMPASFKIRTVPLDENNEGFEEVLDPDFGEAAIGRVAPVDSGLWWIILLRAYCKITGDNDLLERVDVQTGIQLILSLCLSDGFDMFPTLLVTDGSCMIDRRMGIHGHPLEIQALFYSALRCSREMLVVNDGSKNLIRAVNNRLSALSFHIREYYWVDMKKINEIYRYKTEEYSHDATNKFNIYPEQIPSWLVDWIPEKGGYLIGNLQPAHMDFRFFSLGNLWAIASSLTTPKQAEGILSLIEEKWDDLVANMPLKICYPAMEDDEWRIITGSDPKNTPWSYHNGGSWPTLLWQFTLACIKMGRPELARKAIAVAEDRLSDDKWPEYYDTRSGRFIGKQSRSYQTWTIAGFLTSKMLLENPELASILTCDEDLELLEGCACCLSKKRARCSRRVAKSHAG

SEQ ID NO: 81572 - protein, 163 aa, Setaria italica
  Transcript Sequence Number=SeqID_15598
MSFLSGRIAAAKEGAFFLHESQAAVGRLAEKLPKSATAPGEASAPPSPDVLPEILRHSVPIKGTPPPAEPSLSASSRWALPPGSTEAAGVHPDALNPLRSYVSLPQATFGPKRWQLPNEQPNYLASTANERRRDRSPPPMDPEKLKAVIAGYSQIREKTIYLD

SEQ ID NO: 81573 - protein, 213 aa, Setaria italica
  Transcript Sequence Number=SeqID_15599
  Gene Ontology: Mol. function=protein serine/threonine kinase activity; Cellular component=plasma membrane; Biological process =protein amino acid phosphorylation
  Homolog annotation: Hit_ID=B9SBN3; Match level="QueryCoverage=95%, HitCoverage=52%, E-value=2e-94, Identity=82%"; Hit description =Protein kinase APK1B, chloroplast, putative
  Pfam annotation: Domain name=Pkinase; Domain location=3-195; Score= -16.6; E_value=1.7e-07; Accession=PF00069.17; Description=Protein kinase domain
  Pfam annotation: Domain name=Pkinase_Tyr; Domain location=1-195; Score=-88.9; E_value=8.1e-08; Accession=PF07714.9; Description =Protein tyrosine kinase
  Pfam module annotation: Pfam domain module=Pkinase::Pkinase_Tyr; Domain location=3-195::1-195
MPLGCVESHLFSRVMVPLQWSIRMKIALGAAKGLAFLHEAEKPVIYRDFKTSNILLDEEYNAKLSDFGLAKDGPVGDKSHVSTRIMGTYGYAAPEYIMTGHLTAMSDVYSYGVVLLELLTGRKSLDKSRPVREQTLADWAFPLLTQKKKVLGIVDPRLAEDYPVKAVQKTAMLAYHCLNRNPKARPLMRDIVATLEPLQQLEENPSDSLAGAT

SEQ ID NO: 81574 - protein, 92 aa, Setaria italica
  misc_feature (28)..(28): Xaa can be any naturally occurring amino acid
  misc_feature (45)..(45): Xaa can be any naturally occurring amino acid
  Transcript Sequence Number=SeqID_15600
  Gene Ontology: Mol. function=7-dehydrocholesterol reductase activity; Cellular component=membrane
  Homolog annotation: Hit_ID=Q6S5A3; Match level="QueryCoverage=72%, HitCoverage=15%, E-value=2e-17, Identity=64%"; Hit description =Sterol delta-7 reductase
FCCHIHNYDCDRQRQEFRRTNGKCSVWXKAPSKIVASYQTTKGEXKTSLLLTSGWWGLSRHFHYVPEYYFSCLFFLGTCFLVLSFFFSFLFF

SEQ ID NO: 81575 - protein, 92 aa, Setaria italica
  Transcript Sequence Number=SeqID_15601
  Gene Ontology: Mol. function=7-dehydrocholesterol reductase activity; Cellular component=membrane
  Homolog annotation: Hit_ID=Q6S5A3; Match level="QueryCoverage=100%, HitCoverage=21%, E-value=2e-37, Identity=79%"; Hit description =Sterol delta-7 reductase
ITYLGLWWFGIFNPAIVYDHLGEIYSALVFGSFVFCIFLYIKGHVAPSSSDSGSSGNVIIDFYWGMELYPRIGKYFDIKVFTNCRFGMMSWG

SEQ ID NO: 81576 - protein, 456 aa, Setaria italica
  Transcript Sequence Number=SeqID_15602
  Gene Ontology: Mol. function=7-dehydrocholesterol reductase activity; Cellular component=membrane; Biological process=cholesterol biosynthetic process
  Homolog annotation: Hit_ID=Q6S5A3; Match level="QueryCoverage=94%, HitCoverage=98%, E-value=0.0, Identity=80%"; Hit description=Sterol delta-7 reductase
  Pfam annotation: Domain name=ERG4_ERG24; Domain location=26-456; Score=152.0; E_value=1.9e-42; Accession=PF01222.9; Description =Ergosterol biosynthesis ERG4ERG24 family
  Subcellular localization annotation: CTP_CleavageSite=17; ConfidenceScore=5.45e-01
MAKAKPSSSASAAKQAAAAAAPVPPATVHSALVTYSSMLALLSLCPPFVILLWYTMVHADGSVVKTYEHLREHGVVEGLKAIWPMPTVVAWKIIFGFGLFEAVLQLLLPGKRFEGPISPAGNVPIYKANGLQAYAVTLITYLGLWWFGIFNPAIVYDHLGEIYSALVFGSFVFCIFLYIKGHVAPSSSDSGSSGNVIIDFYWGMELYPRIGKYFDIKVFTNCRFGMMSWAVLAVTYCIKQYEMNGRVADSMLVNTALMLIYITKFFWWESGYWCTMDIAHDRAGFYICWGCLVWVPSIYTSPGMYLVNHPVNLGPQLALSILLAGILCIYINYDCDRQRQEFRRTNGKCSVWGKAPSKIVASYQTTKGENKTSLLLTSGWWGLSRHFHYVPEILSAFFWTVPALFSHFLPYFYVIFLTILLFDRAKRDDDRCSSKYGKYWKMYCNKVPYRVIPGMY

SEQ ID NO: 81577 - protein, 200 aa, Setaria italica
  misc_feature (12)..(12): Xaa can be any naturally occurring amino acid
  misc_feature (145)..(145): Xaa can be any naturally occurring amino acid
  misc_feature (183)..(183): Xaa can be any naturally occurring amino acid
  Transcript Sequence Number=SeqID_15603
  Gene Ontology: Mol. function=transferase activity, transferring glycosyl groups; Cellular component=membrane
  Homolog annotation: Hit_ID=B9RW58; Match level="QueryCoverage=99%, HitCoverage=44%, E-value=5e-80, Identity=71%"; Hit description =Acetylglucosaminyltransferase, putative
  Pfam annotation: Domain name=Branch; Domain location=1-113; Score =11.3; E_value=1.1e-08; Accession=PF02485.13; Description=Core-2I -Branching enzyme
ILHVFSSLPRNXNFIEHFQLSGWKVNIRAKPIVLDPGLYLSKNLDLTTTTERRELPTSFKLYTGSAWIMLTKSFLEYCIWGWDNLPRNLLMYYVNFISSPEGYFQTVICNSADFRGTAVSHDLHYIAWDYPPKQHPLILSMKDFXNKMVKSGAPFARKFPKDDKVLDKIDRELLHRSEGRFTXPGAWCDGSSDGGADPCL

SEQ ID NO: 81578 - protein, 51 aa, Setaria italica
  Transcript Sequence Number=SeqID_15604
SHSNQLLHPSQIISRFGFSRYIAFAMHLDIRYYVSKKRQNDFLLELREYQA

SEQ ID NO: 81579 - protein, 223 aa, Setaria italica
  misc_feature (10)..(10): Xaa can be any naturally occurring amino acid
  Transcript Sequence Number=SeqID_15605
  Gene Ontology: Mol. function=transcription factor activity; Cellular component=transcription factor complex; Biological process =regulation of transcription, DNA-dependent
  Homolog annotation: Hit_ID=B9IFR2; Match level="QueryCoverage=100%, HitCoverage=61%, E-value=3e-90, Identity=72%"; Hit description =Transcription factor DP, E2 dimerization partner protein
  Pfam annotation: Domain name=DP; Domain location=59-222; Score=256.5; E_value=6.4e-74; Accession=PF08781.2; Description=Transcription factor DP
  Pfam annotation: Domain name=E2F_TDP; Domain location=1-52; Score =35.9; E_value=1.6e-07; Accession=PF02319.12; Description =Transcription factor E2Fdimerisation partner (TDP)
  Pfam module annotation: Pfam domain module=DP::E2F_TDP; Domain location=59-222::1-52
PNNNIEAPDXPENPNAQQYDEKNIRRRVYDALNVLMAMDIISKDKKEIQWKGLPRTSISDIEDLKMELVGLKGRIEKKSAYLQELQDQYVGLQNLIQRNEQLYGSGNTPSGGVALPFILVQTRPHATVEVEISEDMQLVHFDFNSTPFELHDDSYVLKELRFCGREQHDSAQEMISNGGEGSSMSNIYWQQVQHPGRPNNGTVGLPSSPPIPGILKGRVKHEH

SEQ ID NO: 81580 - protein, 178 aa, Setaria italica
  misc_feature (97)..(97): Xaa can be any naturally occurring amino acid
  misc_feature (108)..(108): Xaa can be any naturally occurring amino acid
  misc_feature (150)..(150): Xaa can be any naturally occurring amino acid
  misc_feature (162)..(162): Xaa can be any naturally occurring amino acid
  Transcript Sequence Number=SeqID_15606
  Gene Ontology: Mol. function=protein serine/threonine kinase activity; Cellular component=integral to membrane; Biological process=protein amino acid phosphorylation
  Homolog annotation: Hit_ID=Q654Z6; Match level="QueryCoverage=88%, HitCoverage=22%, E-value=2e-32, Identity=49%"; Hit description =Receptor protein kinase-like
VSRVQRVVPSVVASCSNPQTRIPRRDAELNEIISQGATTVPCKVGEAMLGGIVELQEEKVMDTDELVKLCTRTEVSCPGFKKFDFFEIVDGTDNFSXEKNCWKGGFGXVYKVQLTSGVMVAIKRLDENATVFDFNSELQLASLQHTNLVXLLGWCVHGKERXLVYEFMHNGSLAVSFR

SEQ ID NO: 81581 - protein, 276 aa, Setaria italica
  Transcript Sequence Number=SeqID_15607
  Gene Ontology: Mol. function=transferase activity, transferring glycosyl groups; Biological process=metabolic process
  Homolog annotation: Hit_ID=B6TIY9; Match level="QueryCoverage=99%, HitCoverage=64%, E-value=1e-102, Identity=67%"; Hit description =Cytokinin-N-glucosyltransferase 1
  Pfam annotation: Domain name=UDPGT; Domain location=1-276; Score= -173.2; E_value=0.039; Accession=PF00201.10; Description=UDP -glucoronosyl and UDP-glucosyl transferase
PSASSAAAHGQLREVLSRVVTAVTTSSGLILDTFDALEADELAALRRDLAVPVFDVGPLHKLSPAASSSLLRQDRGCLDWLDGQPPASVLYVSFGSLASVSASDLVETAWGIANSGRPFLWVLRPGLVRGAPPSSISLPDGFDAATRGRGVVVSWAPQEEVLAHPAVGGFWTHCGWNSTLEGVCAGVPMLCRPFFADQMGNARYVDHVWRTGVTIDGELQRGKVEAAISTLMGAGEPGAGMRRRALELKNSAAASIGEAGSSSVNVDMLVSLIQSM

SEQ ID NO: 81582 - protein, 136 aa, Setaria italica
  Transcript Sequence Number=SeqID_15608
  Gene Ontology: Cellular component=chloroplast
  Pfam annotation: Domain name=DUF1279; Domain location=40-123; Score =132.1; E_value=1.7e-36; Accession=PF06916.5; Description=Protein of unknown function (DUF1279)
ERKTAEEITEKYGLEFGLWKVFSSKEEGEEGGEGKKSRTDQAKELLAKYGGAYLATSISLSLVSFTLCYLLISAGVDVQDLLAKVGIATGETGGKVGTFALAYAAHKAASPIRFPPTVALTPVVASWIGKIRKGGD

SEQ ID NO: 81583 - protein, 71 aa, Setaria italica
  Transcript Sequence Number=SeqID_15609
RFHGDLKIPSQLVHENPAMHTSTKKQGRSEAQMNRPAGEPLSPYQMQEAPIWTNPGGRDHHTNNSQAKTNG

SEQ ID NO: 81584 - protein, 161 aa, Setaria italica
  Transcript Sequence Number=SeqID_15610
  Homolog annotation: Hit_ID=Q9LWW0; Match level="QueryCoverage=98%, HitCoverage=31%, E-value=4e-77, Identity=83%"; Hit description =Pentatricopeptide (PPR) repeat-containing protein-like
  Pfam annotation: Domain name=PPR; Domain location=128-161; Score =23.8; E_value=0.0007; Accession=PF01535.12; Description=PPR repeat
  Pfam annotation: Domain name=PPR; Domain location=25-59; Score=34.6; E_value=4e-07; Accession=PF01535.12; Description=PPR repeat
  Pfam module annotation: Pfam domain module=PPR::PPR; Domain location =128-161::25-59
PAYTRSRLIDAAEKLFEEMPEKNVVSWTAMVSGYAQNGRHERAVDTFLEMWEKEGVRPNELTVSSVLPACAAVGAMELGRKVERYARGKGLLKNLYVANALVEMYAKCGSIRRAWKVFQGIGQRRDLCSWNSMIMAFAVHGLWREALVLFHKLRMAGVEPV

SEQ ID NO: 81585 - protein, 80 aa, Setaria italica
  Transcript Sequence Number=SeqID_15611
TACEWNRICNRLFKKQSVSNQLTPAHLLSYSPLNSPETQPIHRLSTDAAISASKHVKQAQSYRHTTNIIPFNISRQHHRD

SEQ ID NO: 81586 - protein, 117 aa, Setaria italica
  Transcript Sequence Number=SeqID_15612
  Gene Ontology: Mol. function=catalytic activity; Cellular component =nucleus; Biological process=response to DNA damage stimulus
  Homolog annotation: Hit_ID=B9S9Q1; Match level="QueryCoverage=94%, HitCoverage=25%, E-value=2e-38, Identity=62%"; Hit description=DNA cross-link repair protein pso2/snm1, putative
PDRPLSLRVTAIPALHCPGSLMYLFRGDLGCMLYTGDFRWELGCGKARRAKQALLDALGGDTVDLLYLDNTYCHPSLNFPPRPVVAEQMVNIIRAHPNHEVIIGVDTLGKEDLLLHI

SEQ ID NO: 81587 - protein, 39 aa, Setaria italica
  Transcript Sequence Number=SeqID_15613
  Homolog annotation: Hit_ID=B4FXC7; Match level="QueryCoverage=100%, HitCoverage=22%, E-value=3e-11, Identity=89%"; Hit description=DNA -directed RNA polymerase II 19 kDa polypeptide
MVFLESEMSWNVLISPSQLDRKGLLLRKAIIVHLLGDVN

SEQ ID NO: 81588 - protein, 124 aa, Setaria italica
  Transcript Sequence Number=SeqID_15614
ITGPNGTGISIKLKALMSQDNWPCLGTTDQTIDYKVNSNTSDPHIHPPSNKQCTSEPHLACGSSSQWPKKVTSDRSKELKLAVSFHPAESHDLETHGSVLLQLRLVVHEHRLRHATEDRQGTQG

SEQ ID NO: 81589 - protein, 175 aa, Setaria italica
  Transcript Sequence Number=SeqID_15615
  Gene Ontology: Mol. function=DNA-directed RNA polymerase activity; Cellular component=nucleus; Biological process=transcription
  Homolog annotation: Hit_ID=B4FXC7; Match level="QueryCoverage=100%, HitCoverage=100%, E-value=4e-94, Identity=93%"; Hit description=DNA -directed RNA polymerase II 19 kDa polypeptide
  Pfam annotation: Domain name=RNA_pol_Rpb7_N; Domain location=9-82; Score=54.6; E_value=3.9e-13; Accession=PF03876.9; Description=RNA polymerase Rpb7, N-terminal domain
MVFLEVEMSWNVLISPSQLDRKGLLLRKAIIVRLLEDVTNKRASKEHGYYVAVNQLKAISEGKVRELTGDVLFPVTFTCITQKPLKGEILVGYVDRILKHGVFLKSGPVESIFMAEKSMSDYKYIGGENPMFMNDHSKLEKDTAVRFKVMGFRWMEADRQFQLLATIAGDFLGPL

SEQ ID NO: 81590 - protein, 52 aa, Setaria italica
  Transcript Sequence Number=SeqID_15616
IFLDVHLCSYLYYGTFASRVEILKAKNGPFSRCVLRGFSGMLACIISFVLVH

SEQ ID NO: 81591 - protein, 224 aa, Setaria italica
  misc_feature (135)..(135): Xaa can be any naturally occurring amino acid
  misc_feature (160)..(160): Xaa can be any naturally occurring amino acid
  Transcript Sequence Number=SeqID_15617
  Gene Ontology: Mol. function=hydrolase activity
  Homolog annotation: Hit_ID=Q2RB41; Match level="QueryCoverage=96%, HitCoverage=51%, E-value=4e-80, Identity=62%"; Hit description =GDA1/CD39 family protein
  Pfam annotation: Domain name=GDA1_CD39; Domain location=1-224; Score=- 165.9; E_value=0.0016; Accession=PF01150.9; Description=GDA1CD39 (nucleoside phosphatase) family
QCCCNAPAVPDGKDPYITKEYLKGKDYNLYVHSYLYYGTFASRVEILKAKNGPFSRCVLRGFSGNYTYNGKEYDATASPEGAVYDKCREEIIKALNLEFENQRYLEIVASFFFDKGKPKYGFIESEAPSAKSTPXAFKVAAEKVCSLSVKEVKAAYPKCXDLPYACMDLLYQYTLLVDGFGLDPTKEITLINRVKYGEYYIEAAWPLGTAIEAVAPKKMTLQDA

SEQ ID NO: 81592 - protein, 116 aa, Setaria italica
  Transcript Sequence Number=SeqID_15618
  Gene Ontology: Mol. function=hydrolase activity; Cellular component =nucleus; Biological process=mRNA transport
  Homolog annotation: Hit_ID=B9U140; Match level="QueryCoverage=84%, HitCoverage=21%, E-value=5e-40, Identity=74%"; Hit description =Apyrase
GSLLSYFLTKLSCLANAPAVPDGKDPYITKDYLKGKDYNLYVHSYLYYGTFASRVEILKAKNGPFSRCVLRGFSGNYTYNGKEYDATASPEGAVYDKCREEIIKALNLSAPCCKLK

SEQ ID NO: 81593 - protein, 460 aa, Setaria italica
  misc_feature (322)..(322): Xaa can be any naturally occurring amino acid
  Transcript Sequence Number=SeqID_15619
  Gene Ontology: Mol. function=hydrolase activity; Cellular component =integral to membrane; Biological process=mRNA transport
  Homolog annotation: Hit_ID=Q2RB41; Match level="QueryCoverage=86%, HitCoverage=87%, E-value=1e-169, Identity=71%"; Hit description =GDA1/CD39 family protein
  Pfam annotation: Domain name=GDA1_CD39; Domain location=45-460; Score= 463.9; E_value=2.4e-136; Accession=PF01150.9; Description=GDA1CD39 (nucleoside phosphatase) family
  Subcellular localization annotation: CTP_CleavageSite=40; ConfidenceScore=5.25e-01
MARLAGLAALLLLLHLASAASASSNVLLGRKGSSVAAGQSAAAEEEEKAAASRFAVIFDAGSTGSRVHVFKFDSKLDLVPIGDDIEFFAKIKPGLSSYAGRPQEAASSILPLLEQAKKIVPTSLQKYTPLKLGATAGLRLIGDKKAEEILEAVQDLVHTKSKFQYNPKWITVLEGTQEGSYLWVALNYLLGKLGGDYSKTVGVIDLGGGSVQMAYAISTNAAANAPAVPDGKDPYITKEYLKGKDYNLYVHSYLYYGTFASRVEILKAKNGPFSRCVLRGFSGNYTYNGKEYDATASPEGAVYDKCREEIIKALNLSAPCEXTKNCSFNGVWNGGGGAGQDNLYVASFFFDKATQYGFIESEAPSAKSTPAAFKVAAEKVCSLSVKEVKAAYPNAFDLPYACMDLLYQYTLLVDGFGLDPTKEITLINRVKYGEYYIEAAWPLGTAIEAVAPKKMTLQDA

SEQ ID NO: 81594 - protein, 367 aa, Setaria italica
  misc_feature (22)..(22): Xaa can be any naturally occurring amino acid
  Transcript Sequence Number=SeqID_15620
  Gene Ontology: Mol. function=transporter activity; Cellular component= mitochondrial inner membrane; Biological process=transport
  Homolog annotation: Hit_ID=B6TZ69; Match level="QueryCoverage=98%, HitCoverage=96%, E-value=1e-173, Identity=82%"; Hit description =Protein brittle-1
  Pfam annotation: Domain name=Mito_carr; Domain location=175-263; Score=86.4; E_value=1e-22; Accession=PF00153.19; Description =Mitochondrial carrier protein
  Pfam annotation: Domain name=Mito_carr; Domain location=269-360; Score=83.7; E_value=6.5e-22; Accession=PF00153.19; Description =Mitochondrial carrier protein
  Pfam annotation: Domain name=Mito_carr; Domain location=65-151; Score= 78.3; E_value=2.8e-20; Accession=PF00153.19; Description =Mitochondrial carrier protein
  Pfam module annotation: Pfam domain module=Mito_carr::Mito_carr::Mito_ carr; Domain location=175-263::269-360::65-151
GKLSLASVGFAGPGAGSGGGGXYKELLVMALPKDDGLDGAKVAEVIGVGMPDVAGAVRNILGRREFREFASGALAGAMSKAILAPLETIRTRMVVGVGSRHIFGSFVEIIGQNGWQGLWAGNTINMLRIIPTQAVELGTFECVKRSMAEAQEKWKEDGYPKIQLGNLKIELPLHFLSPVALGGAAAGIVGTLACHPLEVIKDRLTINREVYPTISLAFSRIYRTEGIGGLYSGLFPTLIGMLPYSTCYYFMYDTMKTSYCRLHKKSSLSRPELLLIGALSGLTASTISFPLEVARKRLMVGALQGKCPPNMIAALSEVIQEEGLLGVYRGWGASCLKVMPNSGITWMFYEAWKDILLADKDKSKQRV

SEQ ID NO: 81595 - protein, 508 aa, Setaria italica
  Transcript Sequence Number=SeqID_15621
  Gene Ontology: Mol. function=metal ion binding
  Homolog annotation: Hit_ID=Q10R93; Match level="QueryCoverage=95%, HitCoverage=90%, E-value=1e-177, Identity=65%"; Hit description =ReMembR-H2 protein JR702, putative, expressed
  Pfam annotation: Domain name=PA; Domain location=44-143; Score=54.9; E_value=3.1e-13; Accession=PF02225.14; Description=PA domain
  Pfam annotation: Domain name=PHD; Domain location=230-275; Score= -1.6; E_value=0.04; Accession=PF00628.21; Description=PHD-finger
  Pfam annotation: Domain name=zf-C3HC4; Domain location=231-272; Score= 38.5; E_value=2.7e-08; Accession=PF00097.17; Description=Zinc finger, C3HC4 type (RING finger)
  Pfam module annotation: Pfam domain module=PA::PHD::zf-C3HC4; Domain location=44-143::230-275::231-272
MKSRFLFLCVMVCLMAQLGAANVVLMGNNLTLSFDDIEASFAPGVKASGVNGIVYAAEPLNACSPLTINAVEGLPSPFALVIRGGCAFDEKVKNVQDAGFKAAIVYDNENSGVLVSMAGSSSGIHIYAVFVSKASGEVLKKFSGHTDVEVWILPTFENSAWVIMAISFISLLAMSAVLATCFFVRRHRIRRDHPRNLEAREFHGMSSQLVKAMPSLIFTKVQEDNCTSSMCAICLEDYSFGEKLRVLPCRHKFHAACVDLWLTSWRTFCPVCKQDASSGVSELAATEATPLLSSAVRLPSQSSSSRLSVAASPPRPISRRPSSHSVSRAYSVSSTPQSPNPFRSYTNSPGISTSRSNADLANMSSPHPRISHLSSTHSLVGSHLSPPISIRYSSPHVSQFGHGSPSVHVGSSYMSNSLYGSSSYYYLGASSQHGSYLRRCGESGPSLSTMVPQSPQQSQLGHGGESSEANVTAGASSAQSLQQSYLRHCGDSDASLSDMMSAQSLPGC

SEQ ID NO: 81596 - protein, 72 aa, Setaria italica
  Transcript Sequence Number=SeqID_15622
VFGITESRLLLGNKRPCIIPNTESRLLLGNKQLIIHRYFLSRSCLPCTKRNLKDCKLMPSGICIQYYCWKPT

SEQ ID NO: 81597 - protein, 165 aa, Setaria italica
  Transcript Sequence Number=SeqID_15623
  Gene Ontology: Mol. function=sugar binding
  Homolog annotation: Hit_ID=B6TGG4; Match level="QueryCoverage=84%, HitCoverage=91%, E-value=6e-56, Identity=78%"; Hit description =Dirigent
  Pfam annotation: Domain name=Dirigent; Domain location=1-141; Score= -11.3; E_value=4.1e-05; Accession=PF03018.6; Description=Dirigent -like protein
MASYTIDSVQSELKMTLYIKEVYDGPDTNGVTIISRAKMGTTWVFSWLVTDGPGPDANIVGHMQGTSVQVANTPDVYQYSLGLVFGDKRFNGSTLQISGTSQINGEWSIVGGTGELAMAKGTIKRTEIRYIGNTRISELKIHAFYTPMNSTTVSSNNTGCKFQKA

SEQ ID NO: 81598 - protein, 75 aa, Setaria italica
  misc_feature (52)..(52): Xaa can be any naturally occurring amino acid
  Transcript Sequence Number=SeqID_15624
  Gene Ontology: Mol. function=aspartic-type endopeptidase activity; Biological process=DNA integration
  Homolog annotation: Hit_ID=Q7XGB8; Match level="QueryCoverage=84%, HitCoverage=4%, E-value=1e-16, Identity=66%"; Hit description =Retrotransposon protein, putative, Ty3-gypsy subclass
NLTTYVRDRVAIGDVRVLHVPTTSQFADIFTKGLPSPAFTEFRSSLNITCGXVASVGGLCVCLSFHVQSATPLRR

SEQ ID NO: 81599 - protein, 74 aa, Setaria italica
  misc_feature (51)..(51): Xaa can be any naturally occurring amino acid
  Transcript Sequence Number=SeqID_15625
  Gene Ontology: Mol. function=aspartic-type endopeptidase activity; Biological process=DNA integration
  Homolog annotation: Hit_ID=Q7XGB8; Match level="QueryCoverage=89%, HitCoverage=5%, E-value=5e-18, Identity=68%"; Hit description =Retrotransposon protein, putative, Ty3-gypsy subclass
DLHFVRDRVAIGDVRVLHVPTTSQFADIFTKGLSSPAFTEFRSSLNITCGXVASWGGLCVCLSFHVQSATPLRR

SEQ ID NO: 81600 - protein, 121 aa, Setaria italica
  misc_feature (33)..(33): Xaa can be any naturally occurring amino acid
  misc_feature (60)..(60): Xaa can be any naturally occurring amino acid
  misc_feature (71)..(71): Xaa can be any naturally occurring amino acid
  misc_feature (95)..(95): Xaa can be any naturally occurring amino acid
  Transcript Sequence Number=SeqID_15626
  Subcellular localization annotation: CTP_CleavageSite=4; ConfidenceScore=5.35e-01
PPCRLAGVVPNVGKARPPPPPLPPPTYLHPPLXSGPPSSPPPFAPPPPPPCPSPVAPAAXPQPPSRPLAQXSSPVLAPPPPPPNQGSTAASPPPXPPPSRPPPPPTSDHPGAPSTSRGRGN

SEQ ID NO: 81601 - protein, 376 aa, Setaria italica
  Transcript Sequence Number=SeqID_15627
MATTTDAAAVAPVEEENPAPVAAEAAAEEDPTKKVEPAMDITTDAAPVAPPLEDEKPAPAAGEEEPREYSESKEIKAGRGEEEEVRLEGHGEGFGGPEAENGEAKGAGGGGDGGKVEEAEEDVKGVSQGAAEAEKDDVGGEAVAAPAPAVESKSETGELGEEDASLASPDAPEGDEKGGLREEQEEAGAAVEAEAVDKVADDGQSAVAEEEKREPEATKGEEVVSGGGDVGELGDEKEVEFSARSMEVTKPEDKVPVAESNGELADKKGASDDVVALGSEEALEESTNKGADVEDEAANPEPASEPSPVVLNDASAEEPAPASADSVIEDSPEKGQNAEGQDAASEAPKESTNMDADLEDEAPRFSHPARRVQWCE

SEQ ID NO: 81602 - protein, 211 aa, Setaria italica
  misc_feature (35)..(35): Xaa can be any naturally occurring amino acid
  Transcript Sequence Number=SeqID_15628
  Gene Ontology: Mol. function=zinc ion binding; Cellular component =intracellular
  Homolog annotation: Hit_ID=B6TDM8; Match level="QueryCoverage=100%, HitCoverage=54%, E-value=1e-100, Identity=83%"; Hit description=Zinc finger, C2H2 type family protein
  Pfam annotation: Domain name=zf-C2H2; Domain location=1-18; Score =3.9; E_value=4.6; Accession=PF00096.18; Description=Zinc finger, C2H2 type
  Pfam annotation: Domain name=zf-C2H2; Domain location=115-139; Score =12.4; E_value=0.54; Accession=PF00096.18; Description=Zinc finger, C2H2 type
  Pfam annotation: Domain name=zf-C2H2; Domain location=85-109; Score =17.6; E_value=0.051; Accession=PF00096.18; Description=Zinc finger, C2H2 type
  Pfam module annotation: Pfam domain module=zf-C2H2::zf-C2H2::zf-C2H2; Domain location=1-18::115-139::85-109
CGKGFRRDANLRMHMRAHGDRFKTLDALSRPGHGXPKPPAGDREVRFSCPFAGCNRNRAHRRFRPLKSAVCARNHFRRSHCPKLYACERCDGKKRFAVLADLRSHLRHCGEEAQWRCSCGTTFSRKDKLFGHLALFEGHTPAVTEPNKDVAAGPTEPVLDAMEEGGIEEGNCDREEDEEGGYDPEFFTEWMEELRDGASGSNWAGPAAAGH

SEQ ID NO: 81603 - protein, 78 aa, Setaria italica
  misc_feature (55)..(55): Xaa can be any naturally occurring amino acid
  Transcript Sequence Number=SeqID_15629
MKRLLAHGRQFGCPSRDLVVGRSSALPALCNSVLPGYRYYSTEKHKHDDTLGENXGEKARSTAEEFLRVAKEKTDEVT

SEQ ID NO: 81604 - protein, 92 aa, Setaria italica
  Transcript Sequence Number=SeqID_15630
CVVGGGGMPPAWLVAPPVGRGQGRTSAGGWEAALWGDLARTKGEAPSSCAEGKRRRGSTERRTDRRRVAQRCWSRRFGLGARAAISASRDDD

SEQ ID NO: 81605 - protein, 89 aa, Setaria italica
  Transcript Sequence Number=SeqID_15631
ILCAPYQSGRQLKANEENRELGAAASATSFLSGPATREHGGALARCCRRGHGGFLESRGKSNRESSREAEKIGSSSRRRGKRLWPCGIG

SEQ ID NO: 81606 - protein, 121 aa, Setaria italica
  Transcript Sequence Number=SeqID_15632
  Gene Ontology: Mol. function=calcium ion binding; Cellular component =oxygen evolving complex; Biological process=photosynthesis
MDQGMELRGCVCRIKSSALELLSMEEDLVTDLDDDLCDLVRRDLQLKATFLYIDLSRVIAHNECEERREEITLLANDFFYFMDELGDAVASRSVSVVKVCYGNTARALRKVVAAIAPAAAA

SEQ ID NO: 81607 - protein, 113 aa, Setaria italica
  Transcript Sequence Number=SeqID_15633
SSTLYLFVVQSITEDVLRMKILIFVSVQLITEQNHNSSRKGKSTYLEQRRQSAVSINFKYGLGKQWLAKDDNHNFYFMHVQSIMTRMYFTKKITIITAICQRKLCNSKNITWF

SEQ ID NO: 81608 - protein, 387 aa, Setaria italica
  Transcript Sequence Number=SeqID_15634
  Gene Ontology: Mol. function=hydrolase activity, acting on glycosyl bonds
  Homolog annotation: Hit_ID=B9SJL8; Match level="QueryCoverage=99%, HitCoverage=98%, E-value=0.0, Identity=72%"; Hit description =Protease C56, putative
  Pfam annotation: Domain name=DJ-1_PfpI; Domain location=225-382; Score=161.2; E_value=3.2e-45; Accession=PF01965.16; Description=DJ -1PfpI family
  Pfam annotation: Domain name=DJ-1_PfpI; Domain location=32-189; Score= 148.6; E_value=2e-41; Accession=PF01965.16; Description=DJ-1PfpI family
  Pfam module annotation: Pfam domain module=DJ-1_PfpI::DJ-1_PfpI; Domain location=225-382::32-189
MAAKKVLLLCGDYMEDYEVMVPFQALQAYGVSVDGVCPGKKAGDVCRTAVHQGIGHQTYSETRGHNFALNASFDEIGANGYDGLVIPGGRAPEYLAMDDKVLDLVRKFSDAKKPIASVCHGQLILAAAGVVQNRTCTAYPAVKPVLVAAGAKWDEPDTMAKCSVDGNLITAATYDSHPEFISLFVKALGGSVAGSDKKILFLCGDYMEDYEVMVPFQSLQALGCHVDAVCPDKGAGEKCPTAIHDFEGDQTYSEKPGHDFTLTASFESMDASSYDALVIPGGRAPEYLALNDKVISLVKGFSDKGKPIASICHGQQILSAAGVLKGKKCTAYPAVKLNVVLGGGTWLEPDPIDRCFTDGNLVTGAAWPGHPEFVAQLMALLGIKVSF

SEQ ID NO: 81609 - protein, 49 aa, Setaria italica
  Transcript Sequence Number=SeqID_15635
CFGKALFLILYLSQLWYDRLQLKPEFIQTSVLISFDSLGFCYQAQGVGF

SEQ ID NO: 81610 - protein, 79 aa, Setaria italica
  Transcript Sequence Number=SeqID_15636
PSDLVVCLVQLRRPRLIAGGGFAGNPRHPRGPEAGRRAEEPHRVRLGGDQLVGPVNQRESCGGGISNRAEDGRTEEASS

SEQ ID NO: 81611 - protein, 307 aa, Setaria italica
  Transcript Sequence Number=SeqID_15637
  Gene Ontology: Mol. function=protein serine/threonine kinase activity; Cellular component=plasma membrane; Biological process =protein amino acid phosphorylation
  Homolog annotation: Hit_ID=Q7XUH4; Match level="QueryCoverage=92%, HitCoverage=51%, E-value=1e-131, Identity=50%"; Hit description =OSJNBa0020J04.8 protein
  Pfam annotation: Domain name=LRR_1; Domain location=118-140; Score =11.7; E_value=1.7; Accession=PF00560.25; Description=Leucine Rich Repeat
  Pfam annotation: Domain name=LRR_1; Domain location=142-164; Score =17.6; E_value=0.051; Accession=PF00560.25; Description=Leucine Rich Repeat
  Pfam annotation: Domain name=LRR_1; Domain location=166-188; Score =16.6; E_value=0.1; Accession=PF00560.25; Description=Leucine Rich Repeat
  Pfam annotation: Domain name=LRR_1; Domain location=190-212; Score =21.6; E_value=0.0033; Accession=PF00560.25; Description=Leucine Rich Repeat
  Pfam annotation: Domain name=LRR_1; Domain location=21-43; Score=1.1; E_value=1.9e+02; Accession=PF00560.25; Description=Leucine Rich Repeat
  Pfam annotation: Domain name=LRR_1; Domain location=214-236; Score =20.2; E_value=0.0087; Accession=PF00560.25; Description=Leucine Rich Repeat
  Pfam annotation: Domain name=LRR_1; Domain location=238-260; Score =12.2; E_value=1.4; Accession=PF00560.25; Description=Leucine Rich Repeat
  Pfam annotation: Domain name=LRR_1; Domain location=262-284; Score =20.7; E_value=0.0061; Accession=PF00560.25; Description=Leucine Rich Repeat
  Pfam annotation: Domain name=LRR_1; Domain location=45-67; Score =20.6; E_value=0.0067; Accession=PF00560.25; Description=Leucine Rich Repeat
  Pfam annotation: Domain name=LRR_1; Domain location=69-91; Score =13.1; E_value=0.95; Accession=PF00560.25; Description=Leucine Rich Repeat
  Pfam annotation: Domain name=LRR_1; Domain location=93-116; Score =14.5; E_value=0.46; Accession=PF00560.25; Description=Leucine Rich Repeat
  Pfam module annotation: Pfam domain module=LRR_1::LRR_1::LRR_1::LRR _1::LRR_1::LRR_1::LRR_1::LRR_1::LRR_1::LRR_1::LRR_1; Domain location =118-140::142-164::166-188::190-212::21-43::214-236::238-260::262 -284::45-67::69-91::93-116
VYLGGNSFSGQIPTSLGNLSWLEALSIPRNRLTGSLSGELFQLGNLTFLDLSENNLTGEIPPAIGNLSALQSLNLSRNAFSGRIPSTIGSLQNLRVLDLSGQKNLSGNVPAELFGLPQLQYVSFADNSFSGDVPEGFSSLWSLRHLNLSGNSFTGSIPATYGYLPSLQVLSASHNRISGELPAELANCSNLTVLEISGNQLTGSIPSDLSRLGELEELDLSYNQLSGKIPPEISNCSSLALLKLDDNRIGGDIPASLANLSKLQTLDLSSNNLTGTIPASLAALPCNVLVLCSMQSYYWSCMALLSS

SEQ ID NO: 81612 - protein, 76 aa, Setaria italica
  Transcript Sequence Number=SeqID_15638
  Gene Ontology: Mol. function=DNA binding; Cellular component =chromosome; Biological process=nucleosome assembly
  Homolog annotation: Hit_ID=B6SZ05; Match level="QueryCoverage=63%, HitCoverage=25%, E-value=5e-19, Identity=97%"; Hit description =Histone H2A
ARDNKKTRIIPRHVLLAIRNDEELGKLLAGVTIAHGGVLPNINPVLLPKKVAEKAASGGAKEAKSPKKGAKSPKKA

SEQ ID NO: 81613 - protein, 140 aa, Setaria italica
  Transcript Sequence Number=SeqID_15639
  Gene Ontology: Mol. function=DNA binding; Biological process =regulation of transcription
  Homolog annotation: Hit_ID=B6TVG0; Match level="QueryCoverage=99%, HitCoverage=44%, E-value=5e-41, Identity=67%"; Hit description=MYR1
  Pfam annotation: Domain name=Myb_DNA-binding; Domain location=2-53; Score=21.8; E_value=0.0028; Accession=PF00249.23; Description=Myb -like DNA-binding domain
PRLRWTSQLHGRFELAVAQLGGADKATPKSVLRAMAVPELTLYHLKSHLQKYRLAVSRGLITTSPGDNGEGANDRSSSSENEYDEDAVAELHGAFTADDGAGAKEGLCDSSRSMARMHREVQRKLQEQIEVQRHLQLRIE

SEQ ID NO: 81614 - protein, 169 aa, Setaria italica
  misc_feature (111)..(111): Xaa can be any naturally occurring amino acid
  Transcript Sequence Number=SeqID_15640
  Subcellular localization annotation: CTP_CleavageSite=62; ConfidenceScore=5.16e-01
NNTPPRIHTLLRTDQRALFPIPQGPPVCPSNLARIRARRRVISEFQRGGPIRCQFARILPPRCSISSALEVHSQDWPDPAANFGDLLAISPCKNRGIGWQLGRIRGRGTLXSGGEMIAAVSQVPAGWGEDEMSVLPRHTKVVVTGNNRTKSVLVGLHGVVKKAVGLGGW

SEQ ID NO: 81615 - protein, 219 aa, Setaria italica
  Transcript Sequence Number=SeqID_15641
SGGEMIAAVSQVPAGWGEDEMSVLPRHTKVVVTGNNRTKSVLVGLHGVVKKAVGLGGWHWLVLTNGIEVKLQRNALSVIEPPTGNEDDDKFDCENMQWNSSDMASDDAQSPKAMRSRSRQHRGFHRKSLSRSMSCDSHSKMSVSSSARAHTKVDLSKLELTALWRYWRHFNLDASPNPSREQLIDAVQRHFMSQQLDESQVIIGFVQAAKRLKTTMKVA

SEQ ID NO: 81616 - protein, 321 aa, Setaria italica
  Transcript Sequence Number=SeqID_15642
  Gene Ontology: Mol. function=metal ion transmembrane transporter activity; Cellular component=integral to membrane; Biological process=metal ion transport
  Homolog annotation: Hit_ID=C1J0N0; Match level="QueryCoverage=99%, HitCoverage=83%, E-value=9e-74, Identity=76%"; Hit description=Metal ion transporter ZIP3
  Pfam annotation: Domain name=Zip; Domain location=1-318; Score=267.5; E_value=3e-77; Accession=PF02535.14; Description=ZIP Zinc transporter
TGVLVPVLGRSASALRPDGDVFFAVKAFAAGVILATGMVHILPAAFDALAPPCDAGSGRGKGAAFPFAGLVAMCSAMVTMMVDSVAAGYYQRSHFRKARPVDDAAAAGADEEADAEHAGHVHVHTHATHGHAHGHAHDHGGHGHGGPAAGASPDDASSFAVSIRHRVISQVLELGILVHSVIIGVSLGASLRPSTIRPLVGALSFHQFFEGIGLGGCIVQAKFKVRATMIMATFFSLTAPMGIALGIAITSSYSKHSATALVVEGVFNAAAAGILIYMSLVDLLAADFNNPRLQTNMKLQLATYLALFLGAGLMSLLAKWA

SEQ ID NO: 81617 - protein, 37 aa, Setaria italica
  Transcript Sequence Number=SeqID_15643
  Gene Ontology: Mol. function=nucleoside-triphosphatase activity
  Homolog annotation: Hit_ID=B9RBJ1; Match level="QueryCoverage=83%, HitCoverage=4%, E-value=2e-10, Identity=100%"; Hit description=ATP binding protein, putative
IFLLLQIGEGEKLVRALFGVASCRQPAVIFVDEIDSL

SEQ ID NO: 81618 - protein, 343 aa, Setaria italica
  Transcript Sequence Number=SeqID_15644
  Gene Ontology: Mol. function=nucleoside-triphosphatase activity; Cellular component=protein complex; Biological process=ATP metabolic process
  Homolog annotation: Hit_ID=B9RBJ1; Match level="QueryCoverage=100%, HitCoverage=52%, E-value=1e-169, Identity=84%"; Hit description=ATP binding protein, putative
  Pfam annotation: Domain name=AAA; Domain location=101-287; Score =249.0; E_value=1.2e-71; Accession=PF00004.21; Description=ATPase family associated with various cellular activities (AAA)
  Pfam annotation: Domain name=AAA_5; Domain location=101-232; Score =18.0; E_value=3.1e-05; Accession=PF07728.6; Description=ATPase family associated with various
  Pfam annotation: Domain name=Vps4_C; Domain location=287-339; Score= -2.1; E_value=0.0096; Accession=PF09336.2; Description=Vps4 C terminal oligomerisation domain
  Pfam module annotation: Pfam domain module=AAA::AAA_5::Vps4_C; Domain location=101-287::101-232::287-339
NGGSGTTISRVTGKSDDSMEDSTRKCIEMLCGPDGELPEKLRNLEPRLIEHVSNEIMDRDPNVRWNDIAGLEHAKKCVTEMVIWPLLRPDIFRGCRSPGRGLLLFGPPGTGKTMIGKAIAGEAKATFFYISASSLTSKWIGEGEKLVRALFGVASCRQPAVIFVDEIDSLLSQRKSDGEHESSRRLKTQFLIEMEGFDSGNEQILLIGATNRPQELDEAARRRLTKRLYIPLPSEEARAWIIRNLLEKDGLFMLSEEETSAICKLTEGYSGSDMKNLVKDASMGPLREALQRGVEITKLSKEDMRPVMLKDFENAMQEVRPSVSSSELGTYEEWNKQFGSLSM

SEQ ID NO: 81619 - protein, 52 aa, Setaria italica
  Transcript Sequence Number=SeqID_15645
MYFNFYSSTQDPPFDTALSDISSAHILVLLFEQGITICLETETGLKDSTLAL

SEQ ID NO: 81620 - protein, 418 aa, Setaria italica
  Transcript Sequence Number=SeqID_15646
  Gene Ontology: Mol. function=nucleoside-triphosphatase activity; Cellular component=chloroplast; Biological process=chlorophyll biosynthetic process
  Homolog annotation: Hit_ID=B4FZP0; Match level="QueryCoverage=100%, HitCoverage=99%, E-value=0.0, Identity=86%"; Hit description =Magnesium-chelatase subunit chlI
  Pfam annotation: Domain name=AAA; Domain location=107-370; Score= -29.4; E_value=0.0094; Accession=PF00004.21; Description=ATPase family associated with various cellular activities (AAA)
  Pfam annotation: Domain name=AAA_5; Domain location=156-285; Score= -16.2; E_value=0.021; Accession=PF07728.6; Description=ATPase family associated with various
  Pfam annotation: Domain name=MCM; Domain location=66-396; Score= -220.6; E_value=0.0036; Accession=PF00493.15; Description=MCM235 family
  Pfam annotation: Domain name=Mg_chelatase; Domain location=83-291; Score=-122.2; E_value=0.0002; Accession=PF01078.13; Description =Magnesium chelatase, subunit ChlI
  Pfam module annotation: Pfam domain module=AAA::AAA_5::MCM::Mg _chelatase; Domain location=107-370::156-285::66-396::83-291
  Subcellular localization annotation: CTP_CleavageSite=69; ConfidenceScore=5.84e-01
MPLLPTMASPFSTSAARALLPASTSRPLSIAAAASSGRIPASRKGLGFRRGRFTVCNVAAPTAAEQEAKASSAKESQRPVYPFAAIVGQDEMKLCLLLNVIDPKIGGVMIMGDRGTGKSTTVRSLVDLLPNIRVVVGDPFNSDPDDPEVMGPEVRERVLQGDTGLPVTTAKITMVDLPLGATEDRVCGTIDIEKALTEGVKAFEPGLLAKANRGILYVDEVNLLDDHLVDVLLDSAASGWNTVEREGISISHPARFILIGSGNPEEGELRPQLLDRFGMHAQVGTVRDAELRVKIVEERARFDRDPKAFRDSYKEEQEKLQDQISSARSNLGAVQIDHDLRVKISKVCSELNVDGLRGDIVTNRAAKALASLKGRDKVTVEDIATVIPNCLRHRLRKDPLESIDSGLLVIEKFYEVFS

SEQ ID NO: 81621 - protein, 81 aa, Setaria italica
  Transcript Sequence Number=SeqID_15647
LVHSISRPEMDKWCCNEVNGRDQNKKLRIKKNSSRICTTLYKLKQSKHSIQKCWRVLLYNRINSLFLHSPPKLPYSTIKAY

SEQ ID NO: 81622 - protein, 123 aa, Setaria italica
  Transcript Sequence Number=SeqID_15648
  Gene Ontology: Mol. function=oligopeptide transporter activity; Cellular component=integral to membrane; Biological process =oligopeptide transport
  Homolog annotation: Hit_ID=Q6Z0P4; Match level="QueryCoverage=99%, HitCoverage=30%, E-value=3e-41, Identity=65%"; Hit description =Putative sexual differentiation process protein isp4
PISLVCLVWKNSVTAQQIGSGVYGLGVGSFGLDWATVAGFLGTPLSTPAFAIANIMAGFFLIVYVIVPVAYWTDAYGAKRFPIISSHVFMANGSRYDVNKVLDPATFQFSQAGYDGAGQINLS

SEQ ID NO: 81623 - protein, 72 aa, Setaria italica
  Transcript Sequence Number=SeqID_15649
  Gene Ontology: Mol. function=translation elongation factor activity; Cellular component=nucleus; Biological process=transcription
  Homolog annotation: Hit_ID=Q2QX85; Match level="QueryCoverage=81%, HitCoverage=33%, E-value=5e-22, Identity=84%"; Hit description =Transcription elongation factor, putative, expressed
  Pfam annotation: Domain name=TFIIS; Domain location=1-72; Score=77.3; E_value=5.4e-20; Accession=PF08711.3; Description=Transcription factor S-II (TFIIS)
MRSFFTQTVRACGVLSQPEDELVSLLQNLEDMDVTYKALQETDIGRHVNGLRKHPSAEVRRLVKQLIRKWKE

SEQ ID NO: 81624 - protein, 98 aa, Setaria italica
  Transcript Sequence Number=SeqID_15650
  Gene Ontology: Mol. function=translation elongation factor activity; Cellular component=nucleus; Biological process=transcription
  Homolog annotation: Hit_ID=Q53PV2; Match level="QueryCoverage=66%, HitCoverage=19%, E-value=3e-15, Identity=61%"; Hit description =Transcription elongation factor, putative, expressed
  Subcellular localization annotation: CTP_CleavageSite=48; ConfidenceScore=5.50e-01
QLCNNDTFINSTFQVSGFQYSPSPQRHNGSTSERANNGFEPTMDMKRRASPVPAHHNSRQMNNNHHSTPMPSAPAKVTRDHKDSLLDLDRLDSARKRL

SEQ ID NO: 81625 - protein, 288 aa, Setaria italica
  Transcript Sequence Number=SeqID_15651
  Gene Ontology: Mol. function=translation elongation factor activity; Cellular component=nucleus; Biological process=transcription
  Homolog annotation: Hit_ID=Q53PV2; Match level="QueryCoverage=82%, HitCoverage=70%, E-value=7e-87, Identity=66%"; Hit description =Transcription elongation factor, putative, expressed
  Pfam annotation: Domain name=TFIIS; Domain location=45-131; Score =123.0; E_value=1e-33; Accession=PF08711.3; Description=Transcription factor S-II (TFIIS)
GRTGTRNEGRNGEEAAPVSPEAEGDAAGAGAAEEAEELGAGAGGEPGLESKIVAIRDFLEDPDQPEDELVSLLQNLEDMDVTYKALQETDIGRHVNGLRKHPSAEVRRLVKQLIRKWKEIVDDWVRLHNSGGDGGSSIIADGDSPEKIQGRSHQSPRVSGFQYSPSPQRHNGSTSERANNGFEPTMDMKRRASPVPAHHNSRQMNNNHHSTPMPSAPAKVTRDHKDSLLDLDRLDSARKRLQENYQEAQNAKKQRTIQVMDINDIPKPKNRNAFIRKNGSGGLPARHR

SEQ ID NO: 81626 - protein, 211 aa, Setaria italica
  Transcript Sequence Number=SeqID_15652
  Subcellular localization annotation: CTP_CleavageSite=47; ConfidenceScore=5.54e-01
MATTLSLSSPLFLAAPARARDVALCGVPSASTSWSTANALSKGYMVRVHERGKQRRMAIVSVIGRKSTTRETVVPDPDYRLPIAILGIAGAFAYADNLLAAAPVGLLGLLLLFQTTRVRFVFDNEALEVKVGDQLQESGENVFVGGKNRWKYSTFINWELWWPQFPILVYFKESQTKPEGQIHFFPVIFNGRQLYDVMVERAGPSKTSGPK

SEQ ID NO: 81627 - protein, 259 aa, Setaria italica
  Transcript Sequence Number=SeqID_15653
  Gene Ontology: Mol. function=electron carrier activity; Biological process=oxidation reduction
  Homolog annotation: Hit_ID=Q8LGN4; Match level="QueryCoverage=85%, HitCoverage=42%, E-value=1e-109, Identity=85%"; Hit description =Cytochrome P450 monooxygenase CYP72A26
MVLGAPLAAAASVPWSILLGGLLALVLLWKVGGLLHQMWWRPRRLERALRAQGIRGTSYRFLTGDLKEYGRLAKEAWSKPLPLRCHDIAHRVMPFVHNIVQEHGKMSMSWFGPNPKVTIVDPELSRDVLSNKFGHFEKLKFPALSKMLGDGVATHEGEKWVKHRRILNPAFHLEKLKRMLPAFSACCEELVSRWSESLGSDALLELDVWPELQNLTGDVISRTAFSSSYHEGRRIFQLQAEQAELVMTNIRKNMIPGYM

SEQ ID NO: 81628 - protein, 98 aa, Setaria italica
  Transcript Sequence Number=SeqID_15654
KQNHHFFLIKTKKTETILSIRVGINTPQITVPDHCSSSATTLTSARSSSESITWFPELHCIHTQLMPGCIYEKLGPCMLCHQPGQRTGGSTLISVSRD

SEQ ID NO: 81629 - protein, 281 aa, Setaria italica
  Transcript Sequence Number=SeqID_15655
  Gene Ontology: Mol. function=electron carrier activity; Cellular component=extracellular region; Biological process=response to oxidative stress
  Homolog annotation: Hit_ID=B6UI45; Match level="QueryCoverage=100%, HitCoverage=83%, E-value=1e-145, Identity=90%"; Hit description =Peroxidase 16
  Pfam annotation: Domain name=peroxidase; Domain location=2-245; Score= 342.0; E_value=1.2e-99; Accession=PF00141.15; Description=Peroxidase
KLQETFNAAPGTLRLFFHDCFVRGCDASVLLSGPDDEHSAGADTTLSPDALDLITRAKAAVDGDAQCANKVSCADILALAARDVVSQTGGPYYQVELGRLDGKVGTRAVVKHSLPGAGFDLDQLNTLFAANGLTQTDMIALSGGHTIGVTHCDKFVRRLYPFKGSRGGAGGAGPPMNLYFLRQMRQTCPLNYSPSAFAMLDAVTPRKFDNGYYQTLQQMKGLLASDQVLFADRRSRATVNYFAANQTAFFDAFVAAMAKLGRVGVKTGSDGEIRRVCTKVN

SEQ ID NO: 81630 - protein, 563 aa, Setaria italica
  Transcript Sequence Number=SeqID_15656
  Gene Ontology: Mol. function=protein binding; Cellular component =spliceosome; Biological process=nuclear mRNA splicing, via spliceosome
  Homolog annotation: Hit_ID=Q84UD2; Match level="QueryCoverage=90%, HitCoverage=99%, E-value=0.0, Identity=70%"; Hit description=GAMYB -binding protein (Fragment)
  Pfam annotation: Domain name=SKIP_SNW; Domain location=144-310; Score= 394.1; E_value=2.4e-115; Accession=PF02731.7; Description=SKIPSNW domain
PAAATRAIPPYGKRAGFVPRRPEDFGDGGAFPEIHVAQYPLGMGRRDDKGGSKILALTVDAHGSVAFDAVVKQGENAGKIVYSKHSDLVPKIATSDSQAPVDGDEEQKEIEETTERTKAALEKVVNVRLSAAQPKNVPTHDSESKFIKYKPSQQSAAFNSGAKERIIRMSEMAVDPLEPPKFKHKRVPRASGSPPVPVMHSPPRPVTVKDQQDWKIPPCISNWKNPKGYTIPLDKRLAADGRGLQEVQINDNFAKLSEALYVAEQKAREAVQMRSKVQRELQLKEKERKEQELRALAQKARMERTGGPPAPSGVPTGGSRGAVEAIDEDMDMEQPREPREQRRESREEREARIERDRIREERRRERERERRLEAKDAAMGKKSKITRDRDRDISEKIALGMASTGGAKGGEVMYDQRLFNQDKGMDSGFATDDQYNIYSKGLFTAQSTMSTLYRPKKDGDSDVYGDADEQLEKVMKTERFKPDKGFTGASERTGKRDRPVEFDKQEENDPFGLDQFLTEVKKGKKAVEKIGGGGTMKASGGSSMRDDYDGGSGRSRINFERGR

SEQ ID NO: 81631 - protein, 156 aa, Setaria italica
  Transcript Sequence Number=SeqID_15657
  Gene Ontology: Mol. function=structural constituent of cell wall; Cellular component=cell wall
  Homolog annotation: Hit_ID=B6TPE6; Match level="QueryCoverage=91%, HitCoverage=34%, E-value=3e-61, Identity=80%"; Hit description =Receptor-like protein kinase
  Pfam annotation: Domain name=LRR_1; Domain location=108-130; Score =16.0; E_value=0.16; Accession=PF00560.25; Description=Leucine Rich Repeat
  Pfam annotation: Domain name=LRR_1; Domain location=12-34; Score=4.2; E_value=48; Accession=PF00560.25; Description=Leucine Rich Repeat
  Pfam annotation: Domain name=LRR_1; Domain location=60-82; Score=4.5; E_value=42; Accession=PF00560.25; Description=Leucine Rich Repeat
  Pfam annotation: Domain name=LRR_1; Domain location=84-106; Score =10.5; E_value=2.9; Accession=PF00560.25; Description=Leucine Rich Repeat
  Pfam module annotation: Pfam domain module=LRR_1::LRR_1::LRR_1::LRR _1; Domain location=108-130::12-34::60-82::84-106
  Subcellular localization annotation: CTP_CleavageSite=54; ConfidenceScore=5.17e-01
RAPVPPRLFDRPLDAIFLNHNRLRFQLPDNFGNSPASVVVLAHNSFGGCLPASVANMSGTLNEILLINNGLSSCFPPEIGLLRELTVLDVSFNELAGPLPPEVALMRKLEQLDVAHNRLTGAIPPGICELPRLKNFTFAYNFFTGGYGNSDGNWRS

SEQ ID NO: 81632 - protein, 414 aa, Setaria italica
  Transcript Sequence Number=SeqID_15658
  Gene Ontology: Mol. function=protein binding; Cellular component=cell wall
  Homolog annotation: Hit_ID=B6TPE6; Match level="QueryCoverage=82%, HitCoverage=82%, E-value=1e-165, Identity=85%"; Hit description =Receptor-like protein kinase
  Pfam annotation: Domain name=LRRNT_2; Domain location=48-88; Score =9.3; E_value=0.1; Accession=PF08263.4; Description=Leucine rich repeat N-terminal domain
  Pfam annotation: Domain name=LRR_1; Domain location=125-147; Score =7.6; E_value=11; Accession=PF00560.25; Description=Leucine Rich Repeat
  Pfam annotation: Domain name=LRR_1; Domain location=149-171; Score =8.9; E_value=6.1; Accession=PF00560.25; Description=Leucine Rich Repeat
  Pfam annotation: Domain name=LRR_1; Domain location=173-192; Score =8.8; E_value=6.2; Accession=PF00560.25; Description=Leucine Rich Repeat
  Pfam annotation: Domain name=LRR_1; Domain location=196-218; Score =6.0; E_value=21; Accession=PF00560.25; Description=Leucine Rich Repeat
  Pfam annotation: Domain name=LRR_1; Domain location=219-241; Score =0.8; E_value=2.1e+02; Accession=PF00560.25; Description=Leucine Rich Repeat
  Pfam annotation: Domain name=LRR_1; Domain location=244-266; Score =2.8; E_value=90; Accession=PF00560.25; Description=Leucine Rich Repeat
  Pfam annotation: Domain name=LRR_1; Domain location=268-290; Score =3.0; E_value=81; Accession=PF00560.25; Description=Leucine Rich Repeat
  Pfam annotation: Domain name=LRR_1; Domain location=292-314; Score =11.1; E_value=2.3; Accession=PF00560.25; Description=Leucine Rich Repeat
  Pfam annotation: Domain name=LRR_1; Domain location=316-337; Score =4.5; E_value=42; Accession=PF00560.25; Description=Leucine Rich Repeat
  Pfam module annotation: Pfam domain module=LRRNT_2::LRR_1::LRR_1::LRR_ 1::LRR_1::LRR_1::LRR_1::LRR_1::LRR_1::LRR_1; Domain location=48 -88::125-147::149-171::173-192::196-218::219-241::244-266::268 -290::292-314::316-337
MRKALLLLLFVLCCLATAVEAVGEGAAQAGAELAVVVDPSWRFPSQRLRDAYVALQTWKQQAIFSDPRNFTADWVGPGVCSYRGVFCAPLPQGEPGAGELAVAGIDLNHGDIAGYLPSELGLLTDLALLHLNSNRFCGLVPAALRRLRLLVELDLSNNRLVGAFPAVVLDLPALKFLDLRFNDFEGPIPRELFDRPLDAIFLNHNRLRSPLPDNFGNSPASVIVLADNSFGGCLPASLGNMSGTLNEILLINNGLDSCVPPEVGLLREVTVFDVSFNALVGPLPQQVAGMRKVEQLDVAHNHLSGAIPEAICALPRLKNFTVSDNYFTGEPPSCARVVPPDGDRRNCLPNRPAQRTPQQCAAFYSLPPVDCAAFQCKPFVPVPPLPPPPPVYPGPLPPVYPMPYASPPPPSHYR

SEQ ID NO: 81633 - protein, 96 aa, Setaria italica
  Transcript Sequence Number=SeqID_15659
HATHDCPVDSKPTRNNTWELVSQPSSPRTAPIIYTHIGLSERHNTRDRIDRRHGQARLAVLSEVAAAARRGLQEGDEHQGDDGDEGQRDEDVLVDG

SEQ ID NO: 81634 - protein, 56 aa, Setaria italica
  Transcript Sequence Number=SeqID_15660
  Gene Ontology: Mol. function=metal ion binding
LTADSNTIVRLGRHQGVVSNVVSGMLCIQLDNGRSENVELGKQAIRLIAGSKGRKR

SEQ ID NO: 81635 - protein, 689 aa, Setaria italica
  Transcript Sequence Number=SeqID_15661
  Gene Ontology: Mol. function=metal ion binding; Cellular component =histone methyltransferase complex; Biological process=chromatin -mediated maintenance of transcription
  Homolog annotation: Hit_ID=Q9SFB2; Match level="QueryCoverage=100%, HitCoverage=80%, E-value=1e-139, Identity=42%"; Hit description =F17A17.36 protein
  Pfam annotation: Domain name=C1_3; Domain location=55-84; Score=8.5; E_value=0.059; Accession=PF07649.4; Description=C1-like domain
  Pfam annotation: Domain name=PHD; Domain location=1-57; Score=6.1; E _value=0.0057; Accession=PF00628.21; Description=PHD-finger
  Pfam annotation: Domain name=PHD; Domain location=139-196; Score =29.0; E_value=1.7e-05; Accession=PF00628.21; Description=PHD-finger
  Pfam annotation: Domain name=PHD; Domain location=58-104; Score=14.7; E_value=0.00064; Accession=PF00628.21; Description=PHD-finger
  Pfam annotation: Domain name=zf-C3HC4; Domain location=2-60; Score =14.0; E_value=0.0025; Accession=PF00097.17; Description=Zinc finger, C3HC4 type (RING finger)
  Pfam module annotation: Pfam domain module=C1_3::PHD::PHD::PHD::zf -C3HC4; Domain location=55-84::1-57::139-196::58-104::2-60
MCRLCYTGENEGSTKAAKMLPCKLCSKRYHRHCLKSWGENRDLFHWNSWVCSSCRNCEVCRRPGDPNKLMFCKRCDGAYHCYCQQPSHKNVTNGPYLCPKHTRCHSCGSGVPGSGHSTRWFLGYTCCDACGRLFVKGNYCPICLKVYRDSEVIPMVCCDVCEKWVHIECDGISEEKYQQFQADQNLQYTCAACRGECSQIRDTEDAIRELWKRRDVVDHELMVSLRAAAALPSLEDVSPSYPNSDDEKPGAYVLKNDGRNTLKFSLKSNSSKPPPDTPEQEKIVLKSSGSNKKASKKKGGQGNKTDDRHDDIFLERRHDAKSSNSRLGDQSMDGNHDRSPFKNDSNSYISSSTRSSEKNLKSPSMKAVANNADMIPKVKIKGSKVSSLHFKDSGEENTPKNDTGKGTKLVIHLGSRHKTRSGSPKSELSNSQREQDLGSIHGGKIDVTSQMKSSRSEIKEKSVMKLVRETETQQRNSLLGDLGTSKKHATGKRSNALISGMENANETGTRNRSFGLKQSHSSQVDENQGTTALFSSDSSDNLKPSLLKLKFKRPHLEQLNTQASQPEELATWTSQQEEQLNVAKGQRSKRKRPSMEKADDLDGKTAAKRHLQSTDEVMDANWILRKLGKDAIGKRIEVHQASDGQWHQGVVSNVVSGMLCIQLDNGRSENVELGKQAIRLIAGSKGRKR

SEQ ID NO: 81636 - protein, 118 aa, Setaria italica
  misc_feature (108)..(108): Xaa can be any naturally occurring amino acid
  Transcript Sequence Number=SeqID_15662
  Gene Ontology: Mol. function=protein serine/threonine kinase activity; Cellular component=plasma membrane; Biological process =protein amino acid phosphorylation
  Homolog annotation: Hit_ID=B9SV26; Match level="QueryCoverage=100%, HitCoverage=20%, E-value=5e-29, Identity=61%"; Hit description =Serine/threonine-protein kinase, putative
MDSARSWLQKLQPRDKDRDRGGKPAGSPTGGSARMSAAAGAGTGEEALSSATKQKVAAAKQYIENHYKTQMKSLQERKERRWMLERKLADADVSEEEQNNILKDLEKXETEYMRLRRH

SEQ ID NO: 81637 - protein, 48 aa, Setaria italica
  Transcript Sequence Number=SeqID_15663
  Gene Ontology: Mol. function=oxidoreductase activity; Biological process=oxidation reduction
  Homolog annotation: Hit_ID=Q8S412; Match level="QueryCoverage=100%, HitCoverage=11%, E-value=5e-11, Identity=60%"; Hit description =Cinnamyl alcohol dehydrogenase
  Pfam annotation: Domain name=ADH_N; Domain location=1-48; Score=-4.0; E_value=0.0031; Accession=PF08240.4; Description=Alcohol dehydrogenase GroES-like doma
LYCGICHTDLHIIKNHWGNSMYPVVPGHEIVGVVTGVGGGVTRFKPGD

SEQ ID NO: 81638 - protein, 168 aa, Setaria italica
  Transcript Sequence Number=SeqID_15664
  Gene Ontology: Mol. function=magnesium protoporphyrin IX methyltransferase activity; Cellular component=chloroplast; Biological process=chlorophyll biosynthetic process
  Homolog annotation: Hit_ID=Q5NKT1; Match level="QueryCoverage=100%, HitCoverage=50%, E-value=8e-77, Identity=85%"; Hit description =Putative magnesium-protoporphyrin IX methyltransferase
  Pfam annotation: Domain name=Methyltransf_11; Domain location=1-96; Score=3.5; E_value=0.044; Accession=PF08241.4; Description =Methyltransferase domain
  Pfam annotation: Domain name=Methyltransf_12; Domain location=1-96; Score=21.0; E_value=0.0049; Accession=PF08242.4; Description =Methyltransferase domain
  Pfam annotation: Domain name=Mg-por_mtran_C; Domain location=67-163; Score=205.1; E_value=1.9e-58; Accession=PF07109.3; Description =Magnesium-protoporphyrin IX methyltra
  Pfam module annotation: Pfam domain module=Methyltransf _11::Methyltransf_12::Mg-por_mtran_C; Domain location=1-96::1-96::67 -163
TGSLAIPLAAEGADVLASDISAAMVSEAQRQAQLALASQPAGSPFRMPRFEVRDLESLQGRYDVVVCLDVLIHYPREEARAMIKHLASLAEKRLLISFAPRTLYFDFLKRVGELFPGPSKATRAYLHAERDIEDALREAGWRVANRGFISTQFYFAKLFEAVPAGSSS

SEQ ID NO: 81639 - protein, 177 aa, Setaria italica
  Transcript Sequence Number=SeqID_15665
  Homolog annotation: Hit_ID=Q53MB0; Match level="QueryCoverage=61%, HitCoverage=13%, E-value=4e-12, Identity=43%"; Hit description=GRAS family transcription factor containing protein, expressed
RNRNRYQNAAGDGSQKQRDSFAAQNAGGGAGIRSLPADEQETKTANATALPAADTDHAALASAFFGAQNGENMDMLNMAFLKGMEEAKKFLPTNNSLLMDLEANSGQSTDSKPVTGFTAARVKEEEVVDGMLLFGGGTTNGRGRKNRYTQEDLEAETGRSSKLMMPEQEETGASELY

SEQ ID NO: 81640 - protein, 56 aa, Setaria italica
  Transcript Sequence Number=SeqID_15666
VALLRITGGEEQRIVVTTQNYVLYEPSLFFLIFFSNAAQSLPSNSIANILVSEMRS

SEQ ID NO: 81641 - protein, 112 aa, Setaria italica
  Transcript Sequence Number=SeqID_15667
  Gene Ontology: Mol. function=unfolded protein binding; Cellular component=endoplasmic reticulum lumen; Biological process=protein folding
  Homolog annotation: Hit_ID=Q5Z9N8; Match level="QueryCoverage=80%, HitCoverage=10%, E-value=1e-37, Identity=88%"; Hit description=Heat shock protein 90
LSYRSCGASSYYNNNKSNLKLYVRRVFISDEFDDLLPKYLNFLKGIVDSDTLPLNVSREMLQQHSSLKTIKKKLIRKALDMIRKIAEEDPDEYSNKDKTDEREKVKMEGEEG

SEQ ID NO: 81642 - protein, 63 aa, Setaria italica
  Transcript Sequence Number=SeqID_15668
  Gene Ontology: Mol. function=unfolded protein binding; Cellular component=endoplasmic reticulum lumen; Biological process=protein folding
  Homolog annotation: Hit_ID=P36183; Match level="QueryCoverage=65%, HitCoverage=5%, E-value=1e-12, Identity=82%"; Hit description =Endoplasmin homolog
QAMRNSTKLLLFLLTTLPDPAKKLQVNAEESSDDLANPPKVEEKLGAVPHGLSTDAEIDSASL

SEQ ID NO: 81643 - protein, 243 aa, Setaria italica
  Transcript Sequence Number=SeqID_15669
  Gene Ontology: Mol. function=protein tyrosine kinase activity; Cellular component=integral to membrane; Biological process=protein amino acid phosphorylation
  Homolog annotation: Hit_ID=B6SVW1; Match level="QueryCoverage=100%, HitCoverage=47%, E-value=1e-119, Identity=84%"; Hit description=ATP binding protein
  Pfam annotation: Domain name=Pkinase; Domain location=1-213; Score= -78.3; E_value=0.00079; Accession=PF00069.17; Description=Protein kinase domain
  Pfam annotation: Domain name=Pkinase_Tyr; Domain location=1-213; Score=-95.3; E_value=2.2e-07; Accession=PF07714.9; Description =Protein tyrosine kinase
  Pfam module annotation: Pfam domain module=Pkinase::Pkinase_Tyr; Domain location=1-213::1-213
QYRKKITSLSKVSHKNFMNLLGYCEEEHPFTRVMVFEYAPNGTLFEHLHIREAEKLDWMARLRISMGIAYCLEHMHQLKTPVVPRNFDSTTIYLTDDFAAKVSDLEFWNDAKGHNSTNDNLTSSSDLESVVRKYGIVLLEILTGRAPHSEVDGPLEHWASRYFDGQMRLEELIDPSMGSFPEDAARALCEVVRSCIDPDPKKRPRMAEVAARMREITALGPDGATPKVSPLWWAELEIMSSET

SEQ ID NO: 81644 - protein, 178 aa, Setaria italica
  Transcript Sequence Number=SeqID_15670
LDLPKLATVWRRDWLNANEGFNPLFYKLVVPSPLDSSPESLVAVLILDSANSSTVCICQPPVATDISRGRHMEPSRCLFDVAFFNGKLYGVAFGDKLVIFEIGYDLGCKPKISATECIINSRDDDLWDLPQSLSNEKAYMWREYLVECCGGLLKVERFIHNDHPDRRSLSFEHDRTVA

SEQ ID NO: 81645 - protein, 86 aa, Setaria italica
  misc_feature (63)..(63): Xaa can be any naturally occurring amino acid
  Transcript Sequence Number=SeqID_15671
  Gene Ontology: Mol. function=transferase activity, transferring glycosyl groups; Cellular component=integral to membrane; Biological process=metabolic process
  Homolog annotation: Hit_ID=B9S0A3; Match level="QueryCoverage=93%, HitCoverage=16%, E-value=1e-21, Identity=61%"; Hit description=UDP -glucosyltransferase, putative
FSGSIAQAEPKQVVELGLGLEASGHPFIWVVKNADQHGEDVTEFLRELEGRVAGRGLLIRGWXPQVLILSHAAVGGFVTHCGGTRP

SEQ ID NO: 81646 - protein, 152 aa, Setaria italica
  Transcript Sequence Number=SeqID_15672
  Homolog annotation: Hit_ID=B6TB15; Match level="QueryCoverage=100%, HitCoverage=61%, E-value=1e-76, Identity=90%"; Hit description =EMB1417
  Pfam annotation: Domain name=PPR; Domain location=33-66; Score=2.2; E_ value=4.9; Accession=PF01535.12; Description=PPR repeat
  Pfam annotation: Domain name=PPR; Domain location=69-103; Score=14.7; E_value=0.16; Accession=PF01535.12; Description=PPR repeat
  Pfam module annotation: Pfam domain module=PPR::PPR; Domain location =33-66::69-103
AKALGMLKRRRKWLRIIQVTKWLMTKGQVLTWTTYDTLLLALFMDGRVDEAESIWTTVIQTHTRSVPKRLFSRMILMYDIHHHPDKVLEVYADMEELGVRPDEDTARRIGKAFVAFGQEEKEKYVLDRYLKKWKYIHFNGERVRVRRDGPLA

SEQ ID NO: 81647 - protein, 88 aa, Setaria italica
  Transcript Sequence Number=SeqID_15673
  Gene Ontology: Mol. function=carbonate dehydratase activity; Cellular component=chloroplast; Biological process=carbon utilization
  Homolog annotation: Hit_ID=C0JW71; Match level="QueryCoverage=100%, HitCoverage=36%, E-value=4e-43, Identity=94%"; Hit description=Beta -carbonic anhydrase (Fragment)
  Pfam annotation: Domain name=Pro_CA; Domain location=2-87; Score= -48.5; E_value=0.028; Accession=PF00484.11; Description=Carbonic anhydrase
MKDGAPDNFHFVEDWVRIGFLAKKKVLTNHASVPFDDQCTLLEKEAVNVSLYNLLTYPWVKEGVANGTLKLVGGHYDFVNGVFSVWEK

SEQ ID NO: 81648 - protein, 57 aa, Setaria italica
  Transcript Sequence Number=SeqID_15674
  Gene Ontology: Mol. function=protein serine/threonine kinase activity; Biological process=protein amino acid phosphorylation
MEEALVLLIIVAFSVIAPATSSGLTISLPGCPDKCGNVSIPYPFGIGDGCAATSLSP

SEQ ID NO: 81649 - protein, 104 aa, Setaria italica
  Transcript Sequence Number=SeqID_15675
  Gene Ontology: Mol. function=mannose-6-phosphate isomerase activity; Cellular component=cytoplasm; Biological process=carbohydrate metabolic process
  Homolog annotation: Hit_ID=B6U796; Match level="QueryCoverage=95%, HitCoverage=22%, E-value=1e-45, Identity=91%"; Hit description =Mannose-6-phosphate isomerase
AAVGLFVACLADQDPDPARPYAELWMGTHPSGPSTLLDGGALLRDWLARNPDALGPAVAARWGGDLPFLFKVLSVAKALSIQAHPDKKLAEVLHALRPSTYKDD

SEQ ID NO: 81650 - protein, 147 aa, Setaria italica
  misc_feature (90)..(90): Xaa can be any naturally occurring amino acid
  Transcript Sequence Number=SeqID_15676
  Gene Ontology: Cellular component=nucleus; Biological process =negative regulation of signal transduction
  Homolog annotation: Hit_ID=B6TGY8; Match level="QueryCoverage=100%, HitCoverage=45%, E-value=6e-68, Identity=85%"; Hit description =Nucleotide binding protein
  Pfam annotation: Domain name=WD40; Domain location=29-68; Score=7.7; E_value=4.8; Accession=PF00400.24; Description=WD domain, G-beta repeat
  Pfam annotation: Domain name=WD40; Domain location=73-117; Score =25.9; E_value=0.00017; Accession=PF00400.24; Description=WD domain, G-beta repeat
  Pfam module annotation: Pfam domain module=WD40::WD40; Domain location=29-68::73-117
ASAVAYAEDRDGGDRFVMAAEEKVTLHDSEDARIIHEMDCGKRVLAFAPAKNGVLYTGGEDRGITAWDLSSGKVSSRIEGAHATRVKGLXFDNRKDGSELSNLIASASSDGVIRIWDVRTIGNGKPTPLAVANTKARLTCLAGTSLK

SEQ ID NO: 81651 - protein, 160 aa, Setaria italica
  Transcript Sequence Number=SeqID_15677
RVSRDPGTLLLSQMCSISESLSLGETGSRRIARISGAQPSTSKAIVPYKPFPHAVLLNQNIDVDNMDDHNINLGISTLPPPLTESVEQVEVLGIEASPLGSVGDGKDEAELLSAEHSEQNMVNIIENELGKVIRRSPRIESCLSHWRGGARRGSSLCLTF

SEQ ID NO: 81652 - protein, 338 aa, Setaria italica
  Transcript Sequence Number=SeqID_15678
  Gene Ontology: Mol. function=electron carrier activity; Cellular component=extracellular region; Biological process=response to oxidative stress
  Homolog annotation: Hit_ID=B6U0T8; Match level="QueryCoverage=77%, HitCoverage=79%, E-value=3e-87, Identity=59%"; Hit description =Peroxidase 73
  Pfam annotation: Domain name=peroxidase; Domain location=84-331; Score=407.6; E_value=2e-119; Accession=PF00141.15; Description =Peroxidase
  Subcellular localization annotation: CTP_CleavageSite=54; ConfidenceScore=5.28e-01
QPIAVRLDIRSSSSASTPPAPLHHQAQAGPHSDGAMERRRRSVPLLVAAVFLAVAAMPAYPGEAATPLREDYYRYSCPNLESIVRAEVARKINETVVTIPATLRQVFHDCMAGGCDAAVLIASKKNDAQKDADDNESLAGDGFDTVNRVKTAVEKECPGKVSCADIMHLAARDVVFLAKGPYWHVELGRRDGLVSRKSDVAGKLPDPDMHVKDLSSMFESKGFSPVDLVALSGAHTVGFSHCTRFLNRLYGYSSSAPTDPSFNPEYADQLKQACPRNVGETIAVNMDPVSPITFDNKYYSNLQYGLGLFTSDQVLYTDDSTKPIVNKFAADQKAFFDA

SEQ ID NO: 81653 - protein, 92 aa, Setaria italica
  Transcript Sequence Number=SeqID_15679
  Gene Ontology: Biological process=auxin mediated signaling pathway
  Homolog annotation: Hit_ID=B9RHU0; Match level="QueryCoverage=61%, HitCoverage=44%, E-value=9e-11, Identity=54%"; Hit description =Calmodulin binding protein, putative
  Pfam annotation: Domain name=Auxin_inducible; Domain location=49-92; Score=55.6; E_value=1.8e-13; Accession=PF02519.6; Description=Auxin responsive protein
MMVMGYFRSSKAAATSPTAKKKAKRDDAGLRESLLEQPAAAAAEGGVPKGYFAVYAGEESRRFVVPTGYLQEPAFRDLMERAADEFGFAQAG

SEQ ID NO: 81654 - protein, 99 aa, Setaria italica
  Transcript Sequence Number=SeqID_15680
  Gene Ontology: Mol. function=oxidoreductase activity
  Homolog annotation: Hit_ID=Q9LQM9; Match level="QueryCoverage=50%, HitCoverage=7%, E-value=6e-10, Identity=57%"; Hit description =F5D14.6 protein
MSSPARSTVSAASGGAVSAAEDVADSIDALYRKDEAVAELKSEVMEALQREVRSLDDDSWMFAAPRSRINLVSRPGAYLPKQQGKLVELGQASKKTRNF

SEQ ID NO: 81655 - protein, 136 aa, Setaria italica
  misc_feature (19)..(19): Xaa can be any naturally occurring amino acid
  Transcript Sequence Number=SeqID_15681
AADDFDKKPKKAGSILAKXGHILEEFFRGNPKRIMQWFGHFAVTGESTHKKGAKAISQFAFINRDMCWEELEWKGKHGQSPAVVATKPHYFSDLDVLKTVENFLEYVPDFWSSDELSDSIKDGEILQIVLSSNYFC

SEQ ID NO: 81656 - protein, 297 aa, Setaria italica
  misc_feature (29)..(29): Xaa can be any naturally occurring amino acid
  Transcript Sequence Number=SeqID_15682
GQSPAVVATKPHYFSDLDVLKTVEKFLEXQFLYLMYEENCKDAWHLVEEFLMDEQFSSLSQHLLIHLDEQRLLDFLKSLGKLINTTLQCKELKFPCCWLEVLLSAHCDHISLDDLVLLNCVIAKCRQLWRLMNDEEQDEERGQMEELLKGVNHLTDADHFALMKEFMETEFPDGLKWIGIQSWVIFCDLSKECKSGNSCESLFSDNKIQFHKDDEYSLVQNNAFSISHMPDTDDEDLVGSSHKRRKKNRRRKRRRYEFDEDKLDELLELESSNVKNSVESQRGSWHLSTDGFLLVFS

SEQ ID NO: 81657 - protein, 228 aa, Setaria italica
  misc_feature (57)..(57): Xaa can be any naturally occurring amino acid
  misc_feature (202)..(202): Xaa can be any naturally occurring amino acid
  Transcript Sequence Number=SeqID_15683
  Gene Ontology: Mol. function=sucrose-phosphatase activity; Biological process=metabolic process
  Homolog annotation: Hit_ID=Q84ZX8; Match level="QueryCoverage=97%, HitCoverage=50%, E-value=1e-101, Identity=79%"; Hit description =Sucrose-phosphatase 2
  Pfam annotation: Domain name=Hydrolase_3; Domain location=1-212; Score=-66.0; E_value=0.013; Accession=PF08282.4; Description =haloacid dehalogenase-like hydrolase
  Pfam annotation: Domain name=S6PP; Domain location=2-228; Score =401.0; E_value=2e-117; Accession=PF05116.5; Description=Sucrose-6F -phosphate phosphohydrolase
  Pfam module annotation: Pfam domain module=Hydrolase_3::S6PP; Domain location=1-212::2-228
VVVVVEAEFSQDSLLVFSTGRTPISYKGLRKEKPLITPDITIMSVGTVIAYGRKKNXIRDVGWEEYLDNNWDRNIVVEETAKFSQLKPQPERNQGPHKVSFFVDKHGAQEVIDSLPQKLEKRGLDVKIVYSSGEALDVLPQGAGKGQALVYLLNTLNSNGKPPNNTLVCGDSGNDAELFSVPSVHGIMVSNAQEELLQWYEXENAKSNPKIIHATERCAAGIMQAIGL

SEQ ID NO: 81658 - protein, 174 aa, Setaria italica
  Transcript Sequence Number=SeqID_15684
  Gene Ontology: Mol. function=sucrose-phosphatase activity; Biological process=metabolic process
  Homolog annotation: Hit_ID=Q84ZX8; Match level="QueryCoverage=98%, HitCoverage=39%, E-value=2e-81, Identity=83%"; Hit description =Sucrose-phosphatase 2
  Pfam annotation: Domain name=S6PP; Domain location=8-174; Score =205.8; E_value=1.2e-58; Accession=PF05116.5; Description=Sucrose-6F -phosphate phosphohydrolase
MDKLDGSARLVIVSDLDQTMIDHDDRENLSLLRFEALWEAEFSQDSLLVFSTGRTPISYKGLRKEKPLITPDITIMSVGTVIAYGEEMIRDVGWEEYLDNNWDRNIVVEETAKFSQLKPQPERNQGPHKVSFFVDKHGAQEVIDSLPQKLEKRGLDVKIVYSSGEALDVLPQEP

SEQ ID NO: 81659 - protein, 138 aa, Setaria italica
  misc_feature (125)..(125): Xaa can be any naturally occurring amino acid
  Transcript Sequence Number=SeqID_15685
  Homolog annotation: Hit_ID=B6TCH2; Match level="QueryCoverage=100%, HitCoverage=34%, E-value=3e-42, Identity=69%"; Hit description=BSD domain containing protein
MSWLARSIAATLSSAHSDDDESESASGDQSPPRASDPTSADAGESDEQPDTPSRGVKGDISELTESLTRQFWGVASFLAPPPVKSEADERDEQEEAAAAEGPQSPRIDGIRSDLAEIGGRVRTGXISMLSNAGAVAEI

SEQ ID NO: 81660 - protein, 179 aa, Setaria italica
  misc_feature (112)..(112): Xaa can be any naturally occurring amino acid
  misc_feature (165)..(165): Xaa can be any naturally occurring amino acid
  Transcript Sequence Number=SeqID_15686
  Homolog annotation: Hit_ID=Q9M9U4; Match level="QueryCoverage=53%, HitCoverage=88%, E-value=6e-22, Identity=47%"; Hit description =F6A14.16 protein
  Subcellular localization annotation: CTP_CleavageSite=47; ConfidenceScore=5.65e-01
MASPSLKSHSPVAAALHSARRADLHGRGPVTLGRFHDRGFRSSNSKRSAKVSAFPSLDMVPLMATMVDHVNMSRDYVVTKSIWHLSDTALKSVYTFYAMFTVWGVCFFASMXDPFYDSDTYRSQGGDGTVHWYYDKQEDLEASARNDLLREELLEEIEQSVGGLXRELEEAGREEQLTQ

SEQ ID NO: 81661 - protein, 178 aa, Setaria italica
  Transcript Sequence Number=SeqID_15687
  Homolog annotation: Hit_ID=Q9M9U4; Match level="QueryCoverage=46%, HitCoverage=75%, E-value=2e-22, Identity=54%"; Hit description =F6A14.16 protein
  Subcellular localization annotation: CTP_CleavageSite=47; ConfidenceScore=5.65e-01
MASPSLKSHSPVAAALHSARRADLHGRGPVTLGRFHDRGFRSSNSKRSAKVSAFPSLDMVPLMATMVDHVNMSRDYVVTKSIWHLSDTALKSVYTFYAMFTVWGVCFFASMKDPFYDSDTYRSQGGDGTVHWYYDKQEDLEASARNDLLREELLEEIEQRVGGLRELEEAGREEQLTQ

SEQ ID NO: 81662 - protein, 71 aa, Setaria italica
  Transcript Sequence Number=SeqID_15688
  Gene Ontology: Mol. function=translation initiation factor activity; Cellular component=cytosol; Biological process=regulation of translational initiation
  Homolog annotation: Hit_ID=B4FBV8; Match level="QueryCoverage=84%, HitCoverage=20%, E-value=2e-28, Identity=98%"; Hit description =Eukaryotic translation initiation factor 3 subunit 4
  Pfam annotation: Domain name=RRM_1; Domain location=5-62; Score=36.5; E_value=1e-07; Accession=PF00076.14; Description=RNA recognition motif. (a.k.a. RRM, RBD, o
SRTFLRSLVSVAFGPVSRVYVAVDQKTGSSRGFGFVNFVHREDAEKAISKLNGYGYDNLILRVEWATPRPN

SEQ ID NO: 81663 - protein, 291 aa, Setaria italica
  Transcript Sequence Number=SeqID_15689
  Gene Ontology: Mol. function=translation initiation factor activity; Cellular component=cytosol; Biological process=regulation of translational initiation
  Homolog annotation: Hit_ID=B4FBV8; Match level="QueryCoverage=98%, HitCoverage=99%, E-value=1e-124, Identity=79%"; Hit description =Eukaryotic translation initiation factor 3 subunit 4
  Pfam annotation: Domain name=RRM_1; Domain location=212-282; Score =91.5; E_value=2.9e-24; Accession=PF00076.14; Description=RNA recognition motif. (a.k.a. RRM, RBD, o
MAAAAAQQKIRWGELEEDDGGDLDFLLPPRVVVGPDENGFKKVIEYRFDDDGNKVKVTTTTRVRKLAKARLSRSAIERRQWPKFGDALKEDAGSRLTMVSTEEILLERPRAPGSKADEPAASGDPLAVASKGGAVLMVCRTCGKKGDHWTSKCPYKDLAPPTESFSDRPPTSDGPPAAGGPAKGAYVPPTLRGGADRSGGDSMRRRNDENSVRVTNLSEDTREPDLLELFRAFGPVSRVYVAVDQKTGSSRGFGFVNFVHREDAEKAISKLNGYGYDNLILRVEWATPRPN

SEQ ID NO: 81664 - protein, 64 aa, Setaria italica
  Transcript Sequence Number=SeqID_15690
MLYIMRFFLVICTMTKTTKNRPHHLSNSKRGCKACQLMIRSMTTDDEINDLPQAQKVRASKQGT

SEQ ID NO: 81665 - protein, 405 aa, Setaria italica
  Transcript Sequence Number=SeqID_15691
  Gene Ontology: Mol. function=protein serine/threonine kinase activity; Biological process=protein amino acid phosphorylation
  Homolog annotation: Hit_ID=Q8H8P1; Match level="QueryCoverage=70%, HitCoverage=91%, E-value=1e-123, Identity=72%"; Hit description =Putative receptor-like kinase, 5'-partial (Fragment)
  Pfam annotation: Domain name=APH; Domain location=91-264; Score= -21.7; E_value=0.092; Accession=PF01636.15; Description =Phosphotransferase enzyme family
  Pfam annotation: Domain name=Pkinase; Domain location=88-359; Score =164.4; E_value=3.4e-46; Accession=PF00069.17; Description=Protein kinase domain
  Pfam annotation: Domain name=Pkinase_Tyr; Domain location=88-359; Score=128.6; E_value=2.1e-35; Accession=PF07714.9; Description =Protein tyrosine kinase
  Pfam module annotation: Pfam domain module=APH::Pkinase::Pkinase_Tyr; Domain location=91-264::88-359::88-359
RVVIAVVAAVAGVLLLLAVGCCCCCVWRKRRKRQGETGSSAPGGGADDVLPIRVRKHPALDEDWRSAEKDVDLPLFDLDVVLTATDNFALHNKIGEGGFGPVYMGKLEDGQEVAVKRLSRRSMQGAVEFKNEVKLIAKLQHRNLVRLLGCCIDEDERMILYEYMHNQSLDTFIFDEGKRRLLRWQKRFDIILGIARGLQYLHEDSRFRIIHRDLKASNVLLDRNMVPKISDFGIARMFGGDQTTEHTKKVIGTYGYMSPEYAMDGVFSMKSDIYSFGVMVLEIITGKRNRGFYEVELDLNLLRYAWMLWKEGRSVDLLDEVMDGSFNYSEVLRCIQVALLCVEAQPRNRPLMSSVVTMLASENTVLPEPNEPGVNPGMSTSSDTESSRTRSATSNYVTVTRLEAR

SEQ ID NO: 81666 - protein, 63 aa, Setaria italica
  Transcript Sequence Number=SeqID_15692
MRFGPRRHTQASCSCLPTPAMAAAHAPPHQRALLLLLLAAALLAAMPATCAAARSKKSYRAIF

SEQ ID NO: 81667 - protein, 249 aa, Setaria italica
  Transcript Sequence Number=SeqID_15693
APSSDIIPYHNSRCQAGLSATIRCEQQGRHAHNTIATGTLTVNRSRSTTDPSPWAHETHLALAGCSRPSSSSPGTTVPMGHYRHGVVNLPATPPCIVLPAALFLPQRMQIAHTGCASHGHPPTSRPSHATLVPHLASSHAEVVTPLVVLAPPTDTFPCRKSRQRPACSQIRRPQCNNRLLLKLEPLLCCAFPSTPHAARPLCRRHADAFPMATGTHTAVTSHHSTNMRPLPPRPATATTPTPTATSRPP

SEQ ID NO: 81668 - protein, 80 aa, Setaria italica
  Transcript Sequence Number=SeqID_15694
  Gene Ontology: Mol. function=serine-type endopeptidase activity; Biological process=negative regulation of catalytic activity
  Homolog annotation: Hit_ID=B6SYH0; Match level="QueryCoverage=90%, HitCoverage=9%, E-value=8e-28, Identity=83%"; Hit description=Xylem serine proteinase 1
PLCALPIPFCVSQGMNILAAWAPSEMHPEFVDDVSLTFFMESGTSMSTPHLSGIAAIIKSLHPTWSPAAIKSAIMTSSST

SEQ ID NO: 81669 - protein, 81 aa, Setaria italica
  Transcript Sequence Number=SeqID_15695
  Gene Ontology: Mol. function=serine-type endopeptidase activity; Biological process=negative regulation of catalytic activity
  Subcellular localization annotation: CTP_CleavageSite=30; ConfidenceScore=5.18e-01
EEAQAIGGAPRRTRPWACPPRPCTPSSPSRVNEKQSFTVTVRWNGQPAVAGAEGNLKWVSNEHVVRLVRARRGRRCTRWLP

SEQ ID NO: 81670 - protein, 750 aa, Setaria italica
  Transcript Sequence Number=SeqID_15696
  Gene Ontology: Mol. function=serine-type endopeptidase activity; Biological process=negative regulation of catalytic activity
  Homolog annotation: Hit_ID=B6SYH0; Match level="QueryCoverage=100%, HitCoverage=100%, E-value=0.0, Identity=81%"; Hit description=Xylem serine proteinase 1
  Pfam annotation: Domain name=Inhibitor_I9; Domain location=28-109; Score=59.9; E_value=9.5e-15; Accession=PF05922.8; Description =Peptidase inhibitor I9
  Pfam annotation: Domain name=PA; Domain location=357-454; Score=62.1; E_value=2.1e-15; Accession=PF02225.14; Description=PA domain
  Pfam annotation: Domain name=Peptidase_S8; Domain location=116-591; Score=47.5; E_value=5.2e-11; Accession=PF00082.14; Description =Subtilase family
  Pfam module annotation: Pfam domain module=Inhibitor_I9::PA::Peptidase _S8; Domain location=28-109::357-454::116-591
MRTQRSHLAFLLLSSFALLAVCSAQERKNYVVHLEPRDDGSTDSVEEWHRSFLPEATLDSAGDGGPRIIHSYSHVLSGFAARLTEAEAESLRSKEGCLRLYPEEFLPLATTHSPGFLGLHLGKDGFWSRSGFGRGVVIGLLDTGILPSHPSFGDAGLPPPPKKWKGTCEFRSIAGGGCNNKVIGARAFGSAAVNNTAPPVDDAGHGTHTASTAAGNFVQNADVRGNAHGTASGMAPHAHLAIYKVCARSRCSIMDIIAGLDAAVKDGVDVLSFSISATDGAQFNYDLIAVATFKAMEHGIFVSAAAGNDGPVAGTIRNGAPWMLTVAAGTTDRTIRTTVRLGNGQEFDGESLFQPRNNTAGRQLPIVFPGRNGDPDARDCSTLVEAEVRGKVVLCESRSIGEHVEQGQMVSAYGGAGMILMNKAAEGYTTFADAHVLPASHVSYAAGSKIAAYVKSTPKPTATITFRGTVMGSSPAPSVAFFSSRGPNKASPGILKPDITGPGMNILAAWAPSEMHPEFVDDVSLTFFMESGTSMSTPHLSGIAAIIKSLHPTWSPAAIKSAIMTSSSTADHAGVPIKDEQYRRASFYSMGAGYVNPSRAVDPGLVYDLGTNEYIAYLCGLGLGDDGVKEITGRRIACAKLKAITEAELNYPSLVVKLLSQPITVRRTVTNVGRANSVYTAVVDMPKGVSVVVRPPMLRFSRVNEKQSFTVTVRWNGQPAVAGAEGNLKWVSNEHVVRSPIVIPPAKAVA

SEQ ID NO: 81671 - protein, 443 aa, Setaria italica
  Transcript Sequence Number=SeqID_15697
  Gene Ontology: Mol. function=ATP-dependent helicase activity; Cellular component=intracellular; Biological process=regulation of transcription, DNA-dependent
  Homolog annotation: Hit_ID=B9RLP5; Match level="QueryCoverage=99%, HitCoverage=56%, E-value=0.0, Identity=64%"; Hit description =Activating signal cointegrator 1 complex subunit 3, helc1, putative
  Pfam annotation: Domain name=DEAD; Domain location=101-272; Score =119.8; E_value=8.8e-33; Accession=PF00270.21; Description=DEADDEAH box helicase
  Pfam annotation: Domain name=Helicase_C; Domain location=381-443; Score=2.2; E_value=0.03; Accession=PF00271.23; Description=Helicase conserved C-terminal domain
  Pfam annotation: Domain name=ResIII; Domain location=97-242; Score= -24.2; E_value=0.0057; Accession=PF04851.7; Description=Type III restriction enzyme, res subunit
  Pfam module annotation: Pfam domain module=DEAD::Helicase_C::ResIII; Domain location=101-272::381-443::97-242
LKNDTIYHSELFTLTKKMARGIPSKISFNVPIFEPHPPQYYIRAISDSWLHAESLFTVSFHNLTLPQTQITHTELLDLKPLPLSALGNKTYEDLYRFSHFNPIQTQSFHVLYHTDNNVLLGAPTGSGKTISAELAMLHLFNTQPDMKVVYIAPLKAIVRERMNDWRKRLVTQLGKKMVEMTGDFTPDLMALLSADIIISTPEKWDGISRSWHSRSYVMKVGLMILDEIHLLGADRGPILEVIVSRMRYISSQTERSIRFVGLSTALANARDLADWLGVTDDGLFNFKPSVRPVPLEVHIQGYPGKFYCPRMNSMNKPAYAAICSHSPNKPVLIFVSSRRQTRLTALDIIQLAASDEKPRQFLSMADNSLDMVLSQVSDSNLRHTLQFGIGLHHAGLNDRDRSLVEELFSNNKIQVLVCTSTLAWGVNLPAHLVIIKGTEYYDG

SEQ ID NO: 81672 - protein, 103 aa, Setaria italica
  Transcript Sequence Number=SeqID_15698
  Subcellular localization annotation: CTP_CleavageSite=65; ConfidenceScore=5.90e-01
GRVPTPAGSTGRRGPRSTERRPATPSRLSSGSSRPTTPSRISAPTSPSSAPSSPSSSSSSSSTPVRDAVSETQSAPRRLSGGRAPDGLWPSMRSLSSTFQLES

SEQ ID NO: 81673 - protein, 100 aa, Setaria italica
  Transcript Sequence Number=SeqID_15699
ADGVRMKGVEGAGAGAGDEEERNEEVREELELGLSLGRRGWHLPPRQEPAPRSLNWTAVLPEWNPDAAAGSSRAGERASGVPPIPSLGFHDMFGGILDDP

SEQ ID NO: 81674 - protein, 154 aa, Setaria italica
  misc_feature (10)..(10): Xaa can be any naturally occurring amino acid
  Transcript Sequence Number=SeqID_15700
  Gene Ontology: Mol. function=sequence-specific DNA binding; Cellular component=chloroplast; Biological process=DNA recombination
  Homolog annotation: Hit_ID=B6T9M5; Match level="QueryCoverage=94%, HitCoverage=49%, E-value=7e-75, Identity=91%"; Hit description =Translin
  Pfam annotation: Domain name=Translin; Domain location=1-142; Score =31.3; E_value=6e-08; Accession=PF01997.8; Description=Translin family
AEVLKECPGXQYYRYHGDWRSETQAVVSMLAFMHWLETDGLLMHTDAQEKLGLSSGEFCLDVEDYLTGLCFMSNEFPRFVVNRVTAGDYDCPRKVLSFLTDLHASFRMLNLRNDFLRKKFDGMKYDLRRVEEVYYDVKIRGLVPAEPKQEAAQS

SEQ ID NO: 81675 - protein, 86 aa, Setaria italica
  Transcript Sequence Number=SeqID_15701
  Gene Ontology: Mol. function=oxidoreductase activity; Biological process=oxidation reduction
  Homolog annotation: Hit_ID=B6TRS7; Match level="QueryCoverage=100%, HitCoverage=26%, E-value=7e-24, Identity=62%"; Hit description =Carbonyl reductase 3
VTDASSIARLAEFLKTRFGRLDILVNNAAISGVELVDDPSFGPKPVGEQFNGMDWHQRIGWMYKNSRETYSTAKEGLRTNYYGTKH

SEQ ID NO: 81676 - protein, 88 aa, Setaria italica
  misc_feature (37)..(37): Xaa can be any naturally occurring amino acid
  misc_feature (43)..(43): Xaa can be any naturally occurring amino acid
  misc_feature (72)..(72): Xaa can be any naturally occurring amino acid
  Transcript Sequence Number=SeqID_15702
  Subcellular localization annotation: CTP_CleavageSite=39; ConfidenceScore=5.30e-01
VWPTSPSPPPAPPSRARRRRPHPVAPGATPAAPAASXPEADEXSARRGPPPDPPPLPTPPPTPPCEPPPGTXPPSARPPARCSLFLWM

SEQ ID NO: 81677 - protein, 253 aa, Setaria italica
  misc_feature (72)..(72): Xaa can be any naturally occurring amino acid
  misc_feature (118)..(118): Xaa can be any naturally occurring amino acid
  misc_feature (152)..(152): Xaa can be any naturally occurring amino acid
  misc_feature (221)..(221): Xaa can be any naturally occurring amino acid
  Transcript Sequence Number=SeqID_15703
  Gene Ontology: Mol. function=RNA-directed DNA polymerase activity; Biological process=RNA-dependent DNA replication
  Homolog annotation: Hit_ID=Q53PH7; Match level="QueryCoverage=83%, HitCoverage=25%, E-value=4e-30, Identity=36%"; Hit description =Retrotransposon protein, putative, unclassified
LKGNSSCKLRIRTSSLISKALQNGKLSYSFPNPAPATEGGSQFWTRLNKVKDWYKFGRVIVIGDGKRTRFWXDVWSGQYAFKILYPRLYRICSEADISVEEHDVEAPTFRRDFGEAGXELHEALENVELTDQKYIASWKLEKYGRYSTRSLXRLIIDPGCVELRITDIWNTRLALKVKIFLWMLWKDKIQTALQLKKRNLDGPIHCKLSGKVEGVNHLVFXPLVVFVRSWVRDALGWDSTSTGLRQFDEKFKW

SEQ ID NO: 81678 - protein, 842 aa, Setaria italica
  Transcript Sequence Number=SeqID_15704
  Gene Ontology: Mol. function=protein dimerization activity
  Homolog annotation: Hit_ID=Q01MM8; Match level="QueryCoverage=100%, HitCoverage=100%, E-value=0.0, Identity=57%"; Hit description =H1005F08.16 protein
  Pfam annotation: Domain name=hATC; Domain location=728-819; Score =33.3; E_value=9.8e-07; Accession=PF05699.6; Description=hAT family dimerisation domain
MKRKGSAATDLRIFMARAAAKKRQPEPENVNQSCNESQMQLVLFQGQSGSKTSTVPHEPVRSNQPPENGTTEDGESIPVEDNDSSDEDKNDYGIEHDPGLRAPISSYDVNDQDSVRRAYIALGPCQPKMKRDAFPQHDCGGMRRFQHKWFAEFKWIEYSVDKDAAFCFVCYLFKDNCKFPGGDAFVVEGFRNWNMKKRIHRHVGAINSAHSEAEEKYRLFTRPKASIRESVASNTAQFKAKYLARLTWSLKCIRFLLRQGLAFRGHDETKDSLNKGNFRELLAWLAGNFEEVNLVVLENALQNCQMIDHKIQKQLIDACAHETTKFIIDELGDECFAILADESSDAYLLEQLALCLRFVNKKGEPVERFLGLVQVEDTTSLTLKEAIQSLLIKYQLPLSKVRGQGYDGASNMKGHVNGLKKLIMDESPSAYYVHCFAHQLQLTLVAVAKENTDCDWFFGQLAYLLNVLGMSCKKIRMLRIAQAEYMIEALNLGEIETGQGLNQEMGLARPGDTRWGSHYRTVMHVMFLYPSIKKVLFRIGNESKGAEANGAQTMLTVFKSFEFVFLLHLMNEIFEYINDLCNALQKREQDIVNAMDLLEFTKVELDVLRQDSGWQEFLTKVTSFCEKHNVIVVDMNGKYIPMQRSRQFYRGAINYHRFHADMFLGVIDKQVQELNNRFDEVNTNLLRCMASFSPANSFSAFNVENLVKLAGFYPHDFEFQEIHQLHFQLHHYINDVRNDENFKNLRSLAELSMMLVKQGKVSRYEIIYKLLKLVLVLPVATAGVERVFSIMNLIKNKRRSKMGQKYLNGCLVTLIEREFFMQAKDKDIIAHFQSIAERKVVL

SEQ ID NO: 81679 - protein, 110 aa, Setaria italica
  misc_feature (31)..(31): Xaa can be any naturally occurring amino acid
  Transcript Sequence Number=SeqID_15705
  Gene Ontology: Mol. function=zinc ion binding; Cellular component =histone deacetylase complex; Biological process=negative regulation of microtubule depolymerization
  Homolog annotation: Hit_ID=B4FWF5; Match level="QueryCoverage=97%, HitCoverage=57%, E-value=2e-50, Identity=86%"; Hit description =Histone deacetylase 6
  Pfam annotation: Domain name=zf-UBP; Domain location=7-79; Score =71.3; E_value=3.7e-18; Accession=PF02148.11; Description=Zn-finger in ubiquitin-hydrolases and other protein
PPPDSPCSRCHHPAENWLCLICKDVLCSRFXNKHMLCHYQETGHCLALSFSDLSVWCFACDSYLDVQAILELRPVYEVAHLLKFGERPPFRSLEVLDLSTGENRSSSSGA

SEQ ID NO: 81680 - protein, 84 aa, Setaria italica
  Transcript Sequence Number=SeqID_15706
  Subcellular localization annotation: CTP_CleavageSite=36; ConfidenceScore=5.67e-01
MAMKALPLTPSKSSSFGAQQTIPSFRPSAASPRSVRAYAKGDEEGNKQSLFGSITEALDFSQVRSEKDAELLYEAREKTKGGGR

SEQ ID NO: 81681 - protein, 82 aa, Setaria italica
  misc_feature (18)..(18): Xaa can be any naturally occurring amino acid
  Transcript Sequence Number=SeqID_15707
  Homolog annotation: Hit_ID=Q6EPK9; Match level="QueryCoverage=100%, HitCoverage=11%, E-value=6e-19, Identity=56%"; Hit description =Ankyrin-like protein
LLKADSKLATFPEQGTSXRVYLAVLLEQDAIAQTLHDMSEDNNISYSGPSGQNALHAAVLRRPGLATKLLEWNNSLTTKKDR

SEQ ID NO: 81682 - protein, 205 aa, Setaria italica
  Transcript Sequence Number=SeqID_15708
  Gene Ontology: Mol. function=protein serine/threonine kinase activity; Cellular component=cytosol; Biological process=protein amino acid phosphorylation
  Homolog annotation: Hit_ID=B9RJ96; Match level="QueryCoverage=100%, HitCoverage=25%, E-value=2e-98, Identity=80%"; Hit description=Dual specificity protein kinase-ttk, putative
  Pfam annotation: Domain name=Pkinase; Domain location=3-205; Score =7.9; E_value=5.8e-09; Accession=PF00069.17; Description=Protein kinase domain
LISSDCTIYAMKKIKLRGRDYPTAYGFCQEIEYLNKLKGKSNIIQLIDYEVTDKSLLLEGSMSPRDGTIKDDHYIYMVLEYGEIDLAHMVAQKWKERNNSNMKIDENWLRFYWQQMLEAVNTIHDERIVHSDLKPANFMLVRGSLKLIDFGIAKAIMNDTTNIRRDAQVGTLNYMSPEAFMCDDTDSGGNIIKCGRPSDIWSLGC

SEQ ID NO: 81683 - protein, 211 aa, Setaria italica
  misc_feature (166)..(166): Xaa can be any naturally occurring amino acid
  Transcript Sequence Number=SeqID_15709
PTSNCTAIGRAMTQIGVCLKDVLREMNELPISDSGDATAEKSSNGVADTTSCSDRDEILSDLDMDDDDDFTEEEIAVAKLIVTVVSDSLVVVKEAIRFVTGLLKSSGNKNGANEDKVEPMERLLGHCKEIADQVNDLGACVYPPQDASEMKLAVKRLYGGINGMRXEIGHLGGSPANAFAALEGFEKCLGSLEAELADDVVNEMENLTISH

SEQ ID NO: 81684 - protein, 148 aa, Setaria italica
  Transcript Sequence Number=SeqID_15710
  Gene Ontology: Mol. function=acid phosphatase activity
  Homolog annotation: Hit_ID=C4PKL7; Match level="QueryCoverage=100%, HitCoverage=26%, E-value=2e-78, Identity=89%"; Hit description =Chloroplast purple acid phosphatase isoform c
SFNAGGIHFIMLGAYVDYNHTGAQYSWLEKDLQRVDRRVTPWVVAAWHPPWYNSYSSHYQEFECMRQEMEDLLYRHRVDIVFSGHVHAYERMNRVFNYTLDPCGPVYITIGDGGNIEKIDIDHADDAGKCPSPGDNHPEIGGVCHLNF

SEQ ID NO: 81685 - protein, 95 aa, Setaria italica
  Transcript Sequence Number=SeqID_15711
  Subcellular localization annotation: CTP_CleavageSite=37; ConfidenceScore=5.15e-01
MPRIPLIKFPKRNLKAPSPSAPAASQPADQHATLMSRLGAKVEAPPSGEIKNYRFRSDVPSPPSHTAVGGPASLLPKRKPLTEEEIEAIMLGGSI

SEQ ID NO: 81686 - protein, 82 aa, Setaria italica
  Transcript Sequence Number=SeqID_15712
  Subcellular localization annotation: CTP_CleavageSite=76; ConfidenceScore=5.49e-01
MRPLIRTARCCLLRARVRAMATLPMASPAAVAAAISSSSSSSSRPLFSSTRPNRLLLARFFPAAPAPAPAGARGLRTSAAAA

SEQ ID NO: 81687 - protein, 60 aa, Setaria italica
  Transcript Sequence Number=SeqID_15713
  Gene Ontology: Mol. function=electron carrier activity; Biological process=metabolic process
  Homolog annotation: Hit_ID=B6TIK9; Match level="QueryCoverage=75%, HitCoverage=13%, E-value=4e-13, Identity=79%"; Hit description=NAD -dependent dyhydrogenase, Gfo/Idh/MocA family
KCFTVTNSRCLDCPYCDNFAWQGGFILDMGVHFIAGLRMLVGSEITSVSSISRHVDMSCS

SEQ ID NO: 81688 - protein, 332 aa, Setaria italica
  Transcript Sequence Number=SeqID_15714
  Gene Ontology: Mol. function=electron carrier activity; Cellular component=cytoplasm; Biological process=metabolic process
  Homolog annotation: Hit_ID=B6TIK9; Match level="QueryCoverage=100%, HitCoverage=91%, E-value=1e-178, Identity=90%"; Hit description=NAD -dependent dyhydrogenase, Gfo/Idh/MocA family
  Pfam annotation: Domain name=GFO_IDH_MocA; Domain location=12-140; Score=21.0; E_value=3.1e-05; Accession=PF01408.14; Description =Oxidoreductase family, NAD-binding Rossmann fold
  Pfam annotation: Domain name=GFO_IDH_MocA_C; Domain location=161-267; Score=11.1; E_value=0.077; Accession=PF02894.9; Description =Oxidoreductase family, C-terminal alphabeta domain
  Pfam module annotation: Pfam domain module=GFO_IDH_MocA::GFO_IDH_MocA_ C; Domain location=12-140::161-267
MAGDGDGRAGLPRIAVVGAGIFARTQYIPRLREIAHLVVLKAIWSRTQESAKAAAELARDFAPEIECKWGDAGLEEIMGDSSIMGVAVVLAGQVQVELSLKMLKAGKHVIQEKPASGSTTEAETALSIYNSFPNQFPYKPIWALGENYRFEPAFVESSKLIKDIGDMMNIQVIIEGSMNSSNPYFNSSWRRNFVGGFILDMGVHFIAGLRMLVGSEITSVSSISRHVDMSLPPPDNICSLFQLENGCAGVFVFAVNSRSPKILWRVDGTKGTIQVERGVDSGKHGYQVLFSGENGQCQKTFYPFCGVNEELKTFVQDMLAASKDGDHKAEPR

SEQ ID NO: 81689 - protein, 126 aa, Setaria italica
  Transcript Sequence Number=SeqID_15715
  Gene Ontology: Mol. function=electron carrier activity; Biological process=metabolic process
  Homolog annotation: Hit_ID=B6TIK9; Match level="QueryCoverage=99%, HitCoverage=34%, E-value=2e-64, Identity=93%"; Hit description=NAD -dependent dyhydrogenase, Gfo/Idh/MocA family
CSQLENGCAGVFVFAVNSRSPKILWRVDGTKGTIQVERGVDSGKHGYQVLFSGENGQCQKTFYPFCGVNEELKTFVQDMLAASKDGDHKAEPRSSYVEGARDVAVLEAMLESSVKQGTPVQVKRFP

SEQ ID NO: 81690 - protein, 133 aa, Setaria italica
  Transcript Sequence Number=SeqID_15716
  Gene Ontology: Mol. function=ATP-dependent DNA helicase activity; Cellular component=DNA-dependent protein kinase complex; Biological process=double-strand break repair via nonhomologous end joining
  Homolog annotation: Hit_ID=B9S6B3; Match level="QueryCoverage=93%, HitCoverage=20%, E-value=6e-46, Identity=65%"; Hit description=Ku P70 DNA helicase, putative
LKVNLILLTLRPSTFIYPSDEHIFGSTRVFVALHSSMLRLGRFALAFYGNPTRPQLVALVAQEEVTSSAGQVEPPGMHMIYLPYSDDIRYPEEVHVTSDEAPRATDEQIKKASSLLKRIDLKNFSVCQFANPA

SEQ ID NO: 81691 - protein, 104 aa, Setaria italica
  misc_feature (77)..(77): Xaa can be any naturally occurring amino acid
  Transcript Sequence Number=SeqID_15717
  Gene Ontology: Mol. function=ATP-dependent DNA helicase activity; Cellular component=DNA-dependent protein kinase complex; Biological process=double-strand break repair via nonhomologous end joining
  Homolog annotation: Hit_ID=Q7F1L9; Match level="QueryCoverage=62%, HitCoverage=19%, E-value=2e-24, Identity=78%"; Hit description =Putative DNA-dependent protein kinase 70 kDa DNA-binding subunit Ku70
EKNDEKRRVKPLSFAITNDVCIEVNTYALTHPTTTGTITWLDSVSNIPLKTERSFICNDTGALLQDPQMCFQMYNDXKFSIRELPEVKRVSSHHLRLISAEYGR

SEQ ID NO: 81692 - protein, 246 aa, Setaria italica
  misc_feature (61)..(61): Xaa can be any naturally occurring amino acid
  misc_feature (209)..(209): Xaa can be any naturally occurring amino acid
  misc_feature (231)..(231): Xaa can be any naturally occurring amino acid
  Transcript Sequence Number=SeqID_15718
  Gene Ontology: Mol. function=ATP-dependent DNA helicase activity; Cellular component=DNA-dependent protein kinase complex; Biological process=double-strand break repair via nonhomologous end joining
  Homolog annotation: Hit_ID=B9S6B3; Match level="QueryCoverage=99%, HitCoverage=38%, E-value=9e-91, Identity=64%"; Hit description=Ku P70 DNA helicase, putative
  Pfam annotation: Domain name=Ku; Domain location=70-243; Score=107.2; E_value=5.4e-29; Accession=PF02735.8; Description=Ku70Ku80 beta -barrel domain
WDAQDLGLSIELLPLSWPDEEFNMSLFYADLIGLDGGEITEYLPSAGEKLEDMTDQLRKEXDEKRRVKPLSFAITNDVCIEVNTYALTHPTTTGTITWLDSVSNIPLKTERSFICNDTGTLLQDPQMRFQMYNDTVVKFSVRELSEVKRVSSHHLRLIGFKPLDCLKDYHNLRPSTFIYPSDEHIFGSTRVFVALHSSMLRLGRFALAXFYGNPTRPQLVALVAQEEVTSXAGQVEPPGMHMIYLP

SEQ ID NO: 81693 - protein, 171 aa, Setaria italica
  misc_feature (43)..(43): Xaa can be any naturally occurring amino acid
  misc_feature (52)..(52): Xaa can be any naturally occurring amino acid
  misc_feature (88)..(88): Xaa can be any naturally occurring amino acid
  misc_feature (110)..(110): Xaa can be any naturally occurring amino acid
  misc_feature (130)..(130): Xaa can be any naturally occurring amino acid
  Transcript Sequence Number=SeqID_15719
  Gene Ontology: Mol. function=ATP-dependent DNA helicase activity; Cellular component=DNA-dependent protein kinase complex; Biological process=double-strand break repair via nonhomologous end joining
  Homolog annotation: Hit_ID=B9S6B3; Match level="QueryCoverage=71%, HitCoverage=19%, E-value=2e-26, Identity=54%"; Hit description=Ku P70 DNA helicase, putative
PNLLLLSKEILASGGPLKDKLTFFVGKVLRLHFYGNPTRPQLXALVVQEEVXTGQVEPPGMHMIYLPYSADIRYPEEVHMTSDEAPRXATDEQIKKASDQCVSIDLKNFXSVCQFANPALQRHYGILEAXLTLGEDEMPDIKDETLPDEEGLARYLFSFWLFVHAKHDTER

SEQ ID NO: 81694 - protein, 111 aa, Setaria italica
  Transcript Sequence Number=SeqID_15720
RAARPRRRDDGGRREGRGGDAEPLLEVVDEAAGLLEREPGDGVPELQDLGGLCGGGRDSDGAAAPARDGDGGPRERGGGGRGGGGAGEEGEGGGEGGGRHGDLLGELGPRE

SEQ ID NO: 81695 - protein, 161 aa, Setaria italica
  misc_feature (151)..(151): Xaa can be any naturally occurring amino acid
  Transcript Sequence Number=SeqID_15721
  Gene Ontology: Mol. function=metal ion binding
  Homolog annotation: Hit_ID=B6TI99; Match level="QueryCoverage=100%, HitCoverage=63%, E-value=3e-66, Identity=78%"; Hit description=PHD finger protein
MDMAPASISSNPRSVEEIYKDFSARRAGLVRALTSDVDDFYSACDPDKENLCLYGLPNGTWAVAPPAEEVPPEMPEPALGINFARDGMQRRDWLSLVAVHSDSWLISVAFFFGARLNANDRKRLFSMVSDLPSVFEAFSDRKHGRDRSGVXDSSGKSRHSS

SEQ ID NO: 81696 - protein, 252 aa, Setaria italica
  misc_feature (111)..(111): Xaa can be any naturally occurring amino acid
  Transcript Sequence Number=SeqID_15722
  Gene Ontology: Mol. function=metal ion binding
  Homolog annotation: Hit_ID=B6TI99; Match level="QueryCoverage=100%, HitCoverage=98%, E-value=5e-90, Identity=66%"; Hit description=PHD finger protein
  Pfam annotation: Domain name=C1_3; Domain location=197-227; Score =12.5; E_value=0.02; Accession=PF07649.4; Description=C1-like domain
  Pfam annotation: Domain name=PHD; Domain location=198-248; Score =49.3; E_value=1.5e-11; Accession=PF00628.21; Description=PHD-finger
  Pfam module annotation: Pfam domain module=C1_3::PHD; Domain location= 197-227::198-248
PAYQYYVPNPTTTVRRKILTKDFSARRAGLVRALTSDVDDFYSACDPDKENLCLYGLPNGTWAVAPPAEEVPPEMPEPALGINFARDGMQRRDWLSLVAVHSDSWLISVAXFFFGARLNANDRKRLFSMVSDLPSVFEAFSDRKHGRDRSGVDSSGKSRHSSKRGSDGHTKNSRAAAPPAKEYDDDDDEDDEEHTETFCGTCGGLYNSNEFWIGCDICERWFHGKCVRITPARADHIKHYKCPDCSSKKMRQ

SEQ ID NO: 81697 - protein, 82 aa, Setaria italica
  Transcript Sequence Number=SeqID_15723
  Gene Ontology: Mol. function=transporter activity; Cellular component= membrane; Biological process=transport
  Homolog annotation: Hit_ID=Q84LR1; Match level="QueryCoverage=100%, HitCoverage=15%, E-value=6e-31, Identity=80%"; Hit description=Root -specific metal transporter
ELPFALIPLLKFSSSSSKMGPHKNSIYIIVFSWLLGLMIIGINMYFLSTSFVGWLIHNSLPKYANVLVGLVVFPLMLIYMLA

SEQ ID NO: 81698 - protein, 54 aa, Setaria italica
  Transcript Sequence Number=SeqID_15724
ITQRCHVAIIRLLYKMYLPIVVKQKHTTSATSQRSIDNYHLTFFTIFFVEFFEI

SEQ ID NO: 81699 - protein, 65 aa, Setaria italica
  Transcript Sequence Number=SeqID_15725
  Gene Ontology: Mol. function=N-acetyltransferase activity; Biological process=metabolic process
  Homolog annotation: Hit_ID=Q2R3D8; Match level="QueryCoverage=98%, HitCoverage=28%, E-value=2e-16, Identity=71%"; Hit description =Acetyltransferase, GNAT family protein, expressed
MSAAATSCGAPSPSYASGPGGEDGEITYVSYGGEQHLPLVMSLVDAELSEPYSIFTYRYFVYLWP

SEQ ID NO: 81700 - protein, 174 aa, Setaria italica
  Transcript Sequence Number=SeqID_15726
  Gene Ontology: Cellular component=plasma membrane
  Homolog annotation: Hit_ID=Q54UB0; Match level="QueryCoverage=80%, HitCoverage=80%, E-value=8e-19, Identity=36%"; Hit description =Transmembrane protein 208 homolog
  Pfam annotation: Domain name=DUF788; Domain location=1-170; Score =293.7; E_value=4.1e-85; Accession=PF05620.3; Description=Protein of unknown function (DUF788)
MAKQGAKKMKDENKKRLDLLLRIILISNVIYIVVRMAIMHSSFTWKHWIGLMLTSAAYFFPYKQLASMAKPVYSDNGELLDGGFDLSTGGVCEYLYDVIYITVFVQLMSIISEKFWWTYLVIPAFAGYKIFGLLRGTFFSGGSEGEVEDEKTRKKREKMEKKASRGKMIKTRAR

SEQ ID NO: 81701 - protein, 43 aa, Setaria italica
  Transcript Sequence Number=SeqID_15727
  Gene Ontology: Mol. function=protein binding
  Homolog annotation: Hit_ID=B6SU73; Match level="QueryCoverage=100%, HitCoverage=28%, E-value=3e-17, Identity=100%"; Hit description =Cytochrome c-type biogenesis protein cycL
MAAEEDVKQRQIIENRARNISHNVRCTECGSQSIEDSQADVAI

SEQ ID NO: 81702 - protein, 70 aa, Setaria italica
  Transcript Sequence Number=SeqID_15728
  Subcellular localization annotation: CTP_CleavageSite=53; ConfidenceScore=5.03e-01
SVYSIQLARDSAWHRRTAHYPLWMRGNRSTITQGRMRRLPPAERPPDAPPLPLAARRAAVAPRRPTRRRS

SEQ ID NO: 81703 - protein, 61 aa, Setaria italica
  Transcript Sequence Number=SeqID_15729
  Gene Ontology: Mol. function=protein binding
  Homolog annotation: Hit_ID=B6SU73; Match level="QueryCoverage=100%, HitCoverage=40%, E-value=1e-27, Identity=100%"; Hit description =Cytochrome c-type biogenesis protein cycL
MAAEEDVKQRQIIENRARNISHNVRCTECGSQSIEDSQADVAILLRKLIRDEIKAGKSDKE

SEQ ID NO: 81704 - protein, 70 aa, Setaria italica
  Transcript Sequence Number=SeqID_15730
PNICNVLHGSSRICCVTEATHFYLLLSVLAAACCFCEQDGLKPVDELTRLSLIPLYSQNSKITTFHCLLK

SEQ ID NO: 81705 - protein, 160 aa, Setaria italica
  misc_feature (139)..(139): Xaa can be any naturally occurring amino acid
  Transcript Sequence Number=SeqID_15731
  Gene Ontology: Mol. function=catalytic activity; Cellular component =integral to membrane; Biological process=negative regulation of transcription
  Homolog annotation: Hit_ID=B6TCV9; Match level="QueryCoverage=100%, HitCoverage=39%, E-value=9e-86, Identity=93%"; Hit description=LanC -like protein 2
  Pfam annotation: Domain name=LANC_like; Domain location=1-160; Score=- 36.4; E_value=6.9e-06; Accession=PF05147.5; Description=Lanthionine synthetase C-like protein
LWACLFLNKHLSEKTIPLEHINSVAKDIIREGRKLSSKGSSPLMYEWHGKKYWGAAHGLAGIMHVLMHTELKLDEQDDVKNTLRYMIKNRFPSGNYPSSEGNESDRLVHWCHGAPGVALTLAKAYEVFHDDHFKQSAAXAAEVVWNRGLLKRVGICHGVS

SEQ ID NO: 81706 - protein, 136 aa, Setaria italica
  misc_feature (21)..(21): Xaa can be any naturally occurring amino acid
  Transcript Sequence Number=SeqID_15732
IPLSFPPEQIPLPPPPPSSAXDLLPLPSIPAAVPASLPLDLVFRLADLRVLVVWASLDLRGRCPSPPPPPSPPPVPLQRCAPLLLAPCRFSSLVEPLTTIGSAEVVFYSVGAVFIFTFGSPATLFNSALYIQPKPL

SEQ ID NO: 81707 - protein, 221 aa, Setaria italica
  Transcript Sequence Number=SeqID_15733
  Gene Ontology: Cellular component=membrane
  Homolog annotation: Hit_ID=B9T353; Match level="QueryCoverage=54%, HitCoverage=54%, E-value=3e-18, Identity=47%"; Hit description =Transmembrane protein 14, putative
  Pfam annotation: Domain name=Tmemb_14; Domain location=101-204; Score= 9.0; E_value=0.00017; Accession=PF03647.5; Description=Transmembrane proteins 14C
  Subcellular localization annotation: CTP_CleavageSite=22; ConfidenceScore=5.63e-01
MAAAAAQLHGSAAAAATYRRTRAYSVPSSCRWLRTPLAASPKLSISSTEVGMKPLGFAAKLSTNENARVEELNLQSDQMKEFVQAEGHVIPQKRSAKIHDFCLGIPFGGLLFSMGLLGYIFSRSTISLVLGVAPGFATLLLGTLSLKFWRSGRSSFLFILAQAAISASLAWKYSHAYFLTNRLLPWGFYASLSTAMTCFYGYVLLAGGNPPPKKLAAIPQQ

SEQ ID NO: 81708 - protein, 756 aa, Setaria italica
  misc_feature (135)..(135): Xaa can be any naturally occurring amino acid
  Transcript Sequence Number=SeqID_15734
FYVNKSTDAENLTHPGDNPGSSDCDMAHVHEEDGTDAVINSKDCLITCANSSSAETFYISGVAPQVPVASSECHKPGVTDADSIVDSRENDHGKVASNIYSEHCYETDTSRISENLAGVGKIDVEEDDSQYEDVXLRESGDRYWVGDGYEEVKPANWHYQVSDYKNGEAIPGLAPLPVDSVAKNVGIPVSSYNETQSRKEDVPVSPISSKRSWLTNCLDGGPVTDGKAQSIHSRGDTQMYGINPGRVAVGSAAIVSQSERCNDGLGDDLSSIRMKNTGWDMLPEDQKHSRHDPRDGADSSNRCVLSSLDAAGDDESLRKIGLSNKDVQRVEQQKSFDRPQRNGLSRSDDGYGSGSKAERPIDSHRSHGIYDASRHIQTGNRGQWMENSKHPRSARRKSPEYYNYGPSGPRNAAEAAVAKMESNGFVVAPDGTLVRAVDAANAGQMTRRMRNTSSGSYRSLSGRGSPIDRDGACGMSRGPVHARESSPERHFGANGNRSGRYGPEMEKDHSTDGNLSSVRCSLPNRQRGIPTGRASLNLSRAHSRSPSGSRSRSPHDWASPRNRRKIIANGGSALRRNSRSPPNHMAKVRMGRMASPKRQPGYDDRSMRYSPSRNHTYSQHASTWVDGRNGSTVDLSDHNKRYSRRSPPSRITSRNDRFDVMDSQGRSRSGEFYRSTQGRLPYGYDRANKHDGNGDDQREYADRYGNHSVKPYDRDGAVKQFRNNTGDKFRTRISAPRSPEPQRRVSPRRFDRSFER

SEQ ID NO: 81709 - protein, 92 aa, Setaria italica
  Transcript Sequence Number=SeqID_15735
  Subcellular localization annotation: CTP_CleavageSite=55; ConfidenceScore=5.35e-01
EQLLGTFPSNCVEGDQGLPWLIQASNAFYSHSNASSSTFSSTNSNSSGSLTFVVPSEYGGYCLSDSNEALDLNSCTAPMHLHMLQEQGAAQF

SEQ ID NO: 81710 - protein, 119 aa, Setaria italica
  Transcript Sequence Number=SeqID_15736
  Gene Ontology: Mol. function=binding; Cellular component=integral to membrane; Biological process=transport
  Homolog annotation: Hit_ID=B6TE30; Match level="QueryCoverage=92%, HitCoverage=28%, E-value=5e-39, Identity=75%"; Hit description =Mitochondrial carrier protein
  Pfam annotation: Domain name=Mito_carr; Domain location=21-111; Score= 61.3; E_value=3.7e-15; Accession=PF00153.19; Description =Mitochondrial carrier protein
REGAFQAAAMVGGGKPLGDSVFAGHAAAGAAAISASTVAVHPLDTVKTLIQLGAAGKKQKMGLRQVVDRLMAASGPAGFYSGIGWSIMGKLPGLGARFGTYEFLTAFYKDGREDNYVYY

SEQ ID NO: 81711 - protein, 213 aa, Setaria italica
  Transcript Sequence Number=SeqID_15737
  Gene Ontology: Mol. function=hydrolase activity
  Homolog annotation: Hit_ID=B9R7H1; Match level="QueryCoverage=100%, HitCoverage=20%, E-value=7e-90, Identity=71%"; Hit description =Hydrolase, putative
RNILTHRYPYPHEHSRHFMIAVFACWLFFISSDNLQNLIMKLDKNFKWWSMYACLIGFFYFFSSPFIRKTIKPNYSNFNRWYIAWIFLAALYHLPSFQSMGLDLRMNLSLFLTIYISSLIFLMVFHIIFLGLWYLGLVSRMAEKKPELLTIIQNCAVISIACCVFYSHCGNRTVSRDKSIDRRTASWIAFSLWTKHDDNTLISRLLRMHKFKE

SEQ ID NO: 81712 - protein, 292 aa, Setaria italica
  Transcript Sequence Number=SeqID_15738
  Gene Ontology: Mol. function=phosphotransferase activity, phosphate group as acceptor; Cellular component=chloroplast; Biological process=nucleobase, nucleoside, nucleotide and nucleic acid metabolic process
  Homolog annotation: Hit_ID=B9SGC7; Match level="QueryCoverage=80%, HitCoverage=79%, E-value=1e-109, Identity=79%"; Hit description =Adenylate kinase 1 chloroplast, putative
  Pfam annotation: Domain name=ADK; Domain location=64-258; Score =167.0; E_value=5.4e-47; Accession=PF00406.14; Description=Adenylate kinase
  Subcellular localization annotation: CTP_CleavageSite=35; ConfidenceScore=5.23e-01
MAAVQRLLRAAASGGAATAVARRRMASLAQEQAPSAAAAQKGFPFAAERMRGLPAAERNVQWVFLGCPGVGKGTYASRLSRLLGVPHIATGDLVRDELASTGPLAAQLAEIVNQGKLVSDEIIFNLLSKRLKKGEDQGESGFILDGFPRTVKQAEILDGVTDIDMVVNLKLREDVLVEKCLGRRICSQCGKNFNVACIDVKGENGLPAIYMAPLLPPNNCMSKMTTRADDTEEVVRNRLRIYNDMSQPVEDFYRDQGKLLEFDLPGGIPESWPKLLHVLNLEDQEELKLAAA

SEQ ID NO: 81713 - protein, 45 aa, Setaria italica
  Transcript Sequence Number=SeqID_15739
QVHQAFLNYVKILNESPAMQKKYREAAKGSLSCCVCGRFVFLCLH

SEQ ID NO: 81714 - protein, 392 aa, Setaria italica
  misc_feature (310)..(310): Xaa can be any naturally occurring amino acid
  Transcript Sequence Number=SeqID_15740
  Pfam annotation: Domain name=XS; Domain location=240-344; Score= -40.9; E_value=0.044; Accession=PF03468.6; Description=XS domain
  Subcellular localization annotation: CTP_CleavageSite=68; ConfidenceScore=5.03e-01
CFSRLALLHFFFFFFIDFYQFISPYSDILTYGRPKHIPMSQRLSRPSSHSQFQGTFMHGRGRGRGGLTKSAKKRLKTGPHQFHGGYVSEKNEFIKPNKFSKLSEDDPNGSGVKHEDAPENDVLPVQKDPPESSDEFSKQVHQAFLNYVKILNESPAMQKKYREAAKGSLSCCVFGSVARKFPDLDALLSHAYDTSKAGLKTKHLGFHKALCVLMGWNWLVAPDTSKAHHSISSEEVNAMRGDLMLWPPVVVIHNSSIVNKAKDTEAKVVSMEEIEGVLADIGVPREKVKVSHGRPANQSVFLVKFQPTIXGFQEAMRINDYFSSRNHGKEEFQQMRDGKGKKAAPVDNLEELLYAHIAVVEDLVYLDEEAKRRCKIRSKKEVEASADATLVT

SEQ ID NO: 81715 - protein, 174 aa, Setaria italica
  Transcript Sequence Number=SeqID_15741
  Pfam annotation: Domain name=XS; Domain location=20-124; Score=-38.1; E_value=0.024; Accession=PF03468.6; Description=XS domain
KTKNLKPNHSISSEEVNAMRGDLMLWPPVVVIHNSSIVNKAKDTEAKVVSMEEIEGVLADIGVPREKVKVSHGRPANQSVFLVKFQPTISGFQEAMRINDYFSSRNHGKEEFQQMRDGKGKKAAPVDNLEELLYAHIAVVEDLVYLDEEAKRRCKIRSKKEVEASADATLNLEP

SEQ ID NO: 81716 - protein, 207 aa, Setaria italica
  misc_feature (77)..(77): Xaa can be any naturally occurring amino acid
  Transcript Sequence Number=SeqID_15742
  Gene Ontology: Mol. function=transferase activity
  Homolog annotation: Hit_ID=B9S9V6; Match level="QueryCoverage=96%, HitCoverage=82%, E-value=5e-49, Identity=28%"; Hit description =Pentatricopeptide repeat-containing protein, putative
  Pfam annotation: Domain name=PPR; Domain location=127-161; Score =47.4; E_value=5.6e-11; Accession=PF01535.12; Description=PPR repeat
  Pfam annotation: Domain name=PPR; Domain location=162-196; Score=8.6; E_value=0.85; Accession=PF01535.12; Description=PPR repeat
  Pfam annotation: Domain name=PPR; Domain location=21-55; Score=25.1; E_value=0.0003; Accession=PF01535.12; Description=PPR repeat
  Pfam annotation: Domain name=PPR; Domain location=56-91; Score=4.6; E_ value=2.5; Accession=PF01535.12; Description=PPR repeat
  Pfam annotation: Domain name=PPR; Domain location=92-126; Score=27.5; E_value=5.3e-05; Accession=PF01535.12; Description=PPR repeat
  Pfam module annotation: Pfam domain module=PPR::PPR::PPR::PPR::PPR; Domain location=127-161::162-196::21-55::56-91::92-126
FDQSHEVLREMLQGGLQPNHTHYIALVNAKCRIGEIDGAFRLKEEMKALGVVPAEVADSSIIRGLCRCGKLEEAVIXVFSSMMRSGMVPTIATFTTLMHGLCKQSKIADALHLKRLMELCRLKVDVVSYNVLITGLCNNKCISDALDLYGEMKSKGLLPNITTYVTLTGAMYATQRMQVGEKLLEDIEERGRKPSQHSESLERRMED

SEQ ID NO: 81717 - protein, 174 aa, Setaria italica
  Transcript Sequence Number=SeqID_15743
EYRDLSQSEIQLKRDLKAQFLGLTANEKLRAKQVTSDDHQSRRGLFKAFLRAGKRQEEKNLFSNLRPDGCVVQAYRKCLLNHFRALFGQPSARSSTQNWDSRGMVSRNLDMSSAKRARQAGLEEIASVWILSGSKRSEGFWWLNVFLVLVTFETESSLLLCNSNSVMTGMLLPK

SEQ ID NO: 81718 - protein, 119 aa, Setaria italica
  Transcript Sequence Number=SeqID_15744
KTRPHRSAELRARTEPALQRGRELGRGRGGALEEMKSKGLLPNITTYVTLTRAMYATQRMQVGEKLLEDIQERGLIPSKHSESLERRMEDAIRRLNMIRNCRKGMPVKEVEVLPVESFQ

SEQ ID NO: 81719 - protein, 317 aa, Setaria italica
  misc_feature (69)..(69): Xaa can be any naturally occurring amino acid
  misc_feature (104)..(104): Xaa can be any naturally occurring amino acid
  Transcript Sequence Number=SeqID_15745
  Gene Ontology: Mol. function=peptidase activity; Cellular component =membrane
  Homolog annotation: Hit_ID=B9RCK0; Match level="QueryCoverage=99%, HitCoverage=84%, E-value=1e-84, Identity=51%"; Hit description =Prenyl-dependent CAAX protease, putative
  Pfam annotation: Domain name=Abi; Domain location=225-315; Score =78.3; E_value=2.7e-20; Accession=PF02517.8; Description=CAAX amino terminal protease family
WRLWHVSCLRNDPDVPTTSDDDRAFKYVAQSESFSAVEAKEEEVGSSNGDQEKNFNDGGWLLQVHKVKXNLQGRILRFQTKRWTVPWTGKTIAQVMILWIATFXGFVGSWIVPFLAHAAGFSKETLTHRGQALYSLLTDITEGLAGIAILHQCLGRFRPLPPGWFEFNLKGRWILDVVLGCLLFPLVNLLSHINISLVPMSPGPVVGVSSVEQSIVARDPVAMALYAVVVIVCAPIWEEIVFRGFLLPSLTRYMPYPPTILASAAAFALAHFNAQRVMPLIFLGVVMGGVFARSRNLLASMVLHSLWNGFVFLDLMK

SEQ ID NO: 81720 - protein, 100 aa, Setaria italica
  Transcript Sequence Number=SeqID_15746
  Subcellular localization annotation: CTP_CleavageSite=81; ConfidenceScore=5.54e-01
QKWPVCFVSPFRADKQSPGDDGRTVSRATLRCRVVPFMQACSFSIFRPCKKSGFFFSGVIFLLKSRRRKMPPCICLGLQCRGKERGSVSFLSADGRRLLT

SEQ ID NO: 81721 - protein, 72 aa, Setaria italica
  Transcript Sequence Number=SeqID_15747
  Subcellular localization annotation: CTP_CleavageSite=29; ConfidenceScore=5.20e-01
FSRRLIVFPSLKAACNKSLFFVAILLRTLCFLAGSCKGSLFFLFVMLTKTQEYQVPPRAQESAGGLAYSLDV

SEQ ID NO: 81722 - protein, 63 aa, Setaria italica
  Transcript Sequence Number=SeqID_15748
  Subcellular localization annotation: CTP_CleavageSite=14; ConfidenceScore=5.30e-01
IQSATSPTPVSHVRGGGGGRGRHGASMRVTPCPRSLLLPISNPLGTKGPISNPLGTKGPISKV

SEQ ID NO: 81723 - protein, 69 aa, Setaria italica
  Transcript Sequence Number=SeqID_15749
SPLKERGTNLQFDSCSLPCRCCIMGESPSLAQMIWPRSAAASRVHRFVSEFLGLEKSIMREGQGETIKY

SEQ ID NO: 81724 - protein, 292 aa, Setaria italica
  misc_feature (75)..(75): Xaa can be any naturally occurring amino acid
  Transcript Sequence Number=SeqID_15750
  Gene Ontology: Cellular component=extracellular region; Biological process=cell wall organization and biogenesis
  Homolog annotation: Hit_ID=B6SZW4; Match level="QueryCoverage=93%, HitCoverage=93%, E-value=1e-137, Identity=88%"; Hit description=Beta- expansin 4
  Pfam annotation: Domain name=DPBB_1; Domain location=99-181; Score =123.4; E_value=7.2e-34; Accession=PF03330.10; Description=Rare lipoprotein A (RlpA)-like double
  Pfam annotation: Domain name=GRP; Domain location=1-90; Score=-28.4; E_value=0.071; Accession=PF07172.3; Description=Glycine rich protein family
  Pfam annotation: Domain name=Pollen_allerg_1; Domain location=193 -276; Score=120.9; E_value=4e-33; Accession=PF01357.13; Description =Pollen allergen
  Pfam module annotation: Pfam domain module=DPBB_1::GRP::Pollen_allerg_ 1; Domain location=99-181::1-90::193-276
  Subcellular localization annotation: CTP_CleavageSite=55; ConfidenceScore=5.04e-01
MAKSHTLLLGALVVLALLVSPIACSRKLAKPNKHRPSHKPAVRARSNYTATPSASDAYGSGGWLSAGATYYGAPXGDGSDGGACGYQTAVGQRPFSSMISAGSPSLFKGGKGCGACYEVKCDSNPACSGQPATVVITDECPGGVCLAEAAHFDMSGTSMGAMAKPGMADRLRAAGILKVQYKRVPCKYSGVNIAFRVDQGSNPFYFEVLIEFEDGDGDLSAVDLMEAGCGTWTPMVQNWGALWRYNSNTGKALRAPFSMRLTSDSGKVLVANNVIPAGWTAGATYRSLVNYS

SEQ ID NO: 81725 - protein, 97 aa, Setaria italica
  Transcript Sequence Number=SeqID_15751
  Subcellular localization annotation: CTP_CleavageSite=50; ConfidenceScore=5.41e-01
FRGFGRFLAAGSWVDLRAGGVGVGCPRQPRQGRVTRPSATTRSTDDVAVNAAARWGLSLTARGLALLGRDTPRARRRRRRRWPPYARVCIRLSPTLC

SEQ ID NO: 81726 - protein, 260 aa, Setaria italica
  Transcript Sequence Number=SeqID_15752
  Gene Ontology: Mol. function=electron carrier activity; Biological process=oxidation reduction
  Homolog annotation: Hit_ID=C3SAE5; Match level="QueryCoverage=99%, HitCoverage=48%, E-value=2e-98, Identity=70%"; Hit description=P450
  Pfam annotation: Domain name=p450; Domain location=6-260; Score= -109.9; E_value=2.4e-06; Accession=PF00067.14; Description=Cytochrome P450
RSDGRGGESPVPVMEPFQYAMFCLLVYMCFGGDRVVNDDDARVRDIEATQRELLANFLSFQVFSFLPSVTKLVFRRRWEKLVSLRRRQEELFLPLIEARRDAGADGDCYVDSLLKLTIPEDGGRALTNGEIVSLCSEFLSAGTDTTATALQWVLANLVKNPEMQGRLRDEVAGVVGAAAGEVREEDLQAMPYLKAVVLEALRRHPPGHFLLPHAVHEDTTLDGYRVPAGAPVNFAVGDIGLDGEVWDAPSEFRPERFLPG

SEQ ID NO: 81727 - protein, 93 aa, Setaria italica
  Transcript Sequence Number=SeqID_15753
RKPSLIVFSLNQRGALDGDFPDQMKHPNLFGERNCVRTFCRIDLAYRRTTTSTGGEEDERDGRSTRESLRWTGPWVAVSRHQRRVRGYPVAAA

SEQ ID NO: 81728 - protein, 148 aa, Setaria italica
  misc_feature (55)..(55): Xaa can be any naturally occurring amino acid
  misc_feature (93)..(93): Xaa can be any naturally occurring amino acid
  Transcript Sequence Number=SeqID_15754
  Homolog annotation: Hit_ID=Q7XKR3; Match level="QueryCoverage=37%, HitCoverage=27%, E-value=3e-14, Identity=76%"; Hit description =OSJNBa0053B21.8 protein
ILVSMNDELCNAGLWSSSSVSAAAAAAAAVGPQHQHSATPPPPHSADSDAADGGXAPGPGGSLDEARHRYKSAVAALRASITAVSSCAQDIGXSTESEADHAEIERLEERASALRKEIESKNKQVKLLMDQLRELITDISMWQSPCSV

SEQ ID NO: 81729 - protein, 151 aa, Setaria italica
  Transcript Sequence Number=SeqID_15755
  Gene Ontology: Mol. function=iron ion binding; Cellular component =integral to membrane; Biological process=transport
  Homolog annotation: Hit_ID=Q7XRV1; Match level="QueryCoverage=100%, HitCoverage=22%, E-value=8e-63, Identity=77%"; Hit description =Probable metal-nicotianamine transporter YSL5
VIDYKLTFPGGTATALMINSLHGKAEGDLAGKKVNCLVKYMSISFGWSFFKWFFSGVGDSCGFDNFPTFGLLAFQNTFYFNFSPSYVGFGLISPHIVNCSVFLGSVISWCFLWPFISAKAGHWYPDNLGNSDFRGLYGYKVFIAISIILGD

SEQ ID NO: 81730 - protein, 429 aa, Setaria italica
  Transcript Sequence Number=SeqID_15756
  Gene Ontology: Mol. function=cysteine-type peptidase activity; Cellular component=nuclear membrane; Biological process=proteolysis
  Homolog annotation: Hit_ID=Q2QME9; Match level="QueryCoverage=70%, HitCoverage=42%, E-value=1e-121, Identity=70%"; Hit description=Ulp1 protease family, C-terminal catalytic domain containing protein, expressed
  Pfam annotation: Domain name=Peptidase_C48; Domain location=26-244; Score=123.1; E_value=9.4e-34; Accession=PF02902.11; Description=Ulp1 protease family, C-terminal catalytic domain
IYYPSRDDPEAVELTGSDINCLDPGPFLSSPVINYYIQNIKRNILCSDDCRDKFYIFNTYFYGKLEEALYRRGDFSKLRRWWKGVNIFHRAYIILPIHGMAHWSLVIICMPAKESISGPIILHLDSLGMHHSTKILDTVGRYLEEEWRYLKKNPSPDTSVLDATWEDLPSNIHKAKVQVPQQNNAYDCGIFMLYYIERFIREAPERFTIDKLGMFSCSWFNPEDASDLRKRIRALLLEEFESARLDNVMSDGAASDGSSIEDSIKGGESEGDAPSDSSEMAVDFGNTGKSSEGIKVAASEEECGVSADAGKSNEGIKFAESEEASGESGDAGMSIEGIKFANSEEATGESGDAGKSIEGYVAESEEESGDSGDAWKSIEGINASEPVEASVEFGDAGKGIEVINVAESDEASVELGHAGKTKKASRLRH

SEQ ID NO: 81731 - protein, 197 aa, Setaria italica
  Transcript Sequence Number=SeqID_15757
EKEINKLDKKYKKEESGDSGDAWKSIEGINASEPVEASVEFGDAGKGIEVINVAESDEASVELGHAGKTKKGIKVAASEEACVECVLSTDKSMESVSDEEHTSSSRRGERTAGCALSESDSAKDEEGTMKADFDSSKTEKEGLIAIVSPERPRFNEGATRSRRAPIPDIVPDSDSDNETKMEVLRVYRRKSELINLE

SEQ ID NO: 81732 - protein, 148 aa, Setaria italica
  misc_feature (137)..(137): Xaa can be any naturally occurring amino acid
  Transcript Sequence Number=SeqID_15758
  Gene Ontology: Mol. function=hydrolase activity, acting on glycosyl bonds; Cellular component=extracellular region; Biological process =carbohydrate metabolic process
  Homolog annotation: Hit_ID=P00693; Match level="QueryCoverage=95%, HitCoverage=32%, E-value=4e-72, Identity=87%"; Hit description=Alpha- amylase type A isozyme
LGQVLFQAFNWESWKQSGGWYNLLMGKVDDIAAAGVTHVWLPPPAHSVSAQGYMPGRLYDLDASKYGTAAELRSLIAAFHGKGVQAVADIVINHRCADYKDSRGIYCVFEGGTNDSRLDWGPHMICRDDTQYSDGTXNLDTGASSPPP

SEQ ID NO: 81733 - protein, 114 aa, Setaria italica
  Transcript Sequence Number=SeqID_15759
  Gene Ontology: Mol. function=binding; Biological process=activation of protein kinase C activity
  Homolog annotation: Hit_ID=B6SZV8; Match level="QueryCoverage=99%, HitCoverage=22%, E-value=1e-47, Identity=80%"; Hit description =Selenium-binding protein
  Pfam annotation: Domain name=PPR; Domain location=15-49; Score=29.4; E_value=1.5e-05; Accession=PF01535.12; Description=PPR repeat
GAMQVFDEMPRRTVVSWNTALTACADNDRHDWCAGMFAEMVEAGFEPDQTTFVVMLSAAAELGNLALGKWAHGQVVARRLEMTLQLGTAAVNMYAKCGAVSYASRLFGRMTVRN

SEQ ID NO: 81734 - protein, 89 aa, Setaria italica
  Transcript Sequence Number=SeqID_15760
TTMGLFPNKIAKGRSGMNRPPKPSTWGSLKELLDGFCQSNRPSISNSHPTCLDKGGSDNRSDKKSQPSIRKSRSSRSSKSKCYSFSVTG

SEQ ID NO: 81735 - protein, 463 aa, Setaria italica
  misc_feature (305)..(305): Xaa can be any naturally occurring amino acid
  misc_feature (386)..(386): Xaa can be any naturally occurring amino acid
  Transcript Sequence Number=SeqID_15761
  Gene Ontology: Mol. function=histone-lysine N-methyltransferase activity; Cellular component=nucleus
  Subcellular localization annotation: CTP_CleavageSite=49; ConfidenceScore=5.61e-01
FFFSYFLNFCSLVLKVGSDNRSDKKSQPSIRKSRSSRSSKSKCYSFSVTGHAASELNGQPAFSPLDDTDVSLESHRENIPKLSSDTSINIYDSTRNTAESTASYRTVKSKCIQTEAQQLEMALVNSTKETCAADVHGECAKLSTSEPSLTNANGSVMLHVGFSPDSVLEVASVTSEGNASASHDVMLHENSTDTGALNVGGYHPSVLTSNFGKEQALLSLMDLEQQAKTTLLEDTRKDENTRREDMVDNDVGEGKAQALQRSNAVRKNQYCQKARLQKRRMDLKGKRKNVIGSTNISPCEGSKLXPLSSNSISPDPCEAILRTGPPEFSPFETLTFGTQDRAIYEHDSVLSHSVMDGIDSMKSPRRKKKDANAGKKGKARDPHKKXKSKKKNIADDSSFDHGLLNLPSCDLAASHMNEQSNLDPATEFGLKNSGAISIDLPGNVACKTDGASLPPPPRAAWVC

SEQ ID NO: 81736 - protein, 487 aa, Setaria italica
  Transcript Sequence Number=SeqID_15762
MYDTVDMATEGGPCQQGILAGGRSVLSGVVEDSITCYNEPQSGNEGLPDLVNRDIEQLPCSIGATCLKKNANHDLEKDGLSPKVGADSSWTLHEDSVPSVSGSSPAVSLAGKTCQIGELFEHRSSMGNVTCSSEVCGMFSCESAFHKEAPGDEGRCSGRKVNTSEEDLRTDWMEAAHDNGYLSGTGKHHSEKLPCGADGLPLITDANHELEKVGFLSNINAVASCPVDETSVPSVYVNSIDVPLDGQVGQAVDTSENSAGFENLGCDSLGGDMMSCDSGLRTEAYGDENQHSGPCADKELQHTPLKYGTSEQSPEENLCVSSYNQPCDDEPCSGKESSALCLGHQDSAVGGSGHLDQGLNACNCADDSSVDFASNANDGGSPNQKLAALNVFSRRRNPKRAASSRKDSERPGQTNQASSGTRKPKKVDVVSSLHQTTMGLFPNKIAKGRSGMNRPPKPSTWGSLKELLDGFCQSKYEPIRILLKFTY

SEQ ID NO: 81737 - protein, 83 aa, Setaria italica
  misc_feature (5)..(5): Xaa can be any naturally occurring amino acid
  Transcript Sequence Number=SeqID_15763
SGRGXGGAVARSRTAYRTVKSWAWDAERINLKHGANAAEDILTFSGSQCSSGKFQTATCQPRRYAHEMVIGVLDTLKAHHGPV

SEQ ID NO: 81738 - protein, 124 aa, Setaria italica
  Transcript Sequence Number=SeqID_15764
  Gene Ontology: Mol. function=RNA-directed DNA polymerase activity; Biological process=RNA-dependent DNA replication
  Homolog annotation: Hit_ID=Q7XUD8; Match level="QueryCoverage=61%, HitCoverage=5%, E-value=1e-09, Identity=43%"; Hit description =OSJNBa0088A01.7 protein
  Subcellular localization annotation: CTP_CleavageSite=55; ConfidenceScore=5.44e-01
LFTRPEPPLHCAPTPRQEPAPLAQPESPKRRRPRRVFDMSTVRRSARLSSRRPMPAMQRAQHNLCRKLGLLNDDLQPVDGALQEYLTMFQGPLPPEVIAALTAAFNLDDEQAEALDAAMAMVAG

SEQ ID NO: 81739 - protein, 116 aa, Setaria italica
  Transcript Sequence Number=SeqID_15765
  Subcellular localization annotation: CTP_CleavageSite=4; ConfidenceScore=5.05e-01
FSMSATSFSSMGSLCCCCTPSVYSTDYVSARFVILKLQLRHGWAQAPDFLLFLLASMLLHAHVCQLIQSKPPPFPLATETKPWPFRPFSCELRGLRQRSFPNLIGRRSERRQRMHA

SEQ ID NO: 81740 - protein, 219 aa, Setaria italica
  Transcript Sequence Number=SeqID_15766
MDIFRKASSIVEATGDEAWFDYSGNLDQPSKEVDDELRKMTMRLEVAGQDTPGQAVDALLGDPGRVTQVPAGGDEVQRPPEPHDNDRTTDEHPVPLPLEHQAASAFGVLFTRPEPPLHCAPTPRQEPAPLAQPESPKRRRPRRVFDMSTPVEAALQEYLTMFQGPLPPEVIAALTAAFNLDDEQAEALDAAMAMVAGEAIQDIQETVEALQAEGPLAAV

SEQ ID NO: 81741 - protein, 149 aa, Setaria italica
  Transcript Sequence Number=SeqID_15767
  Gene Ontology: Cellular component=integral to membrane
  Homolog annotation: Hit_ID=Q9SUD4; Match level="QueryCoverage=93%, HitCoverage=52%, E-value=3e-29, Identity=40%"; Hit description =Senescence-associated protein-like
WLRGYVSDDPGRWEKIKACLVVSDTCKKLARQAAFVNAEQFYQSHLSPLQSGCCKPPSVCGFSYVSPTVWTAPARPAADPDCGLWSNDPAQLCYECESCKAGLLEALRDQWHKANIALVVATVCLLLLYLIGCSAYKNAQAAAFFSRYK

SEQ ID NO: 81742 - protein, 818 aa, Setaria italica
  Transcript Sequence Number=SeqID_15768
  Gene Ontology: Mol. function=nucleic acid binding
  Homolog annotation: Hit_ID=Q7X8Z9; Match level="QueryCoverage=31%, HitCoverage=33%, E-value=1e-74, Identity=53%"; Hit description =OSJNBa0006A01.19 protein
  Pfam annotation: Domain name=zf-CCHC; Domain location=285-302; Score =13.9; E_value=0.0032; Accession=PF00098.15; Description=Zinc knuckle
  Pfam annotation: Domain name=zf-CCHC; Domain location=304-321; Score =9.7; E_value=0.017; Accession=PF00098.15; Description=Zinc knuckle
  Pfam module annotation: Pfam domain module=zf-CCHC::zf-CCHC; Domain location=285-302::304-321
  Subcellular localization annotation: CTP_CleavageSite=51; ConfidenceScore=5.34e-01
MSHPRPRPRIPPLRHPSPAPLAPAAPPKLLRRQTDRVLGHTPRAAPPPLPLASSPPPFSQSRSPDPDLDLPTPAPAGRSHPPLPCSPLYWRETPPPPPPRTRRAGSWEDLVVPPTPDPVPTYAEVVRRGATAFIPPPAPQPPAPRQLRSTITIPPRSSYFPRQPRRPPSVDQSSYSCLRHHAATRPEPRNLASRIRHRSPPGVTPRRSGHQRSNGLPLRRPPSSSPEHHPRRDVHSGSEPGWTRVSRRKRRERGRAARHSKLSSPFANQQPSSAATSAFLQKTKGRCFRCLGRDHKASACRDPIRCLRCFRSGHKQRFCRPDPRPRSASPPRRHPRRSKPRPPSASLKMASARVGDPALRPSDDTLHIPTSFEIDHELRDWEGNALVTWAMRVPPSTTARHIEDAILEEFRLRPGEVSVTRHRPEAFLLRFQHRRHCEDVNAKGNINFRGNEVCVRPWRSLTGALGAALFYRVRICLDGVPRHAWLPDIVERLVGRHCALQCIDTNLLHPSDTRGIELWAWTADPSRIAKVMWLVFTTRSMDGSSSSVQINEVPPERWHRGIKHRVLVHLWEIHDYSAVTTDPHDPDVAVGEPEKRRLPWYWGVRDGDQEPTPAFTPFQHPPPPRRDERRGHDHRGDGRRERPDDHPDFHDWHGRRDDDDDDYDDWHGERRGRADPRPSRGTAHGGQHRVRSRSPRRRHAGHGNQGGRRRNLDGDASLAADTRKEADFKLLYDLQVGSMAEAAQLMFNLQRRHPPAATPRPLMDIFRKASSIVEATGDEAWFDYSGNLDQPSKVPVHNAQSLVPLQKVFHRITSALPP

SEQ ID NO: 81743 - protein, 142 aa, Setaria italica
  Transcript Sequence Number=SeqID_15769
HNFKNLPCDIYNLISYNRAQLSIRISINNGDNPQAQHRPGSEFHFHEEATTLFHFQEEGSREQTLQGSGSSIHPPQGIHKCIPFSYVHHHTKELVQYWKYTKSPPRKKIAHPLAHSPPGRIPSPTPITKHLTLTIYPPPPPN

SEQ ID NO: 81744 - protein, 245 aa, Setaria italica
  Transcript Sequence Number=SeqID_15770
MFNDLSIAEPEEFESPVVEDKCSRRLSCTGMTDSYRSASRKGRSRSMDASSDSVATEFLDMLGIEHSPFGQPSDSDSESPRERLWKQFEKEALASGNAILGLDFDDGMEEPTCEDVVEDFDLSAMIHEAELELQNGSQPIDTRFRAKSLEDEETEALMRQFGLNEKSFQSSPPESRSGFGSPIDLPPEQPPELPPLAEGLGPFIQTKDGGFLRSMNPTLFKNAKNNCSLVMQASSPIVLPAEMGW

SEQ ID NO: 81745 - protein, 149 aa, Setaria italica
  Transcript Sequence Number=SeqID_15771
  Gene Ontology: Mol. function=amino acid transmembrane transporter activity; Cellular component=integral to membrane; Biological process=amino acid transport
  Homolog annotation: Hit_ID=B9HWC4; Match level="QueryCoverage=91%, HitCoverage=31%, E-value=5e-54, Identity=76%"; Hit description=Amino acid transporter
NLYGWFVAGAFTMTVGLSMAEICSSFPTSGGLYYWSARLSGKRWAPFASWITGWFNIVGQWAVTTSVDYSLAQLIQVIILLGTGGKNGGGYLASKYVVIAFHAAILISHAVLNSLPITVLSFFGQFAAAWNMLGVFVLMIAVPAVATER

SEQ ID NO: 81746 - protein, 416 aa, Setaria italica
  Transcript Sequence Number=SeqID_15772
  Gene Ontology: Mol. function=amino acid transmembrane transporter activity; Cellular component=integral to membrane; Biological process=amino acid transport
  Homolog annotation: Hit_ID=B9HWC4; Match level="QueryCoverage=95%, HitCoverage=90%, E-value=1e-163, Identity=72%"; Hit description =Amino acid transporter
  Pfam annotation: Domain name=AA_permease; Domain location=13-410; Score=-91.5; E_value=0.0031; Accession=PF00324.13; Description=Amino acid permease
  Pfam annotation: Domain name=Branch_AA_trans; Domain location=38-331; Score=-345.6; E_value=0.094; Accession=PF05525.5; Description =Branched-chain amino acid transport protein
  Pfam module annotation: Pfam domain module=AA_permease::Branch_AA _trans; Domain location=13-410::38-331
FQHNFLASNFTCVFSFACLTFRFNIVGQWAVTTSVDYSLAQLIQVIILLGTGGKNGGGYLASKYVVIAFHAAILISHAVLNSLPITVLSFFGQFAAAWNMLGVFVLMIAVPAVATERASAEFVFTHFNTDNGAGIRSNFYIFVLGLLMSQYTLTGYDASAHMTEETKNADKNGPIGIISAIGISIVVGWGYILGITFAVKDIPYLLSPDNDAGGYAIAEVFYLAFKSRYGNGVGGIICLGIVAVAIYFCGMSSVTSNSRMAYAFSRDGAMPFSSVWHKVNKQEVPINAVWLSVSVALCMALPSLGSLVAFQAMVSIATIGLYISYALPILFRVTLARKHFSPGPFSLGRYGVLVGWVAVLWVATITVLFSLPVTYPVTKDTLNYTPVAVGGLFFLVLSSWVLRARHWFKGPVTKPG

SEQ ID NO: 81747 - protein, 388 aa, Setaria italica
  misc_feature (275)..(275): Xaa can be any naturally occurring amino acid
  Transcript Sequence Number=SeqID_15773
  Gene Ontology: Mol. function=acid phosphatase activity; Cellular component=cytoplasm; Biological process=inositol metabolic process
  Homolog annotation: Hit_ID=A2Q2R2; Match level="QueryCoverage=92%, HitCoverage=34%, E-value=1e-129, Identity=65%"; Hit description =Histidine acid phosphatase
  Pfam annotation: Domain name=Acid_phosphat_A; Domain location=4-290; Score=-41.9; E_value=0.005; Accession=PF00328.14; Description =Histidine acid phosphatase
DSDSPNYPYDQAKALGKAEIDMDRISTGLPCGSESFLLMFARWKKLERDLYNERKKRFDTTQIPDIYDSGKYDLLHNSHLNLTGLSDLFKVSQLLADGVIPNEYGINPKQKLKIGSKIARRLLGKILIDLHNTRREVTAAAAESNTHNDTKAVSSVKRKERCYYEEVRNECFERSRSNKKSIDLDESHKETKYCLDPKYANVFEPERRVRTRLYFTSESHIHSLMNVLRYCNLDESLNGEESLVCRSSLDRLLKTRELDYMSYIVLRMFENTEVXLLEHPKRFRIEMTFSRGADISSLESGGKASLLPGDHTMPIMEPERLQEVGSYITLDKFDKMTRPFAMPAEDFPPAAPSQPLPVRFCKDVQLQGGKLQHNSDMLSGISKRKTKK

SEQ ID NO: 81748 - protein, 95 aa, Setaria italica
  Transcript Sequence Number=SeqID_15774
  Homolog annotation: Hit_ID=B6TWP6; Match level="QueryCoverage=91%, HitCoverage=23%, E-value=7e-17, Identity=60%"; Hit description=PB1 domain containing protein
MAEIEDAVGAPPTATTTESEGTTTDDEHLSPTCACGGGGGGRGGGGGRIKILCSFGGRIVPRPHDGVLKYVGGETRVLAVPRSIPFRGTFLISAH

SEQ ID NO: 81749 - protein, 305 aa, Setaria italica
  Transcript Sequence Number=SeqID_15775
  Gene Ontology: Mol. function=protein serine/threonine kinase activity; Biological process=protein amino acid phosphorylation
  Homolog annotation: Hit_ID=B6TWP6; Match level="QueryCoverage=93%, HitCoverage=80%, E-value=5e-92, Identity=65%"; Hit description=PB1 domain containing protein
  Pfam annotation: Domain name=PB1; Domain location=63-156; Score=66.8; E_value=8.1e-17; Accession=PF00564.16; Description=PB1 domain
MAEIEDAVGAPPTATTTESEGTTTDDEHLSPTCACGGGGGGRGGGGGRIKILCSFGGRIVPRPHDGVLKYVGGETRVLAVPRSIPFREMKKKVEEMFKTEVAAIKYQLLSVAEDLDVLVSVTCDEDLAHMLDEYDRLEAKRSPTASPRFRVYVFAPQPAAPASTRYAGLSRLHPHHHHQQQHHHHHHFQPERYVATVPASPDGSPPFPSQPHGAVSAGNSPRANAVGAEPPAAFGQGMQRVRSTPNLGTLDAAAQCLHQHAADGGGVPGYVSSSPRHAGLLQNSFHHYQHQYAAAPVAVPHHAGR

SEQ ID NO: 81750 - protein, 44 aa, Setaria italica
  Transcript Sequence Number=SeqID_15776
  Pfam annotation: Domain name=DUF668; Domain location=14-44; Score= -33.9; E_value=0.1; Accession=PF05003.4; Description=Protein of unknown function (DUF668)
DSEEPQEPAKHYNRLGPAGLALHYANIINQIDNLVSAHTLLESY

SEQ ID NO: 81751 - protein, 334 aa, Setaria italica
  Transcript Sequence Number=SeqID_15777
  Gene Ontology: Mol. function=receptor activity; Cellular component =plasma membrane
  Homolog annotation: Hit_ID=Q9XID5; Match level="QueryCoverage=96%, HitCoverage=54%, E-value=1e-106, Identity=59%"; Hit description =F23M19.3
  Pfam annotation: Domain name=DUF668; Domain location=63-148; Score =177.9; E_value=2.9e-50; Accession=PF05003.4; Description=Protein of unknown function (DUF668)
KQEVKGQSKHVKNLKKRSLWSKNLEEVMEKLVDIVHFLHLEIHNTFGRADSEEPQEPAKHYNRLGPAGLALHYANIINQIDNLVSRSCAMPTNARDTLYHGLPPTVKSALRSKLQSFELKEELTAPQIKAEMEKTLRWLVPFASNTTKAYHGFGWVGEWANTGSELNCKISGQMDTTRIETLYHAEKEKADVLILELVVWLHHLICKSRNGHGGLRSPIKSPMSSPTKKGATITLLEGKTNNSSPILTQEDQDMLRDVKYRKFVPGISKSQEFDTTSSYSKQSRLSKSNSHSPASGNRKDILPVRRSSMFPVIDFEIDRTKALDLIDRLDDLKI

SEQ ID NO: 81752 - protein, 45 aa, Setaria italica
  Transcript Sequence Number=SeqID_15778
LCLVSNYSWSHTLHPLQPQLLLPQLAAARRRPGWSALAATPPLAL

SEQ ID NO: 81753 - protein, 77 aa, Setaria italica
  misc_feature (9)..(9): Xaa can be any naturally occurring amino acid
  Transcript Sequence Number=SeqID_15779
  Gene Ontology: Mol. function=galactinol-sucrose galactosyltransferase activity; Cellular component=chloroplast
  Homolog annotation: Hit_ID=B6ST00; Match level="QueryCoverage=100%, HitCoverage=10%, E-value=7e-31, Identity=84%"; Hit description =Stachyose synthase
  Subcellular localization annotation: CTP_CleavageSite=24; ConfidenceScore=5.35e-01
TPASTMVPXAASAVGGSFLGFDAPAAESRHVVPVGRLRGTRFMSIFRFKVWWTTHWVGDSGRDVENETQMMLLDRSA

SEQ ID NO: 81754 - protein, 83 aa, Setaria italica
  Transcript Sequence Number=SeqID_15780
WSGVVTLLGEIYTVYVTTLSSACDIACSHKREGRDGNRERSPSCKEARVSWCAWVCNLLLCLPSWLASIVFVNNLLSDALCSR

SEQ ID NO: 81755 - protein, 130 aa, Setaria italica
  Transcript Sequence Number=SeqID_15781
  Gene Ontology: Mol. function=aspartic-type endopeptidase activity; Biological process=DNA integration
  Homolog annotation: Hit_ID=Q8H7V4; Match level="QueryCoverage=93%, HitCoverage=6%, E-value=2e-56, Identity=85%"; Hit description =Putative polyprotein from transposon TNT
FTIGRLIPKQTILTRSTMEAELAALDTATVEADWLRELLMNLPIVKKPMPAILMNCDNQTVIVKVNNSKDNMKLSRHVKRRLKSVRKMRNSGVISVDYISTDKNLADQFTKGLSRNVINNVSKEMGMRPI

SEQ ID NO: 81756 - protein, 289 aa, Setaria italica
  Transcript Sequence Number=SeqID_15782
  Gene Ontology: Mol. function=aspartic-type endopeptidase activity; Biological process=DNA integration
  Homolog annotation: Hit_ID=Q7XTI8; Match level="QueryCoverage=100%, HitCoverage=21%, E-value=1e-145, Identity=84%"; Hit description =OSJNBa0020P07.16 protein
MKDLGEADVILNIKLIKGENGITLTQSHYVEKVLSRFGFKDSKPSPTPYDPSLILRKNKRIGRDQLRYSQIIGSLMYLASATRPDISYAVCKLSRFTSNPGDDHWRALERVMHYLVGTMDYGIHYSGYPAVLEGYSDSNWISDADELYATSGYVFTLGGGAVSWRLSKQTILTRSTMEAELAALDTATVEADWLRELLMNLPIVKKPMPAILMNCDNQTVIVKVNNSKDNMKLSRHVKRRLKSVRKMRNSGVISVDYISTDKNLADQFTKGLSRNVINNVSKEMGMRPI

SEQ ID NO: 81757 - protein, 66 aa, Setaria italica
  Transcript Sequence Number=SeqID_15783
  Subcellular localization annotation: CTP_CleavageSite=50; ConfidenceScore=5.03e-01
TTLPFSISQSITYTQERTLCKSNSFTSNINRSLCSHQFHNHRNYILYFISGTRKQSFVHAAAANLM

SEQ ID NO: 81758 - protein, 457 aa, Setaria italica
  misc_feature (12)..(12): Xaa can be any naturally occurring amino acid
  Transcript Sequence Number=SeqID_15784
  Gene Ontology: Mol. function=4 iron, 4 sulfur cluster binding; Cellular component=cellular_component; Biological process=regulation of cyclin-dependent protein kinase activity
  Homolog annotation: Hit_ID=Q2R1U4; Match level="QueryCoverage=100%, HitCoverage=76%, E-value=0.0, Identity=90%"; Hit description =CDK5RAP1-like protein
  Pfam annotation: Domain name=Radical_SAM; Domain location=142-338; Score=110.7; E_value=4.9e-30; Accession=PF04055.13; Description =Radical SAM superfamily
  Pfam annotation: Domain name=TRAM; Domain location=392-457; Score =20.4; E_value=0.0055; Accession=PF01938.12; Description=TRAM domain
  Pfam annotation: Domain name=UPF0004; Domain location=1-94; Score =95.3; E_value=2.1e-25; Accession=PF00919.12; Description =Uncharacterized protein family UPF0004
  Pfam module annotation: Pfam domain module=Radical_SAM::TRAM::UPF0004; Domain location=142-338::392-457::1-94
SIMKKEGYNEIXVPDPESAEIIFINTCAIRDNAEQKVWQRLNYFWFLKREWKANVAEGRSKSLRPPKIAVLGCMAERLKEKILDSDKMVDVVCGPDAYRDLPRLLQEVDYGHKGMNTLLSLEETYADITPVRISDNSVTAFVSIMRGCNNMCSFCIVPFTRGRERSRPVSSIVREVGELWKAGVKEVMLLGQNVNSYNDTSEVEELEPGKNWQLSEGFSSMCKVKNMGLRFADLLDRLSLEYPEMRFRFTSPHPKDFPDELLYLMRDRYNICNLIHLPAQTGSTTVLERMRRGYTREAYLELVHKIRNVLPDVGLSSDFITGFCGETEDEHADTLSLLRAVGYDMAYMFAYSMREKTHAHRNYEDDVPEDVKQRRLTEMINTFRETTKKNYDSQIGTVQLVLVEGPNKRAPKTELIGKTDRGHKVSFASVPIPHTFEGDDARKPVVGDFVEVKILRS

SEQ ID NO: 81759 - protein, 196 aa, Setaria italica
  Transcript Sequence Number=SeqID_15785
  Gene Ontology: Mol. function=zinc ion binding; Cellular component =nucleus
  Homolog annotation: Hit_ID=B8Q8B7; Match level="QueryCoverage=97%, HitCoverage=77%, E-value=2e-41, Identity=53%"; Hit description=SKIP interacting protein 31 (Fragment)
MMAPRKRKRPDQIQTPVLGLGAADVAAHFQQQLADVDRLVLQHTTKMWVEMGEQRCRHARQVVAAVEAAAAKRLRAKDEEIQRIGRLNWALEERVRSLCVEAQVWRDLAQSNEAMVNALRGELQQAHDAQQARRGVGTDDAESCCCGENGVAGGIGADDNEEEEAGTSSASHKRMCTMCGKGAAEVLLLPCRHLCA

SEQ ID NO: 81760 - protein, 118 aa, Setaria italica
  Transcript Sequence Number=SeqID_15786
  Gene Ontology: Mol. function=binding; Cellular component=cytoplasmic membrane-bounded vesicle; Biological process=ER-associated protein catabolic process
  Homolog annotation: Hit_ID=Q2RAU4; Match level="QueryCoverage=99%, HitCoverage=6%, E-value=6e-54, Identity=88%"; Hit description=HEAT repeat family protein, expressed
HRKVSKHLRKIWTTAFRAMDDIKETVRNAGDSLCRAVSSLTIRLCDVSLTSTSDANETMIIVLPYLLSEGILSKVSSVQKASISLVMKLAKGAGPALRPHLPELVSCMLECLSSLENL

SEQ ID NO: 81761 - protein, 131 aa, Setaria italica
  misc_feature (35)..(35): Xaa can be any naturally occurring amino acid
  misc_feature (62)..(62): Xaa can be any naturally occurring amino acid
  Transcript Sequence Number=SeqID_15787
  Subcellular localization annotation: CTP_CleavageSite=17; ConfidenceScore=5.34e-01
QAPVALPPPRDKPRRPPASPTASRCGQDFVEPTPXGRRRGPKPPNPDAPRTRPPRDKPRRPXRTPTAAQPGFPRASPRRRPPPSSEAAEPGRSQPPAVVSSIRSCLYTEVDDHSEEPLLACQSSAKLRKWC

SEQ ID NO: 81762 - protein, 216 aa, Setaria italica
  misc_feature (170)..(170): Xaa can be any naturally occurring amino acid
  Transcript Sequence Number=SeqID_15788
  Gene Ontology: Mol. function=transferase activity, transferring glycosyl groups; Cellular component=cell wall
  Homolog annotation: Hit_ID=B9RI77; Match level="QueryCoverage=100%, HitCoverage=27%, E-value=4e-57, Identity=51%"; Hit description =Synaptotagmin, putative
PSFNEQYSWDVYDTATVLTIGLFDNGLVEESSSGKYKDVSIGKVRIRLSNLQPGRIYSHGYPLLILQPAGVKKLGELYLSVRFTTRSLVNTVRMYASPNLPTMHYEDPLSVILKDNLELSAIQIVTSRLSRMEPPLSKEAVEYMFDVQSNFWSLRKSRVNWNRIMSVLSXLQHIFGDFFSYICSWQNPAVTLLAHAVFLLALAFHQFILPSALLYI

SEQ ID NO: 81763 - protein, 87 aa, Setaria italica
  Transcript Sequence Number=SeqID_15789
  Subcellular localization annotation: CTP_CleavageSite=39; ConfidenceScore=5.33e-01
MASRLGLYTGGSRRRVDGRSGGRSSVASAAAKQLLSRLRSTWRRSAGRPRRPAVKFGYDLQSYSQNFDDGLASSGHCTAFSDSAVCS

SEQ ID NO: 81764 - protein, 275 aa, Setaria italica
  misc_feature (224)..(224): Xaa can be any naturally occurring amino acid
  Transcript Sequence Number=SeqID_15790
  Gene Ontology: Mol. function=calcium-dependent cysteine-type endopeptidase activity; Cellular component=intracellular; Biological process=proteolysis
  Homolog annotation: Hit_ID=B9SBQ0; Match level="QueryCoverage=98%, HitCoverage=12%, E-value=9e-71, Identity=57%"; Hit description =Calpain, putative
  Subcellular localization annotation: CTP_CleavageSite=50; ConfidenceScore=5.20e-01
INWSLRTKDMMMTSKPRKYGFIAWLLSTCVGLFLSFLSKSSVILGLSLTVPLMVACLSFAIPIWIRNGYRFWIPGREIDSRENVSHAPGKKERALFAISIAVFIASVIGLGAIVSAKPLDALGYKGWDADKNSFYSPYATSMYLGWALSSAIAVLTMGLIPIVAWFATYRFSPSSAICVGLFATVLVSFCGASYWGVVNSREDGVPLKADFLAALLPLLCIPAXFSLFTGLYKWKDDDWKISRGVYLFISMGMLLLFGAVAAVIVTIRPWTVGVA

SEQ ID NO: 81765 - protein, 115 aa, Setaria italica
  Transcript Sequence Number=SeqID_15791
  Gene Ontology: Mol. function=ribonuclease H activity
  Homolog annotation: Hit_ID=B9T8F6; Match level="QueryCoverage=63%, HitCoverage=27%, E-value=6e-25, Identity=68%"; Hit description =Nuclease, putative
RGVVQSTIYKTLSDCQAQVGNSVCDPSVTVYKGYSLSKETEEYLAARGLKNAIYCIDAADARDELFNDLVPCPFQQPDGSVQSTLKRSEEMETGPSNHQKVAEQELLSDSDLSCI

SEQ ID NO: 81766 - protein, 378 aa, Setaria italica
  misc_feature (22)..(22): Xaa can be any naturally occurring amino acid
  Transcript Sequence Number=SeqID_15792
  Gene Ontology: Mol. function=methyltransferase activity; Biological process=metabolic process
  Homolog annotation: Hit_ID=B9RWD4; Match level="QueryCoverage=96%, HitCoverage=50%, E-value=2e-66, Identity=43%"; Hit description=S -adenosylmethionine-dependent methyltransferase, putative
  Pfam annotation: Domain name=Spermine_synth; Domain location=128-339; Score=-106.9; E_value=0.072; Accession=PF01564.9; Description =Sperminespermidine synthase
LIMVFLDSRHANIDMDIIKKDXSPLVKDLEPGNPEEEAPIPFMMAGDGVKQRDILQEATSELTGPMVVEDVVYENADGDQGSMPEKMFRRLIFGRSSGLVQSEALLIRDPHSDETDKKNKNASATSKKRRSKKGSKNSLRVDHSFLGSSYHSGIISGLSLVASALGAASTSGEKVSTTVIGLGAGCFPMFLRGCLPFVDIEVVELDPLVAELAKKYFGFSVDEQLKVHLGDGIKFVEDSVAANHSVSNGSGSNAIKILIIDVDSSDLSSGLSCPPENFVEDPFLQKAKEFLSEGGLFIINLVSRSSSVREMVVSRLRAVFEHLYSLQLEEDINEVLFASPSERYLDVNNLDAAVTKLKDLLKFPVDVESDIKKLQRLQ

SEQ ID NO: 81767 - protein, 49 aa, Setaria italica
  Transcript Sequence Number=SeqID_15793
WCLCWLSQLPTATSCTAATATTVKPVLLGQVIGLSRRIKVISRRSYIAF

SEQ ID NO: 81768 - protein, 197 aa, Setaria italica
  Transcript Sequence Number=SeqID_15794
  Gene Ontology: Mol. function=nucleic acid binding
  Homolog annotation: Hit_ID=Q2PEV8; Match level="QueryCoverage=42%, HitCoverage=20%, E-value=1e-28, Identity=73%"; Hit description =Putative DNA binding protein (Fragment)
  Pfam annotation: Domain name=RRM_1; Domain location=1-65; Score=79.9; E_value=9e-21; Accession=PF00076.14; Description=RNA recognition motif. (a.k.a. RRM, RBD, o
IFVGGLDPNVTEDVLKQVFAPYGEVVHVKIPVGKRCGFVQFVTRPSAEQALLMLQGTLIGGQNVRLSWGRSLSNKPQQDSNQWGGAAASAAAAGYYGYGQGYEAYGYPQSQDPNAFGYGAGAYSGYPNYQQQPVAQRRDNNLLGTTLQVSRSLVLVSEDTSGLHDILGASLSPWDLLRVPDAKDGDRLLAEVVRVLW

SEQ ID NO: 81769 - protein, 170 aa, Setaria italica
  Transcript Sequence Number=SeqID_15795
  Gene Ontology: Mol. function=nucleic acid binding
  Homolog annotation: Hit_ID=Q2PEV8; Match level="QueryCoverage=86%, HitCoverage=36%, E-value=2e-50, Identity=67%"; Hit description =Putative DNA binding protein (Fragment)
  Pfam annotation: Domain name=MPPN; Domain location=100-170; Score= -28.8; E_value=0.1; Accession=PF05172.5; Description=MPPN (rrm-like) domain
  Pfam annotation: Domain name=RRM_1; Domain location=109-168; Score =60.9; E_value=4.8e-15; Accession=PF00076.14; Description=RNA recognition motif. (a.k.a. RRM, RBD, o
  Pfam annotation: Domain name=RRM_1; Domain location=19-73; Score =12.5; E_value=0.014; Accession=PF00076.14; Description=RNA recognition motif. (a.k.a. RRM, RBD, o
  Pfam module annotation: Pfam domain module=MPPN::RRM_1::RRM_1; Domain location=100-170::109-168::19-73
  Subcellular localization annotation: CTP_CleavageSite=28; ConfidenceScore=5.10e-01
GCLFIPFGSKGCLKVCSTVLNLTYPSVKGAKVVTDKLTMRSKGYGFVKFGDPTEQARAMTEMNGMPCSSRPMRIGPAATVMHFLFNAWPHLVPNSQGAQSENDPNNTTIFVGGLDPNVTEDVLKQVFAPYGEVVHVKIPVGKRCGFVQYANRSSAEEALVILQGTLIGGQ

SEQ ID NO: 81770 - protein, 175 aa, Setaria italica
  misc_feature (118)..(118): Xaa can be any naturally occurring amino acid
  Transcript Sequence Number=SeqID_15796
  Gene Ontology: Mol. function=nucleic acid binding
  Homolog annotation: Hit_ID=Q2PEV8; Match level="QueryCoverage=56%, HitCoverage=24%, E-value=5e-36, Identity=74%"; Hit description =Putative DNA binding protein (Fragment)
  Pfam annotation: Domain name=MPPN; Domain location=24-108; Score= -22.2; E_value=0.024; Accession=PF05172.5; Description=MPPN (rrm -like) domain
  Pfam annotation: Domain name=RRM_1; Domain location=33-97; Score =79.9; E_value=9e-21; Accession=PF00076.14; Description=RNA recognition motif. (a.k.a. RRM, RBD, o
  Pfam module annotation: Pfam domain module=MPPN::RRM_1; Domain location=24-108::33-97
MNLTICFLHFFAFIYSPNSQGAQSENDPNNTTIFVGGLDPNVTEDVLKQVFAPYGEVVHVKIPVGKRCGFVQFVTRPSAEQALLMLQGTLIGGQNVRLSWGRSLSNKPQQDSNQWVGXAASAAAGGYYGGYGQGYEAYGGGYAQPQDPNMYGYGAYAGYPNYQQQPAAQQPQQQQ

SEQ ID NO: 81771 - protein, 170 aa, Setaria italica
  Transcript Sequence Number=SeqID_15797
  Gene Ontology: Mol. function=nucleic acid binding
  Homolog annotation: Hit_ID=B9RXN0; Match level="QueryCoverage=98%, HitCoverage=39%, E-value=7e-63, Identity=68%"; Hit description =Nuclear acid binding protein, putative
  Pfam annotation: Domain name=RRM_1; Domain location=1-60; Score=19.8; E_value=0.0029; Accession=PF00076.14; Description=RNA recognition motif. (a.k.a. RRM, RBD, o
  Pfam annotation: Domain name=RRM_1; Domain location=80-151; Score =45.7; E_value=1.9e-10; Accession=PF00076.14; Description=RNA recognition motif. (a.k.a. RRM, RBD, o
  Pfam module annotation: Pfam domain module=RRM_1::RRM_1; Domain location=1-60::80-151
ENYIYGCFAATGEVQSVKLIRDKHTGQLQGYGFVEFMTRATAEKVLQTYNGTMMPNVELPFRLNWASAGEKRDDTPDYTIFGGDLAADVTDYLLQETFRVHYPSVKGAKVVTDKLTMRSKGYGFVKFGDPTEQARAMTEMNGMPCSSTPMRIGPAASRKTTGVQERGKHG

SEQ ID NO: 81772 - protein, 56 aa, Setaria italica
  Transcript Sequence Number=SeqID_15798
LSSLGITYWFIGSKAYEAYGYPQSQDPNAFGYGAGAYAGYPNYQQQPVAQQTQQQQ

SEQ ID NO: 81773 - protein, 95 aa, Setaria italica
  Transcript Sequence Number=SeqID_15799
LAPAKQASLLLLWLLCSWLLLVIGITSISTITIHVRILRAAGANAAGYYGYGQGYEAYGYPQSQDPNAFGYGAGAYAGYPNCQQQPVAQQTQQQQ

SEQ ID NO: 81774 - protein, 70 aa, Setaria italica
  Transcript Sequence Number=SeqID_15800
TSFRGRFHIEPFGKLPFDVTLSFLFIDPIYFYDFSVSISLSCVQQMYHFSCYAYPLAMLLCRSFQVTFER

SEQ ID NO: 81775 - protein, 373 aa, Setaria italica
  Transcript Sequence Number=SeqID_15801
  Gene Ontology: Mol. function=nucleic acid binding
  Homolog annotation: Hit_ID=Q2PEV8; Match level="QueryCoverage=75%, HitCoverage=72%, E-value=1e-114, Identity=70%"; Hit description =Putative DNA binding protein (Fragment)
  Pfam annotation: Domain name=MPPN; Domain location=222-306; Score= -22.2; E_value=0.024; Accession=PF05172.5; Description=MPPN (rrm -like) domain
  Pfam annotation: Domain name=RRM_1; Domain location=127-198; Score =58.1; E_value=3.3e-14; Accession=PF00076.14; Description=RNA recognition motif. (a.k.a. RRM, RBD, o
  Pfam annotation: Domain name=RRM_1; Domain location=231-295; Score =79.9; E_value=9e-21; Accession=PF00076.14; Description=RNA recognition motif. (a.k.a. RRM, RBD, o
  Pfam annotation: Domain name=RRM_1; Domain location=37-107; Score =55.8; E_value=1.7e-13; Accession=PF00076.14; Description=RNA recognition motif. (a.k.a. RRM, RBD, o
  Pfam module annotation: Pfam domain module=MPPN::RRM_1::RRM_1::RRM_1; Domain location=222-306::127-198::231-295::37-107
PPPQGHYGQAPPPQPYYAAPPAQAPAAPAAADEVRTLWIGDLQYWMDENYIYGCFANTGEVQSVKLIRDKNSGQLQGYGFVEFTSRAAAERVLQTYNGQMMPNVELTFRLNWASAGEKRDDTPDYTIFVGDLAADVTDYILQETFRVHYPSVKGAKVVTDKLTMRSKGYGFVKFGDPTEQARAMTEMNGMPCSSRPMRIGPAASRKTTGVQERVPNSQGAQSENDPNNTTIFVGGLDPNVTEDVLKQVFAPYGEVVHVKIPVGKRCGFVQFVTRPSAEQALLMLQGTLIGGQNVRLSWGRSLSNKPQQDSNQWGGAAASAAAGGYYGGYGQGYEAYGGGYAQPQDPNMYGYGAYAGYPNYQQQPAAQQPQQQQ

SEQ ID NO: 81776 - protein, 190 aa, Setaria italica
  Transcript Sequence Number=SeqID_15802
  Gene Ontology: Mol. function=metal ion binding; Cellular component =plasma membrane
  Homolog annotation: Hit_ID=B9RG24; Match level="QueryCoverage=95%, HitCoverage=42%, E-value=8e-52, Identity=59%"; Hit description=Zinc finger protein, putative
ECKIGRALLKSPISGLLILYTFIAVWFVGGLTSFHLYLISTNQTTYENFRYRYDRKTNPYNLGVGQNFIDVLFSRIPSSKNNFRAKVKEDSATFTSSLSMGRVLSPPKMSIDLEMGMKRQAVDAEDLEDLHSQIGSAMGLERCGTEPPHIVGRKGCSEISSDIEAFAEEFAMERGFSERKKIERHTNDDS

SEQ ID NO: 81777 - protein, 565 aa, Setaria italica
  misc_feature (15)..(15): Xaa can be any naturally occurring amino acid
  misc_feature (21)..(21): Xaa can be any naturally occurring amino acid
  misc_feature (176)..(176): Xaa can be any naturally occurring amino acid
  Transcript Sequence Number=SeqID_15803
  Gene Ontology: Mol. function=phospholipase D activity; Cellular component=membrane; Biological process=phosphatidylcholine metabolic process
  Homolog annotation: Hit_ID=Q710M6; Match level="QueryCoverage=100%, HitCoverage=67%, E-value=0.0, Identity=86%"; Hit description =Phospholipase D
  Pfam annotation: Domain name=PLDc; Domain location=411-438; Score =39.1; E_value=1.8e-08; Accession=PF00614.14; Description =Phospholipase D. Active site motif
  Pfam annotation: Domain name=PLDc; Domain location=78-113; Score =41.4; E_value=3.5e-09; Accession=PF00614.14; Description =Phospholipase D. Active site motif
  Pfam module annotation: Pfam domain module=PLDc::PLDc; Domain location=411-438::78-113
PSLGDLLKTKSQEGXRVLLLXWDDPTSRSILGFKMDGFMGTRDEETRRFFKHSSVQVLLCPRSAGKRHSWVKQQETGTIFTHHQKTVIVDADAGNYRRKIIAFVGGLDLCGGRYDTPWHPLFRTLQTVHKEDYYNPNFATVDARGPREPWHDLHSKIDGPAAYDVLQNFQERWLKXAAKRHGIKKLAKSYDDALLSIERIPEIINLSDAAYFSDNDPETWHVQVFRSIDSNSAKGFPKDPRAATMKNLVCGKNVLIDMSIHTAYVHAIRAAQHYIYIENQYFIGSSFNWDSNKDLGANNLIPIEIALKIANKIKANERFSAYIVVPMWPEGNPTGAATQRILYWQNKTMQMMYETIYRALKEAGLDDMYEPQDYLNFFCLGNREVADSTSTSNASNTANNPQEQARKNRRFMVYVHSKGMIVDDEYVIIGSANINQRSMEGIRDTEIAMGAYQPQYTWANKVSAPRGQIYGYRMSLWAEHIGGIEEDFNHPESLECMRRVRYLGEENWKQFASDEVTEMRGHLMKYPVSVDRKGKVKPLPGCTTFPDLGGNICGSFMAIQENLTI

SEQ ID NO: 81778 - protein, 45 aa, Setaria italica
  Transcript Sequence Number=SeqID_15804
LVMISSTRGNLKQDQDLDKAVKSSFSYSPVSELVHLLHYVYIFCM

SEQ ID NO: 81779 - protein, 80 aa, Setaria italica
  Transcript Sequence Number=SeqID_15805
  Subcellular localization annotation: CTP_CleavageSite=61; ConfidenceScore=5.68e-01
LSLSLLPLPRLTFPSGKANARTQAQLARSSGLVPSPVRIGRWVAVTGQCVRRRQPAAARARASKQASDRAIDDACGRGGK

SEQ ID NO: 81780 - protein, 72 aa, Setaria italica
  Transcript Sequence Number=SeqID_15806
  Homolog annotation: Hit_ID=Q8H4C0; Match level="QueryCoverage=83%, HitCoverage=16%, E-value=7e-17, Identity=61%"; Hit description=Alpha- rhamnosidase-like protein
QAHRSSNNRASTKVTKDAGRTWQKYGPICIEGEPLGVIQPVPYQTANGTIRMLLRSFETIGRVCMADSADEG

SEQ ID NO: 81781 - protein, 54 aa, Setaria italica
  misc_feature (15)..(15): Xaa can be any naturally occurring amino acid
  Transcript Sequence Number=SeqID_15807
  Homolog annotation: Hit_ID=Q8H4C0; Match level="QueryCoverage=100%, HitCoverage=17%, E-value=2e-09, Identity=50%"; Hit description=Alpha- rhamnosidase-like protein
DEGVTWSYVHETELXNPNSVVLLAYNTFCRGTLKIAISLNDGDTWDEVMTLEDT

SEQ ID NO: 81782 - protein, 101 aa, Setaria italica
  Transcript Sequence Number=SeqID_15808
  Gene Ontology: Mol. function=catalytic activity
  Homolog annotation: Hit_ID=Q8H4C0; Match level="QueryCoverage=91%, HitCoverage=24%, E-value=2e-33, Identity=70%"; Hit description=Alpha- rhamnosidase-like protein
WSYVHETELPNPNSGIDGVKMKDGRVLLAYNTFCRGTLKIAISLNDGDTWDEVMTLEDTKGMEFSYPAVIQTMDDLIHVTYTYNRTQIKRVVLQPSAMMKL

SEQ ID NO: 81783 - protein, 156 aa, Setaria italica
  Transcript Sequence Number=SeqID_15809
  Homolog annotation: Hit_ID=Q8H4C0; Match level="QueryCoverage=71%, HitCoverage=30%, E-value=1e-38, Identity=63%"; Hit description=Alpha- rhamnosidase-like protein
MRNRLGDSSLDFISILTDSKVKVGLKLEENTQNIINMTTNVMSGWSIVKEELLFPAGGALFKSCHASTIVQIEEDNFLVAYFGGSSEGAPDVKIWLQRYSDGCWHPPVVADEQDGVPMWNPVLFQLPSRELLLFYKIGQEVQKWSGAMKRSLDGGI

SEQ ID NO: 81784 - protein, 361 aa, Setaria italica
  misc_feature (91)..(91): Xaa can be any naturally occurring amino acid
  misc_feature (114)..(114): Xaa can be any naturally occurring amino acid
  Transcript Sequence Number=SeqID_15810
  Gene Ontology: Mol. function=catalytic activity
  Homolog annotation: Hit_ID=Q8H4C0; Match level="QueryCoverage=86%, HitCoverage=83%, E-value=1e-128, Identity=69%"; Hit description =Alpha-rhamnosidase-like protein
  Pfam annotation: Domain name=BNR; Domain location=148-159; Score =14.4; E_value=0.49; Accession=PF02012.12; Description=BNRAsp-box repeat
  Pfam annotation: Domain name=BNR; Domain location=200-211; Score=9.5; E_value=8.2; Accession=PF02012.12; Description=BNRAsp-box repeat
  Pfam annotation: Domain name=BNR; Domain location=253-264; Score=8.1; E_value=12; Accession=PF02012.12; Description=BNRAsp-box repeat
  Pfam annotation: Domain name=BNR; Domain location=302-313; Score=7.6; E_value=14; Accession=PF02012.12; Description=BNRAsp-box repeat
  Pfam module annotation: Pfam domain module=BNR::BNR::BNR::BNR; Domain location=148-159::200-211::253-264::302-313
VGSAPGTGLIEDILTDSKVKVGLKLEENTQNIINMTTNVMSGWSIVKEELLFPAGGALFKSCHASTIVQIEEDNFLVAYFGGSSEGAPDVXKIWLQRYSDGCWHPPVVADEQDXVPMWNPVLFQLPSRELLLFYKIGQEVQKWSGAMKRSLDGGITWSQREQLPPGILGPIKNKPFLLEDGRLLCGSSVESWNSWGAWLEVTKDAGRTWRKYGPIYVDGQPLGVIQPVPYRTANGIIRVLLRSFQTIGRVCMADSFDGGVTWSFVRGTELPNPNSGIDGVKMKDGRVVLGYNTFSRGTLKLAVSLNDGDSWNEVMTLEDTSGMEFSYPAVIQTMDGLIHVTYTYNRTQIKHVVIKPSALVK

SEQ ID NO: 81785 - protein, 157 aa, Setaria italica
  Transcript Sequence Number=SeqID_15811
MATAGGGDLSDEERRAMRGSKFAPLPPPPSTSRPQPRMAHPGGPLTTNKAAALAKFLERKLQQPDGLDSLNPDLVKLAVKNAKETMKASKGEASTSGRVVRHVSSFEDGSEDSEDEAEVKGIKRKRKNKKVKAHQDDEQQSKKKKKKKNKKKKGKGC

SEQ ID NO: 81786 - protein, 92 aa, Setaria italica
  Transcript Sequence Number=SeqID_15812
  Homolog annotation: Hit_ID=Q5EMP8; Match level="QueryCoverage=73%, HitCoverage=23%, E-value=2e-14, Identity=64%"; Hit description =Senescence-inducible chloroplast stay-green protein
SAPAPVVVFRRRPRDARRRRYVVPTARLFGPAIFEASKLKVLFLGVDEESGGKHAAHPGTKPPPLPLLPRTYTLTHSDVTASLTLAVSHTIN

SEQ ID NO: 81787 - protein, 155 aa, Setaria italica
  Transcript Sequence Number=SeqID_15813
  Homolog annotation: Hit_ID=Q5EMP8; Match level="QueryCoverage=98%, HitCoverage=52%, E-value=4e-66, Identity=82%"; Hit description =Senescence-inducible chloroplast stay-green protein
TARLFGPAIFEASKLKVLFLGVDEESGGKHAAHPGTKPPPLPLLPRTYTLTHSDVTASLTLAVSHTINRAQLQGWYNRLQRDEVVAEWKKVRGRMSLHVHCHISGGHFLLDLIAGLRYYIFRKELPVVLKAFVHGDGDLFSRHPELEEATVWVLT

SEQ ID NO: 81788 - protein, 249 aa, Setaria italica
  Transcript Sequence Number=SeqID_15814
  Gene Ontology: Mol. function=transporter activity; Cellular component= integral to membrane; Biological process=transport
  Homolog annotation: Hit_ID=B6U4R9; Match level="QueryCoverage=100%, HitCoverage=51%, E-value=5e-79, Identity=59%"; Hit description =Synaptic vesicle 2-related protein
TYHKETQLGDHDPLTSQNGHLPVRENDSTVDNAMSSKSGGTAALRKLFSRKLLRSTLLIWFVWFANSFAYYGLVLLSSQLSDANRRCTSGQKSELHQKNVNLYKDVFITSLAEFPGLVISAIIVDWFGRKATMWILLFGCCAFLGPLAVHQKESLTTALLFGARACGMGSSTVLCLYAPEVYPTSARSTGVGIATAIGKIGGIVCPIIAVGLLRSCHQMEAVVVFELVLGLAGVACILFPVETKGREMK

SEQ ID NO: 81789 - protein, 232 aa, Setaria italica
  Transcript Sequence Number=SeqID_15815
  Gene Ontology: Mol. function=nucleotide binding; Cellular component =cytoplasm; Biological process=translation
  Homolog annotation: Hit_ID=A4ZCD1; Match level="QueryCoverage=64%, HitCoverage=28%, E-value=2e-74, Identity=90%"; Hit description=GTP -binding protein
  Pfam annotation: Domain name=GTP_EFTU; Domain location=94-232; Score =109.2; E_value=1.4e-29; Accession=PF00009.19; Description=Elongation factor Tu GTP binding domain
MEHDAEMAPPIASRASAAEAAADDWAARDDFEEKPAESHSPAPAAAAAEDDAGEAVSAPPAQDVNGIQSSLQSLELQTSDDGVQMETEEEQNRKRHLNVVFIGHVDAGKSTAGGQILFLSGQVDERTIQKYEKEAKDKSRESWYMAYIMDTNEEERAKGKTVEVGRAYFETEATRFTILDAPGHKSYVPNMISGASQADIGVLVISARKGEFETGYEKGGQTREHVLLAKNF

SEQ ID NO: 81790 - protein, 339 aa, Setaria italica
  Transcript Sequence Number=SeqID_15816
  Gene Ontology: Mol. function=nucleotide binding; Cellular component =cytoplasm; Biological process=translational termination
  Homolog annotation: Hit_ID=A4ZCD1; Match level="QueryCoverage=93%, HitCoverage=59%, E-value=1e-140, Identity=76%"; Hit description=GTP -binding protein
  Pfam annotation: Domain name=GTP_EFTU; Domain location=1-119; Score= -0.5; E_value=1.2e-09; Accession=PF00009.19; Description=Elongation factor Tu GTP binding domain
  Pfam annotation: Domain name=GTP_EFTU_D2; Domain location=140-207; Score=67.3; E_value=5.6e-17; Accession=PF03144.17; Description =Elongation factor Tu domain 2
  Pfam annotation: Domain name=GTP_EFTU_D3; Domain location=213-330; Score=102.4; E_value=1.6e-27; Accession=PF03143.9; Description =Elongation factor Tu C-terminal domain
  Pfam module annotation: Pfam domain module=GTP_EFTU::GTP_EFTU_D2::GTP_ EFTU_D3; Domain location=1-119::140-207::213-330
NIGVLVISARKGEFETGYEKGGQTREHVLLAKTLGVSKLVVVINKMDDPTVGWSKERYDEIEGRMIPFLKSSGYNVKKDVHFLPISGLLGTNMKTRMDKSICSWWNGPCLFEVLDCIEVPLRDPKGPVRVPIINKYKEMGTVVMGKIESGTIREGDNLLVMPNKVNVKVLTIHCDEDKVRKAAPGENVRLKLSGIEEEDITPGFVLSSITNPVSAVSEFNAQLQILELLDNAIFTAGYKAVLHIHSVVEECEIVELIEEIDLKRKKETDPKKKKPKRKPLFVKNGAVVVCCIQVNNLICIENFSDFPQLGRFTLRTEGKTVAVGKVVAVPPSGSSTFKA

SEQ ID NO: 81791 - protein, 68 aa, Setaria italica
  Transcript Sequence Number=SeqID_15817
  Gene Ontology: Mol. function=protein dimerization activity; Cellular component=nucleus
  Homolog annotation: Hit_ID=B6U2P4; Match level="QueryCoverage=100%, HitCoverage=16%, E-value=3e-21, Identity=76%"; Hit description=DNA binding protein
LTAEVQRLKLATAELGDSCSSNNLAQQLQLNAQDQMFQLHQQQATPIPFYQLQQAQQNGVGKNHESKE

SEQ ID NO: 81792 - protein, 651 aa, Setaria italica
  misc_feature (16)..(16): Xaa can be any naturally occurring amino acid
  misc_feature (22)..(22): Xaa can be any naturally occurring amino acid
  Transcript Sequence Number=SeqID_15818
  Gene Ontology: Mol. function=calcium ion binding; Cellular component =nucleus; Biological process=regulation of transcription, DNA -dependent
  Homolog annotation: Hit_ID=Q7XI44; Match level="QueryCoverage=99%, HitCoverage=63%, E-value=0.0, Identity=54%"; Hit description =Putative anther ethylene-upregulated protein ER1
  Pfam annotation: Domain name=Ank; Domain location=263-295; Score=3.4; E_value=12; Accession=PF00023.22; Description=Ankyrin repeat
  Pfam annotation: Domain name=Ank; Domain location=296-328; Score =35.4; E_value=2.2e-07; Accession=PF00023.22; Description=Ankyrin repeat
  Pfam annotation: Domain name=IQ; Domain location=471-491; Score=24.8; E_value=0.00036; Accession=PF00612.19; Description=IQ calmodulin -binding motif
  Pfam annotation: Domain name=IQ; Domain location=494-514; Score=29.0; E_value=1.9e-05; Accession=PF00612.19; Description=IQ calmodulin -binding motif
  Pfam annotation: Domain name=TIG; Domain location=62-147; Score=21.9; E_value=0.0027; Accession=PF01833.16; Description=IPTTIG domain
  Pfam module annotation: Pfam domain module=Ank::Ank::IQ::IQ::TIG; Domain location=263-295::296-328::471-491::494-514::62-147
ENDSFTRWNEQELVKXNDSQLXSSSGVYWNSEDTDNIIEASSRDQLDQFTVDPVVAQDQLFSIFDFSPSWAYAGSKTRVLITGRFLNSDEVQRCKWSCMFGEVEVPAEISADGTLRCYSPSHKPGRVPFYVTCSNRLACSEIREFEFRPSNSQHIDGPTPHDIANKTYLQMRLDDLLSLGQDEYQATVSNPTKDMIDLSKKISSLMTDNDSWSELLKLAGDNELATDDKQDQFFENRVKEKLHIWLVHKAGDGGKGPSVLDEEGQGVLHLAAALGYDWAIRPTISAGVSINFRDAHGWTALHWAAFCGRERTVVALIALGAAPGALTDPTPDFPTGSTPADLASANGYKGISGFLAESSLTSHLQTLNLKEAMWSNAPEISGLPGIGDVTERKLSPLAGEGLLAGSMGDSLGAVRNATQAAARIYQVFRMQSFQRKQVVQYEDDNGAISDDCALSLLSVKPSKPGQLDPLHAAATRIQNKYRGWKGRKEFLLIRQRIIKIQAHVRGHQVRKHYRKIIWSVGIVEKVILRWRRRGAGLRGFRSTEGAAEGTSSSGSDLIQNKPAEDDYDFLQQGRKQTEERLQKALARVKSMVQYPDARDQYQRILNVVTKMQESQAMQEKMLESSTDMDEGLAMSDFEELWGDDMPMPGYI

SEQ ID NO: 81793 - protein, 99 aa, Setaria italica
  Transcript Sequence Number=SeqID_15819
  Homolog annotation: Hit_ID=B6U7M0; Match level="QueryCoverage=49%, HitCoverage=17%, E-value=4e-16, Identity=73%"; Hit description=ZF-HD homeobox protein
WRIQRNDDGELERFCDEIGVKRQVLKVWMHNHKNQLASTSPTSAVGMNPAAAGIGINPTAAGIGTGAGVAGDGDGDDDDTDDSPPRAAVSSPSPSPISV

SEQ ID NO: 81794 - protein, 67 aa, Setaria italica
  Transcript Sequence Number=SeqID_15820
PLSAVVLFVGRGAPALRGVWYGYESTNCPFVRLSRYFECNSYSSSDRAAVSVIILCITWRHSCEYRQ

SEQ ID NO: 81795 - protein, 253 aa, Setaria italica
  misc_feature (15)..(15): Xaa can be any naturally occurring amino acid
  Transcript Sequence Number=SeqID_15821
  Homolog annotation: Hit_ID=Q8RYX6; Match level="QueryCoverage=87%, HitCoverage=42%, E-value=7e-29, Identity=36%"; Hit description =P0648C09.24 protein
  Pfam annotation: Domain name=DUF266; Domain location=4-253; Score =342.8; E_value=6.8e-100; Accession=PF03267.6; Description =Arabidopsis protein of unknown function, DUF266
  Subcellular localization annotation: CTP_CleavageSite=20; ConfidenceScore=5.60e-01
ALFRRAILSSSSATXASPASAASYFFRRRPSPKIAFLFLTNSDLVFSPLWEKFFRGHKNLFNLYVHADPYSVLELPPTPSFRGRFVPAKATQRASPTLISAARRLLATALLDDPNNQFFALISQSCIPLHPFPTLYNALLSETAGPHNRHRSFIEIMDNMDNDTTLLHDRYYARGDDVMLPEVPYDQFRAGSQFFVLARRHAIMVVRDMRLWKKFKQPCLIQRRDSCYPEEHYFPTLLDMQDPEGCTKYTLTR

SEQ ID NO: 81796 - protein, 160 aa, Setaria italica
  misc_feature (41)..(41): Xaa can be any naturally occurring amino acid
  Transcript Sequence Number=SeqID_15822
  Homolog annotation: Hit_ID=Q9XGZ7; Match level="QueryCoverage=87%, HitCoverage=33%, E-value=1e-19, Identity=36%"; Hit description =T1N24.19 protein
  Pfam annotation: Domain name=DUF266; Domain location=1-150; Score =73.1; E_value=7.6e-21; Accession=PF03267.6; Description=Arabidopsis protein of unknown function, DUF266
RGRHSLAICGGKPFLRYYARGDDVMLPEVPYDQFRAGSQFXVLARRHAIMVVRDMRLWKKFKQPCLIQRRDSCYPEEHYFPTLLDMQDPEGCTKYTLTRVNWTDSVAGHPHMYGPGEVSASLIRELRKSNNTHSYMFARKFSPECLEPLMEIADSVILRD

SEQ ID NO: 81797 - protein, 271 aa, Setaria italica
  Transcript Sequence Number=SeqID_15823
  Gene Ontology: Mol. function=zinc ion binding; Cellular component =intracellular
  Homolog annotation: Hit_ID=B6UHX4; Match level="QueryCoverage=100%, HitCoverage=100%, E-value=9e-60, Identity=53%"; Hit description=Zinc finger protein
MAKPQEVRSVDSFSQLPFIRPAPPAPAPRDTIRLFGCEFSNDHQAQAKQEAAAAADSPDAANGSTVTSSESNAKQSVGASAAAERKFECHYCCRNFPTSQALGGHQNAHKRERQHAKRAHLQASLAMHRYVPGHMYGLFNYHHHLGRFDQPAPLPPPPPAHYPMWTSASPPGPYGGGPGSMSQPINGSPVPGLWRMPPTPMENFGMTGRHGADTAAILVGPGGEAACKDEKAVMSLLSSSPSLSSCSSTSPEKLGRYELGQKESVSLDLHL

SEQ ID NO: 81798 - protein, 228 aa, Setaria italica
  Transcript Sequence Number=SeqID_15824
  Gene Ontology: Mol. function=DNA topoisomerase (ATP-hydrolyzing) activity; Cellular component=chromosome; Biological process=DNA topological change
  Homolog annotation: Hit_ID=A7Q269; Match level="QueryCoverage=99%, HitCoverage=15%, E-value=1e-107, Identity=78%"; Hit description=DNA topoisomerase 2
TEIQNIKQILGLQHGKQYDSTKGLRYGHLMIMTDQDHDGSHIKGLLINFIHSFWPSLLKVPSFLVEFITPIIKATKKNETKSFYTMPEYEDWKRNLGASASSWTIKYYKGLGTSTSKEGKDYFTNIDQHKKDFVWVDDQDGNEIELAFSKKRIADRKEWLTNFQPGTYLDQREKEIKYRDFINKELILFSLADLQRSIPSMVDGFKPGQRKILFCSFKRNLVKEPRLL

SEQ ID NO: 81799 - protein, 59 aa, Setaria italica
  Transcript Sequence Number=SeqID_15825
RIQNLLKNDGLQTSDSAMIGSAYYISTCFLKLTSNTKPMCFLQLIVVSTSGVDKFFNRY

SEQ ID NO: 81800 - protein, 82 aa, Setaria italica
  Transcript Sequence Number=SeqID_15826
AAAAAATTAGSHYRMDGLGSNIAVVSAFNGASDNGEWWWRAPGAAAAAADEVQRLQRQVGGFDDEDELWATLGDMLSVNLAS

SEQ ID NO: 81801 - protein, 295 aa, Setaria italica
  Transcript Sequence Number=SeqID_15827
  Gene Ontology: Mol. function=phosphotransferase activity, alcohol group as acceptor; Cellular component=cytoplasm; Biological process =nuclear-transcribed mRNA catabolic process, nonsense-mediated decay
  Homolog annotation: Hit_ID=Q10D72; Match level="QueryCoverage=21%, HitCoverage=1%, E-value=7e-13, Identity=57%"; Hit description =Phosphatidylinositol 3-and 4-kinase family protein, expressed
  Pfam annotation: Domain name=FATC; Domain location=263-295; Score =58.0; E_value=3.5e-14; Accession=PF02260.12; Description=FATC domain
MPVSPLYIHGKALFQSYNIKIREACKNIEPLVGPLTENVEGLYSVVMKLGQLSSLHAANLHKALEVPGERESVRSQDIPSTDLLQSDSSTEKDRGSSGSVECESADLEMNTAVSLQDGCWISPPEHSYTSSSGCTTGLTQISSSDNLEKIDALMDVRAEIEGPGATDQETRDSSDNQSISSNVALTHASNIHEVETHLVEGRIESEDSSAASKQVRGQECNNSDPKSYADSLIRVTRGKNPFALSILKQVEHKLHGKDIDGTRSLNISEQVDYLLKQATSIDNLCNMYEGWTPWI

SEQ ID NO: 81802 - protein, 208 aa, Setaria italica
  Transcript Sequence Number=SeqID_15828
  Homolog annotation: Hit_ID=Q7XST0; Match level="QueryCoverage=83%, HitCoverage=72%, E-value=3e-28, Identity=46%"; Hit description =OSJNBa0039K24.26 protein
MNKPPAYGHGDSPYCCFHPREVVVGVCAHCLKDRLLLLLNKDPTTQQQQGQLRRRRTSSSSISLPKVFALGSSFLQRLDSRHHRPDHDDAAHSDGTTSAASLENSFISIKFEDNGKATWDSHTKAEAAPPAPVRSSSSSTSVLVVEHAKRGGVTRWRKQVVGRLLQLARWKRSAAALDGKKAAGDRSKARGRGWIRSLTRRRADRPWS

SEQ ID NO: 81803 - protein, 131 aa, Setaria italica
  Transcript Sequence Number=SeqID_15829
MAEPCNVPSHDESCDERGGDYSESASFSGASSESLCSSASNLSDDATSSPPLHPSEPSSASSSMLQLDTEDPLYELSTLLAQLPIRCVYLPSSQTSLQLSSIQICLHIIQFPQERAVQILPRKVPIIHINI

SEQ ID NO: 81804 - protein, 213 aa, Setaria italica
  Transcript Sequence Number=SeqID_15830
  Gene Ontology: Mol. function=carboxylesterase activity; Cellular component=cytoplasm
  Homolog annotation: Hit_ID=Q7XR64; Match level="QueryCoverage=91%, HitCoverage=86%, E-value=6e-56, Identity=52%"; Hit description =OSJNBa0043A12.21 protein
  Pfam annotation: Domain name=Abhydrolase_2; Domain location=1-192; Score=38.7; E_value=7.1e-11; Accession=PF02230.8; Description =PhospholipaseCarboxylesterase
AQVAPYFAAPELASSVRLSFPTAPTVPIACYGDTVITAWFGISEVPITAKTVRDEKEVLKAVDYVHELLDKEIASGTSPSDIFVCGLSQGGALAIASVLLFPKTLGGCVVFSGSVPLSKSFADKVSPEARKTPVLWFHGMADGLVLFEAGHAGCAFLEELGMTCEFKAYPTLGHSMVDEELQYFQQWILSRLGISGATETARPSSSSQHKDLL

SEQ ID NO: 81805 - protein, 134 aa, Setaria italica
  Transcript Sequence Number=SeqID_15831
  Gene Ontology: Mol. function=DNA topoisomerase (ATP-hydrolyzing) activity; Cellular component=chromosome; Biological process=DNA topological change
  Homolog annotation: Hit_ID=A3AAF2; Match level="QueryCoverage=96%, HitCoverage=8%, E-value=1e-65, Identity=90%"; Hit description=DNA topoisomerase 2
  Pfam annotation: Domain name=HATPase_c; Domain location=1-130; Score =16.6; E_value=0.0013; Accession=PF02518.18; Description=Histidine kinase-, DNA gyrase B-, and HSP90-like ATPase
SILSYEILVNAADNKQRDPRMDSLKVEIDVEGCCVSVYNNGDGIPVEVHQEEGVYVPELIFGHLLTSSNYNDNEKKTTGGRNGYGAKLTNIFSTEFVIETADGRRQKKYKQVFSENMGKKSEPQITKCKQGENW

SEQ ID NO: 81806 - protein, 88 aa, Setaria italica
  Transcript Sequence Number=SeqID_15832
GPDTGCSDPAVSVLRLLALSASGVPLQMPEIAKFYRTAFLALTACPSPWVDCGDWGNTAWTAVITGGFSVLFDSSSFSSFFPLKNLKK

SEQ ID NO: 81807 - protein, 71 aa, Setaria italica
  Transcript Sequence Number=SeqID_15833
MGSRTSTWMVDLCGSPICSKQAAAASCAWKELFDSSTCMNHILVIGIAALIAVVVAIQLLVKIPRSRAPAR

SEQ ID NO: 81808 - protein, 50 aa, Setaria italica
  Transcript Sequence Number=SeqID_15834
  Homolog annotation: Hit_ID=B3TLT4; Match level="QueryCoverage=100%, HitCoverage=22%, E-value=2e-12, Identity=72%"; Hit description =Aluminum-induced protein
MLAVFSGEVVEVPAATSRTPSPKTKASELVSRFLGSSEPAVSMQLADLGH

SEQ ID NO: 81809 - protein, 71 aa, Setaria italica
  Transcript Sequence Number=SeqID_15835
  Homolog annotation: Hit_ID=B3TLT4; Match level="QueryCoverage=92%, HitCoverage=27%, E-value=4e-14, Identity=59%"; Hit description =Aluminum-induced protein
FSGEVVEVPAELVAAGSRTPSPKTKASELVSRFLGSSEPAVSMQLADLGHLAYSHTNQALLRPRKLHQLIN

SEQ ID NO: 81810 - protein, 51 aa, Setaria italica
  Transcript Sequence Number=SeqID_15836
  Homolog annotation: Hit_ID=O64438; Match level="QueryCoverage=96%, HitCoverage=20%, E-value=3e-16, Identity=79%"; Hit description=ARG10
MLPAGCFYSNALGGLKCYENPKNKVTAVPANEEEICGATFKVEGSTVLTAL

SEQ ID NO: 81811 - protein, 126 aa, Setaria italica
  Transcript Sequence Number=SeqID_15837
  Gene Ontology: Cellular component=plasma membrane
  Homolog annotation: Hit_ID=Q43661; Match level="QueryCoverage=95%, HitCoverage=44%, E-value=3e-61, Identity=94%"; Hit description=Wali7 protein (Fragment)
EIFCLFEGVLDNLGRLSQQYGLSKGANEVVLVIEAYKTLRDRAPYPASFMLSQLTGSYAFVLFDKSTNSVLVASDPEGKVPLFWGITADGCVAFSDDIDMLKGSCGKSLAPFPQGCFYFKPPRALE

SEQ ID NO: 81812 - protein, 57 aa, Setaria italica
  Transcript Sequence Number=SeqID_15838
  Homolog annotation: Hit_ID=O64461; Match level="QueryCoverage=85%, HitCoverage=20%, E-value=3e-13, Identity=69%"; Hit description =Aluminum-induced
MLSAGCFYSNALGGLKCYENPKNKVTAVPANEEEICGATFKVKKNGLLCLEEEFSFM

SEQ ID NO: 81813 - protein, 164 aa, Setaria italica
  misc_feature (155)..(155): Xaa can be any naturally occurring amino acid
  Transcript Sequence Number=SeqID_15839
  Gene Ontology: Cellular component=plasma membrane
  Homolog annotation: Hit_ID=Q43661; Match level="QueryCoverage=100%, HitCoverage=60%, E-value=3e-76, Identity=85%"; Hit description=Wali7 protein (Fragment)
RAPTPWSWATELVSRFLGSSEPAVSMQLADLGHLAYSHTNQALLRPRSFAAKDEIFCLFEGVLDNLGRLSQQYGLSKGANEVVLVIEAYKTLRDRAPYPASFMLSQLTGSYAFVLFDKSTNSVLVASDPEGKVPLFWGITADGCVAFSDDIDMLXGSCGKSLAP

SEQ ID NO: 81814 - protein, 188 aa, Setaria italica
  Transcript Sequence Number=SeqID_15840
VTEKQNRATDSVCYRRKNYRMIYQILLHGISESILGSCEIQAKKDTTFSVDQLMELPRRKKRREEKRILHPSMSMSMTLGYYQSMYVPWAEEGLVGVGVGEVPQVGQLHGHGRLRAPQEAADELRRLRLGRRRPAAGRHQLRRHLHHLAAEHRQHLHTPNQPTKKNLGILLKPNPFLIIINQGSISFL

SEQ ID NO: 81815 - protein, 212 aa, Setaria italica
  misc_feature (40)..(40): Xaa can be any naturally occurring amino acid
  misc_feature (128)..(128): Xaa can be any naturally occurring amino acid
  Transcript Sequence Number=SeqID_15841
  Gene Ontology: Cellular component=plasma membrane
  Homolog annotation: Hit_ID=Q43661; Match level="QueryCoverage=94%, HitCoverage=73%, E-value=8e-95, Identity=86%"; Hit description=Wali7 protein (Fragment)
PSPKTKASELVSRFLGSSEPAVSMQLADLGHLAYSHTNQXLPSVPRSFAAKDEIFCLFEGVLDNLGRLSQQYGLSKGANEVVLVIEAYKTLRDRAPYPASFMLSQLTGSYAFVLFDKSTNSVLVVYSXSQGKVPLFWGITADGCVAFSDDIDMLKGSCGKSLAPFPQGCFYSNALGGLKCYENPKNKVTAVPANEEEICGATFKGCFDHGIL

SEQ ID NO: 81816 - protein, 139 aa, Setaria italica
  misc_feature (22)..(22): Xaa can be any naturally occurring amino acid
  Transcript Sequence Number=SeqID_15842
  Gene Ontology: Cellular component=plasma membrane
  Homolog annotation: Hit_ID=B3TLT4; Match level="QueryCoverage=64%, HitCoverage=37%, E-value=1e-38, Identity=82%"; Hit description =Aluminum-induced protein
KSTNSVLVASDPEGKVPLFWGXVTADGCVAFSDDIDMLKGSCGKSLAPFPQGCFYSNALGGLKCYENPKNKVTAVPANEEEICGATFKVKKMVCYVLKKNSVYSTCSSGLFRSWDTIASIGHSQQGTLGSDSAEYCTVE

SEQ ID NO: 81817 - protein, 219 aa, Setaria italica
  misc_feature (42)..(42): Xaa can be any naturally occurring amino acid
  Transcript Sequence Number=SeqID_15843
  Gene Ontology: Cellular component=plasma membrane
  Homolog annotation: Hit_ID=Q43661; Match level="QueryCoverage=95%, HitCoverage=75%, E-value=1e-81, Identity=74%"; Hit description=Wali7 protein (Fragment)
RSKLVLVRSFAAKDEIFCLFEGVLDNLGRLSQQYGLSKGANXEVVLVIEAYKTLRDRAPYPASFMLSQLTGSYAFVLFDKSTNSVLVASDPEGKVPLFWGITADGCVAFSDDIDMLKGSCGKSLAPFPQGCFYSNALGGLKCYENPKNKVTAVPANEEEICGATFKVKKMVCYVLKKNSVSCSSSELHQSVVQYGVQYWYSSIKSGHSQQGTLCFGQIL

SEQ ID NO: 81818 - protein, 235 aa, Setaria italica
  Transcript Sequence Number=SeqID_15844
  Gene Ontology: Cellular component=plasma membrane
  Homolog annotation: Hit_ID=Q43661; Match level="QueryCoverage=94%, HitCoverage=81%, E-value=1e-105, Identity=84%"; Hit description =Wali7 protein (Fragment)
MLAVFSGEVVEVPAELVAAGSRTPSPKTKASELVSRFLGSSEPAVSMQLADLGHLAYSHTNQALLRPRSFAAKDEIFCLFEGVLDNLGRLSQQYGLSKGANEVVLVIEAYKTLRDRAPYPASFMLSQLTGSYAFVLFDKSTNSVLVASDPEGKVPLFWGITADGCVAFSDDIDMLKGSCGKSLAPFPQGCFYSNALGGLKCYENPKNKVTAVPANEEEICGATFKVEGSTVLTAL

SEQ ID NO: 81819 - protein, 553 aa, Setaria italica
  Transcript Sequence Number=SeqID_15845
  Gene Ontology: Mol. function=hydrolase activity; Cellular component =nucleus; Biological process=negative regulation of microtubule depolymerization
  Homolog annotation: Hit_ID=B6SH90; Match level="QueryCoverage=96%, HitCoverage=76%, E-value=0.0, Identity=86%"; Hit description=Histone deacetylase 6
  Pfam annotation: Domain name=Hist_deacetyl; Domain location=37-339; Score=464.0; E_value=2.2e-136; Accession=PF00850.11; Description =Histone deacetylase family
MAAAPAPPAVAASRAARVGLLYDERMCAHATPDGEEHPENPERLRAIWRKLSAEGVASRCVVLKAKEAEDKYIASVHSQNHIKLMKEISSKKYDSSRNKIARKYNSIYFNKGSSESAVLAAGSVIEVAEKVAAGELSSAIALVRPPGHHAEHDEAMGFCLFNNVAVAANYLLNERPDLGIKKILIVDWDVHHGNGTQKMFYNDPRVLFFSVHRFDYGSFYPAEGDASHCFIGEEAGKGYNINVPWEHGKCGDADYIAAWDHVLLPVTEAFDPDIILVSAGFDAALGDPLGGCCITPNGYALLLTKLLGFAKGRIVMALEGGYNLRSIANSVSACAKVLLGDKFTFSSPEMQPFESTWRVIQAVRNELKTCWPVLSSKLPENLSLRIKPSPSELYASSDSEPDSEDVDELSGAVSSVNVIQFADDAISEHLSKMKLDEDNLAVKTASSCSTAEHHPTDSVQVDKGVSVVLSKRISDLSLAWRSDLSRIYVWYASFGSNMWKPRFLCYIQGGKVEGMSIPCCGSRDTSSPKGIMWKIVPHRLLFGRSSTPCWGTG

SEQ ID NO: 81820 - protein, 220 aa, Setaria italica
  Transcript Sequence Number=SeqID_15846
  Gene Ontology: Mol. function=hydrolase activity; Cellular component =nucleus
  Homolog annotation: Hit_ID=B6SH90; Match level="QueryCoverage=100%, HitCoverage=31%, E-value=1e-110, Identity=88%"; Hit description =Histone deacetylase 6
SRIYVWYASFGSNMWKPRFLCYIQRGKVEGMSIPCCGSRDTSSPKGIMWKIVPHRLLFGRSSTPCWGTGGVAFLNPEINYNEKSYVCMYKITLEQFNDILFQENRLVLEDGTDGNVVYPDSPLIGSSEVEFMSTNKAIHLEPIKDSWYSNVLYLGDEDELPILTMTCPSSDIERYKSGELPLAPPSKTYAATLIKGLVEGEQLDADGAASYINAAAARGL

SEQ ID NO: 81821 - protein, 103 aa, Setaria italica
  Transcript Sequence Number=SeqID_15847
  Gene Ontology: Mol. function=hydrolase activity; Cellular component =plasma membrane
  Homolog annotation: Hit_ID=B6T6U1; Match level="QueryCoverage=98%, HitCoverage=42%, E-value=4e-41, Identity=84%"; Hit description=Endo -1,3;1,4-beta-D-glucanase
MASSQCCENPPALDPAGGAGKVVDSFGGLKAYVAGAEDSKAAVVLIADVFGFEAPNLRKIADKVALSGYFVVVPDFFHGDAYIPENEKPIHEWLKSHAPEKRV

SEQ ID NO: 81822 - protein, 318 aa, Setaria italica
  Transcript Sequence Number=SeqID_15848
  Gene Ontology: Mol. function=hydrolase activity; Cellular component =plasma membrane
  Homolog annotation: Hit_ID=B6T6U1; Match level="QueryCoverage=75%, HitCoverage=100%, E-value=1e-102, Identity=78%"; Hit description =Endo-1,3;1,4-beta-D-glucanase
  Pfam annotation: Domain name=DLH; Domain location=108-317; Score =83.8; E_value=6e-22; Accession=PF01738.10; Description=Dienelactone hydrolase family
  Subcellular localization annotation: CTP_CleavageSite=52; ConfidenceScore=5.33e-01
RRPAGRPGPLRSFPTQFGISNRRSALAIPRWKNPRDHGTLSTCPPFIPSPVRCSRLVPSAAPIFASAHHHIPTERTERGMASSQCCENPPALDPAGGAGKVVDSFGGLKAYVAGAEDSKAAVVLIADVFGFEAPNLRKIADKVALSGYFVVVPDFFHGDAYIPENEKPIHEWLKSHAPEKGFEDAKPVIAALKEQGVSAIGAAGYCWGAKVVVELSKAQEIQAAVLLHPSFVSVDDMKEVKCPISILGAEVDKMSPPELVKQFEQVLSAKSGVGHFVKVFPGVSHGWSVRYSHDDAAAVKSAEEALADMIDWFNKNLK

SEQ ID NO: 81823 - protein, 80 aa, Setaria italica
  Transcript Sequence Number=SeqID_15849
MLRREMCRAGDAAYGGFSDQRHAGELFATRLYGKSEAGAGVWAPRTAAAAACRAGGRRRVPVLLVLRAGGASEGERFPAA

SEQ ID NO: 81824 - protein, 250 aa, Setaria italica
  Transcript Sequence Number=SeqID_15850
  Gene Ontology: Cellular component=integral to membrane
  Homolog annotation: Hit_ID=B9HSH0; Match level="QueryCoverage=58%, HitCoverage=17%, E-value=8e-16, Identity=40%"; Hit description=Pho1 -like protein (Fragment)
  Pfam annotation: Domain name=SPX; Domain location=2-250; Score=6.5; E_ value=1.4e-06; Accession=PF03105.11; Description=SPX domain
MVKFSREYEASIIPEWKAAFVDYKCLKKLIKRIKVARRDAGPPPPLLAGGTTTAGYGFSVLDPVRALTARFARSTAASPEGEEESLESDSGELVRATDKHEQEFLEQADEELEKVNKFYASQEGELLARGDALIEQLRILADVKRILADHVAASRRGGPAGRRALGRAASMPPPSHSPSVNGSSGRHLLSGLASPQSMSDGSVELQQARVAEGAAVAEEVMAALERNGVSFVGGGLAKAKKYGSGKQLMG

SEQ ID NO: 81825 - protein, 196 aa, Setaria italica
  misc_feature (18)..(18): Xaa can be any naturally occurring amino acid
  Transcript Sequence Number=SeqID_15851
  Gene Ontology: Mol. function=aspartic-type endopeptidase activity; Biological process=RNA-dependent DNA replication
  Homolog annotation: Hit_ID=Q2R0G5; Match level="QueryCoverage=92%, HitCoverage=6%, E-value=4e-28, Identity=39%"; Hit description =Retrotransposon protein, putative, unclassified
IKLSPYHTIPSAEQLKKXKYCKWHNATSHDTNECKIFRQQIQSVIEQGRLKFEVPTKSAKPMKIDQHPFPTNMVDTGKNSLQTKVLTSESAKKSGAVDPRNQAMPEDVKGKRRMEDEDGESEEPRITSQFLLQKYQRQHERSRSREEAMRRHEDHWRCPFFIHCWESNLRLLSADNCPECNGPYRGNRPFNRSRSR

SEQ ID NO: 81826 - protein, 108 aa, Setaria italica
  Transcript Sequence Number=SeqID_15852
  Gene Ontology: Mol. function=oxidoreductase activity; Cellular component=extracellular region; Biological process=oxidation reduction
  Homolog annotation: Hit_ID=Q9M5B5; Match level="QueryCoverage=82%, HitCoverage=14%, E-value=5e-32, Identity=68%"; Hit description =Ascorbate oxidase AO1
  Pfam annotation: Domain name=Cu-oxidase_2; Domain location=1-72; Score=42.5; E_value=1.7e-09; Accession=PF07731.6; Description =Multicopper oxidase
FWVLGYGDGVYEHERDSGKLNTANPPLRNTVVLFPHGWTVLRFVADNPGVWAFHCHIEPHLHLGMGVIFAEGMEKLRELNVPREAVTCGAAKSVAALPLAPAVAPSPP

SEQ ID NO: 81827 - protein, 233 aa, Setaria italica
  Transcript Sequence Number=SeqID_15853
  Gene Ontology: Mol. function=oxidoreductase activity; Cellular component=extracellular region; Biological process=oxidation reduction
  Homolog annotation: Hit_ID=Q5Z5T3; Match level="QueryCoverage=96%, HitCoverage=34%, E-value=2e-76, Identity=62%"; Hit description =Putative L-ascorbate oxidase
  Pfam annotation: Domain name=Cu-oxidase_2; Domain location=92-225; Score=153.0; E_value=9.3e-43; Accession=PF07731.6; Description =Multicopper oxidase
GVTPETPAWDNVTRSKEFTYRIKARAGTARPPAAVDRRITMLNTQNRFKGHIKWAINHVTLSLPATPYLGAYFYGIEDVAFDATAESPDTYDRSYDIEKPPDAQAPEAMAPTTASDRVFRIASGAVVDVVLQNANALEAGVSEVHPWHLHGHDFWVLGYGDGVYEHERDSGKLNTANPPLRNTVVLFPHGWTVLRFVADNPGVWAFHCHIEPHLHLGMGVIFAEAMEPRRQGA

SEQ ID NO: 81828 - protein, 609 aa, Setaria italica
  Transcript Sequence Number=SeqID_15854
  Gene Ontology: Mol. function=oxidoreductase activity; Cellular component=extracellular region; Biological process=oxidation reduction
  Homolog annotation: Hit_ID=B6SZ55; Match level="QueryCoverage=99%, HitCoverage=99%, E-value=0.0, Identity=64%"; Hit description=L -ascorbate oxidase
  Pfam annotation: Domain name=Cu-oxidase; Domain location=165-357; Score=193.7; E_value=5.2e-55; Accession=PF00394.14; Description =Multicopper oxidase
  Pfam annotation: Domain name=Cu-oxidase_2; Domain location=444-585; Score=172.3; E_value=1.4e-48; Accession=PF07731.6; Description =Multicopper oxidase
  Pfam annotation: Domain name=Cu-oxidase_3; Domain location=37-154; Score=199.6; E_value=8.2e-57; Accession=PF07732.7; Description =Multicopper oxidase
  Pfam module annotation: Pfam domain module=Cu-oxidase::Cu-oxidase _2::Cu-oxidase_3; Domain location=165-357::444-585::37-154
MANPCGPLAVHLLICIALMLFAHQVAPAPVTRRFKWDVEYIMWAPDCQQSVMIGINGKFPGPTITANAGDVISVEVTNNLHTEGIVIHWHGIKQIGTPWADGTASISQCPIESGGNFTYEFLVDKPGTFFYHGHFGMQRAAGLYGSLIVNATDKQPEPFAADYDGEHSMLLSDWYHENVYAQAAGLDGKDKHWQWVGEPQTLLINGRGQFGCSLGITRDRRACDRRKKDAFCPEGDKSERCEMIRRSECGPFCEGTKCSPVAFDVEPGKTYRLRIASTTSLSALNVQVQGHKLTVVEADGNFVEPFEVTDIDIYSGESYSVLLKTDQRPSSYWISVGVRGRRPKTQPALAILNYTNSKPDSWPSGVTPETPAWDNVTRSKEFTYRIKARAGTARPPAAVDRRITMLNTQNRFKGHIKWAINHVTLSLPATPYLGALKLGLKNTLTAAPPPETFSRGYDVTLPPANPNTTVGGNVYVLAHNATVDVVLQNANALARNVSEVHPWHLHGHDFWVLGYGEGPYRGDASDEARLNLRDPPLRNTAVIFPYGWTAIRFVADNPGVWAFHCHIEPHLHMGMGVVFAEAVDRVGKVPKEAVSCGATASALMNGDHL

SEQ ID NO: 81829 - protein, 176 aa, Setaria italica
  Transcript Sequence Number=SeqID_15855
  Gene Ontology: Mol. function=phosphotransferase activity, for other substituted phosphate groups; Cellular component=membrane; Biological process=phospholipid biosynthetic process
  Homolog annotation: Hit_ID=B6TPV7; Match level="QueryCoverage=98%, HitCoverage=52%, E-value=3e-85, Identity=94%"; Hit description =Cardiolipin synthetase
  Pfam annotation: Domain name=CDP-OH_P_transf; Domain location=11-162; Score=66.7; E_value=8.6e-17; Accession=PF01066.13; Description=CDP -alcohol phosphatidyltransferase
RIVNEWYLPAFATLAVSGASDWLDGFLARKMGINSVFGSYLDPLADKVLIGCVAVAMVQKELLHPGLVGLVVMRDLLLVGGAFYKRASSLGWKWNSWSEYVNLDAIHREKVEPLFISKVNTVFQLMLVAAALLQPEFGTEETQNYITLLSWLVATTTITSTIGYGVKYYRIKPRSP

SEQ ID NO: 81830 - protein, 48 aa, Setaria italica
  Transcript Sequence Number=SeqID_15856
  Gene Ontology: Mol. function=structural constituent of ribosome; Cellular component=ribonucleoprotein complex; Biological process =translation
  Homolog annotation: Hit_ID=Q9LT09; Match level="QueryCoverage=100%, HitCoverage=30%, E-value=8e-19, Identity=97%"; Hit description=50S ribosomal protein L24
  Pfam annotation: Domain name=KOW; Domain location=17-48; Score=45.8; E_value=1.7e-10; Accession=PF00467.21; Description=KOW motif
MGWKAAEKLIRHWKILRGDNVMIIRGKDKGETGLIKRVIRSQNRVIVE

SEQ ID NO: 81831 - protein, 386 aa, Setaria italica
  Transcript Sequence Number=SeqID_15857
  Gene Ontology: Mol. function=transferase activity
  Homolog annotation: Hit_ID=Q7XZU4; Match level="QueryCoverage=96%, HitCoverage=58%, E-value=1e-170, Identity=76%"; Hit description=HGA6
  Pfam annotation: Domain name=DUF563; Domain location=3-252; Score =311.3; E_value=2e-90; Accession=PF04577.6; Description=Protein of unknown function (DUF563)
RPPLCDFSDFRSDICDLAGDIRLDANASAFVVVDPAIGASDGGQLHKVRPYPRKGDETCMGRITEITVRSTGDDAARCTRAHSAPAVVFSIGGYTGNIFHDFSDVLVPLFNTAHRYGGDVQLVMANVASWWLVKYDKLLRELSRHAPLDLAKAGAAGEVHCFGHATVSLRAHKELIIERERSIDGLATPDFTRFIRRALSLPRDAPTRLGDGTGRKPRLLIISRHRTRLLLNIDAVIRAAEEVGFEAVVNESDVGNDISEVGALINSCDALLGVHGAGLTNMMFLPPGATLVQIVPWGGLQWMARADYGDPAEAMGLRYVQYEVAVGETTLKDKFPAGHEIFTNPTALHKKGFGFIRQTLMDGQDITVDVGRFREVLLQVLNNLAQ

SEQ ID NO: 81832 - protein, 51 aa, Setaria italica
  Transcript Sequence Number=SeqID_15858
EPSTSNTQPMIRSLVKLTFKLSNFLYLDDEISKFLIFHLHKYEFYCNLSNV

SEQ ID NO: 81833 - protein, 85 aa, Setaria italica
  Transcript Sequence Number=SeqID_15859
SKLAAWRHKTSGVQHRKLRITCPGLISFFIEDYNPSKTLETCFDKKAHTPFPKIIYSPKERLQESQLKMISQGAIVFRCPQAETR

SEQ ID NO: 81834 - protein, 637 aa, Setaria italica
  Transcript Sequence Number=SeqID_15860
  Homolog annotation: Hit_ID=Q9M1Y3; Match level="QueryCoverage=88%, HitCoverage=91%, E-value=0.0, Identity=61%"; Hit description=F -box/ankyrin repeat protein SKIP35
MEVEKKKNSQIGSKGKEVQSKNPRREEQEPGVQSKNPRREEPLASSEVVVDEPAVAEGGDTVDDANNGSSKESPLPPKDSKNSKGCVGKKSRSVSSDFGEEMDLELGNGDKENGRQQERKLSRQDRVELCRLFQHAVSSHDWESAEGLVGKADAQGLNDVLCVTVDAIWFLSDRDELHAVVGLIRRIVSEGAKDFTRAALRTSFLASCVSACRGRSTSLADAVSFMGQKLHERLQESQGDEVLKAEASAKVHKFTEWALKCIGLHSRVRENKGKGNHDTVIEVQLQLSAFKTFLDLADNELTGKDFTEAFDAACFPLTLFSTTFDQGWASGISAAAIQGLLELLVEGGADNVNQCFLEAARYGSTELVRILLQIAQRNSLDIDVDLALGFAAHYGKIETMGCLVEEGNAVGFLGPLMRAAERGCLQVVEWFVNHGCREMELCLALTAATSSSQIAVAAYLLPLVPQHVLAPLSIEIIKAAGERTTGSLHGVDFLLRSDFLNDPAATYAVADSIAKSADEAVDAKLRSFMNEHWSEAAFSAGFESAQQQFVNFMRIMERGESPICLRDLPIELVIAMAYLPLYKECINSSGRLLPQRLRGQLVEAASRLEGRQMDSGSQSRELLAILEHHIPQFMTQT

SEQ ID NO: 81835 - protein, 359 aa, Setaria italica
  Transcript Sequence Number=SeqID_15861
  Gene Ontology: Mol. function=fructose-bisphosphate aldolase activity; Cellular component=chloroplast; Biological process=metabolic process
  Homolog annotation: Hit_ID=B6SSU6; Match level="QueryCoverage=100%, HitCoverage=100%, E-value=0.0, Identity=89%"; Hit description =Fructose-bisphosphate aldolase, cytoplasmic isozyme 1
  Pfam annotation: Domain name=Glycolytic; Domain location=11-359; Score=844.3; E_value=7.2e-251; Accession=PF00274.11; Description =Fructose-bisphosphate aldolase class-I
MSAFVGKYADEMVKTAKYLATPGKGILASDESTGTIGKRLSSINLENVESNRQALRELLFTAPGVFDYLSGVILFEETLYQKTSDGKPFVDLLTAGGVVPGIKVDKGTVEIAGTNGETTTQGLDSLGARCAKYYEAGARFAKWRAVLKIGASGEPSELAVKQNAEGLARYALICQENGLVPIVEPEILTDGGHDIKTCAAVTERVLAAVFKSLNDHKVLLEGTLLKCNMVTPGSDSPKVGAEVIAEYTVAALRRTVPPAVPGVVFLSGGQSEEEATQNLDAMNKLEVLKPWTLSFSFGRALQQSTLKKWLGKKENVAAAQATFLVRCKANSEAALGKYAGSGAGDAAASESLYVKGYKY

SEQ ID NO: 81836 - protein, 118 aa, Setaria italica
  Transcript Sequence Number=SeqID_15862
  Homolog annotation: Hit_ID=B9R6W6; Match level="QueryCoverage=73%, HitCoverage=22%, E-value=8e-22, Identity=57%"; Hit description=Cw7 protein, putative
  Pfam annotation: Domain name=DUF2045; Domain location=1-117; Score= -1.9; E_value=1e-10; Accession=PF09741.1; Description=Uncharacterized conserved protein (DUF2045)
MLVLMTYFHSIGDLRNRAAKSKQLSPVYKVTKTVYASPSRVNFHLDRRKAVETVPAYPNIYFSVDDFDDTFDAVVLSDPEHCYCVILNAHDGAAFPEETESKNPGSNVQPELSSGSAQ

SEQ ID NO: 81837 - protein, 408 aa, Setaria italica
  Transcript Sequence Number=SeqID_15863
  Homolog annotation: Hit_ID=B9R6W6; Match level="QueryCoverage=92%, HitCoverage=95%, E-value=1e-110, Identity=56%"; Hit description=Cw7 protein, putative
  Pfam annotation: Domain name=DUF2045; Domain location=61-331; Score =570.6; E_value=1.8e-168; Accession=PF09741.1; Description =Uncharacterized conserved protein (DUF2045)
MAAPPSPPSPSPSGEIAVHRFSGAMDASSSPSRTELLSMVKKHSHLIGWTIVDAEDDASDVGMDDKFWHEMLDLFFVRGGKSKRSEEDDLVFFVNNMKLHGYGFNDNMEDPPPFFVRRWAPTLEKVINVNTLEVDWERSFYLNLIAHTSYTVTVAIFSIGDLRNRAAKSKQLSPVYKVTKTVYASPSRVNFHLDRRKAVETVPAYPNIYFSVDDFDDTFDAVVLSDPEHCYCVILNAHDGAAFPEETESKNPGSNVQPELSSGSAQEKPPKRTLFSGYVSYQNVREAYDAGRSKFGSLLSLGHDHTKLDRLYMRGPEGRGEVEVAVSGIADQSREKSKKDPGDSFRVLVHRAASAASKLAKHAYESASANKRMDDELVPLKCCLMSVSLPWDYIAHDLLHKDTPPLDF

SEQ ID NO: 81838 - protein, 79 aa, Setaria italica
  Transcript Sequence Number=SeqID_15864
  Gene Ontology: Mol. function=electron carrier activity; Cellular component=endoplasmic reticulum membrane; Biological process =oxidation reduction
  Homolog annotation: Hit_ID=A7U1X5; Match level="QueryCoverage=98%, HitCoverage=15%, E-value=4e-12, Identity=50%"; Hit description=P450
HPRVLKNVQDEIRAVVGRKQRASRDDVSKLKNLKMVVKEILRLHPPLTLLLPRETIQQVNITGYDVPANTRIIVNAWAI

SEQ ID NO: 81839 - protein, 63 aa, Setaria italica
  Transcript Sequence Number=SeqID_15865
  Gene Ontology: Cellular component=photosystem II reaction center; Biological process=photosynthesis
  Homolog annotation: Hit_ID=Q4FFR5; Match level="QueryCoverage=77%, HitCoverage=100%, E-value=7e-16, Identity=88%"; Hit description =Photosystem II protein I (Fragment)
  Pfam annotation: Domain name=PsbI; Domain location=28-63; Score=80.4; E_value=6.7e-21; Accession=PF02532.6; Description=Photosystem II reaction centre I protein (PSII 4.8 kDa protein)
TKPILVDLCSKEKWVIYSLTKNLGDYVMLTLKLFVYTVVIFFVSLFIFGFLSNDPGRNPGREE

SEQ ID NO: 81840 - protein, 332 aa, Setaria italica
  Transcript Sequence Number=SeqID_15866
  Gene Ontology: Mol. function=transferase activity, transferring glycosyl groups; Cellular component=chloroplast
  Homolog annotation: Hit_ID=B6UEE3; Match level="QueryCoverage=99%, HitCoverage=40%, E-value=1e-126, Identity=66%"; Hit description =Phosphoribosylanthranilate transferase
  Pfam annotation: Domain name=C2; Domain location=107-190; Score=60.5; E_value=6.5e-15; Accession=PF00168.22; Description=C2 domain
LVTVEEKVAAGRDEPVGRVVEREAAPYVYRNDLAKAVDSKWLPLSRALSADEAAAGNPHNKERQFSSKIHLRLSLETAYHVLDESTHYASDLQPSAKKLRKGSIGILELGILSARNLAGPTKHPYCVAKYGAKWVRTRTALNTLSPQWNEQYTWEVFDPCTVLTVAAFDNAFVHGAGDGSKKDQRIGKVRVRLSTLEIDRVYTHYYPLMALAPSGLKKTGELHLAVRFTCTAWANMLGMYGRPLLPKMHYTHPISVLQLDYLRFQAMQQVAARLGRAEPPLRREVVEYMLDVDSHMFSLRRSKANFYRITSLFSGAVAVGKWMDGICKWKNP

SEQ ID NO: 81841 - protein, 109 aa, Setaria italica
  Transcript Sequence Number=SeqID_15867
WVNKLQGAQRQAHYGGAALFPWCLDQALRLSAHSCIWWTPVAGEGPDEGLEKGGAARRLVARSLLGSLLLPKILIQIMPPPFHQLQSIYDLMFIESEQKPKRNRTKGTN

SEQ ID NO: 81842 - protein, 245 aa, Setaria italica
  Transcript Sequence Number=SeqID_15868
  Gene Ontology: Mol. function=DNA binding; Cellular component=nucleus; Biological process=regulation of transcription, DNA-dependent
  Homolog annotation: Hit_ID=Q2QM59; Match level="QueryCoverage=100%, HitCoverage=80%, E-value=8e-21, Identity=60%"; Hit description =Transcription factor PCF8
  Pfam annotation: Domain name=TCP; Domain location=1-116; Score=92.6; E_value=1.4e-24; Accession=PF03634.5; Description=TCP family transcription factor
GLRDRRVRLSVPTAIQFYDIQDRLGVDQPSKAIEWLIRAAGAAIDELPSLDCSFALPAAGAASSPPAAGDDAEVSTSETSKSSVLSLANAPADNASASAHQANHAYNGNAGGSGGAFAELLHCSNDSKPMQQQQQPTLAYYAAQLPSSHAAPAMPFETMPQLAFLQEQPHPAVGFDRGTLQSNAAIAAPLWPPSQQACFLQRFAAAPADAAGLPFFLGGGAAAPPVTVNAEPRLQLWDFKQERKT

SEQ ID NO: 81843 - protein, 68 aa, Setaria italica
  Transcript Sequence Number=SeqID_15869
MGPGGSRARQNAMRSGVVVLGAVAFGYLSFRVGFKPYLDQAQEAMNSSHDPAAAAAARDASDDRPGDG

SEQ ID NO: 81844 - protein, 185 aa, Setaria italica
  misc_feature (178)..(178): Xaa can be any naturally occurring amino acid
  Transcript Sequence Number=SeqID_15870
  Pfam annotation: Domain name=FBA_1; Domain location=18-146; Score= -46.6; E_value=0.019; Accession=PF07734.5; Description=F-box associated
  Pfam annotation: Domain name=FBA_3; Domain location=18-131; Score= -18.7; E_value=0.0066; Accession=PF08268.4; Description=F-box associated
  Pfam module annotation: Pfam domain module=FBA_1::FBA_3; Domain location=18-146::18-131
AGVWRQVGSFRGAPTDRGVHVNGTVYYLTKFRYIASSRINCLNLESEKFDVMTLPPRKSYGGHCSLTEIEGRLCLLVVDGVLEGPPRTMDILMLNSDDKQSWTPRYHFSLPWLMPSCYFTPKHTLFHDRKIWVQLLARNLYCFDPSSGSEELTVAWPELDFPFSTHTFIESIVPLRKXYFIKQIQ

SEQ ID NO: 81845 - protein, 207 aa, Setaria italica
  Transcript Sequence Number=SeqID_15871
  Gene Ontology: Mol. function=catalytic activity; Cellular component =cytoplasm; Biological process=nucleobase, nucleoside, nucleotide and nucleic acid metabolic process
  Homolog annotation: Hit_ID=Q84YD8; Match level="QueryCoverage=74%, HitCoverage=98%, E-value=5e-70, Identity=83%"; Hit description =ATPase-like protein
  Pfam annotation: Domain name=HIT; Domain location=65-158; Score =102.6; E_value=1.4e-27; Accession=PF01230.15; Description=HIT domain
  Subcellular localization annotation: CTP_CleavageSite=49; ConfidenceScore=5.50e-01
SLVGFLPLLCSRAVLPLSLAPPPRFLRRLPHPRAVSSSSSSQLYPPPPPGMEVSSYKFGPYKIDAREVFHATPLSYAMVNLRPLLPGHVLVCPKREVKRFADLSSDETSDLWVTAKEVGVRLEQYHKASSLTFAIQDGPQAGQTVPHVHIHVIPRKKGDFEKNDEIYDAIDVKEKELKEKLDLDIERKDRSMEEMAHEANEYRALFS

SEQ ID NO: 81846 - protein, 188 aa, Setaria italica
  Transcript Sequence Number=SeqID_15872
  Gene Ontology: Mol. function=oxidoreductase activity
  Homolog annotation: Hit_ID=B6TN73; Match level="QueryCoverage=97%, HitCoverage=49%, E-value=6e-98, Identity=93%"; Hit description=Aldo -keto reductase/ oxidoreductase
  Pfam annotation: Domain name=Aldo_ket_red; Domain location=2-188; Score=-16.7; E_value=4.5e-07; Accession=PF00248.13; Description =Aldoketo reductase family
WGYQESMDSELQECFNLALKNGINLFDTADSYGTGKLNGQSERLLGRFIREFEGPIKSPDDVVIATKFAAYPWRLTSGQFVGACKSSLERLQLDRLGIGQLHWSTANYAPLQERALWDGLVEMYEKGLVRAVGVSNYGPKQLLKIHSYLASKGVPLSSAQVQFSLLSMGDEQMELKTVCDSLGITYYN

SEQ ID NO: 81847 - protein, 467 aa, Setaria italica
  Transcript Sequence Number=SeqID_15873
  Gene Ontology: Mol. function=calcium ion binding; Cellular component =integral to membrane; Biological process=regulation of small GTPase mediated signal transduction
  Homolog annotation: Hit_ID=UPI0001A84BD6; Match level="QueryCoverage =100%, HitCoverage=56%, E-value=0.0, Identity=86%"; Hit description =plant synaptotagmin
  Pfam annotation: Domain name=C2; Domain location=139-218; Score=84.9; E_value=2.8e-22; Accession=PF00168.22; Description=C2 domain
  Pfam annotation: Domain name=C2; Domain location=271-349; Score=98.3; E_value=2.7e-26; Accession=PF00168.22; Description=C2 domain
  Pfam module annotation: Pfam domain module=C2::C2; Domain location =139-218::271-349
ETSTSKGLNPTWNSTFNMVLHGETGIVKFLLYELDSGGVKFNFLTSCEIKVKYVHDGSTIFWAIGHNSGVVAKHTQHCGQEVGMVVPFEDINGELTVSLVLKEWQFSDGSVTLSNSPSNGHQSPFDGSPNLQSVTGRRLRVRVVEGRALTANSKSGKCDPYVKLQYGKALYRTKTLSHTVRPVWNDKFEFDEIAGGECLKIKCYNADIFGDESIGSARVNLEGLLDGANRDVWVPLEKIDSGEIRLEIEPIKNDHNNSMQSSSSNAGAGWIELVIIEARDLVAADLRGTSDPYVRVQYGNKKKRTKVIYKTLSPQWNQTFEFPETGEPLTLHVKDHNAVLPTASIGHCTVEYSMLSPNQSAEKWIPLQGVKSGEIRVKIARRVPMSDSEKKTTLGTDPSGKGHKIATQMRDSLKKFTGLIDEGGDPEALSLAVTEMEGIQGEQEEYIEVLEREKAMLLHKIHELGSE

SEQ ID NO: 81848 - protein, 422 aa, Setaria italica
  Transcript Sequence Number=SeqID_15874
  Homolog annotation: Hit_ID=UPI0001A84BD6; Match level="QueryCoverage =97%, HitCoverage=50%, E-value=0.0, Identity=88%"; Hit description =plant synaptotagmin
  Pfam annotation: Domain name=C2; Domain location=291-386; Score=25.7; E_value=0.00019; Accession=PF00168.22; Description=C2 domain
MVKKKLKKLYGKDAREFFNQVMVEQPLLPFLIPLGLFAWFVERWVVPFSNWVPLAAAVWATIQYGRFKRRITVEDLNKRWKHLILNTTPTTPIEPCEWLNKLLTEVWPNYMEPKLSRRFQSTVERRLKNRKPKLIDKIELLEFSLGSCPPTLGDEGMRWITSGDQQVMCLGFDWNSHEMSVMFLAKLAKPLIGTCRIVINSIHIKGDLLLSPILDGEAILYSFESTPEVRIGVAFGSGGSQAIPGMELPGVSTWLVKLLTETIGKTMVEPRRLCFSLPAVDLRKEAVGGVLSVTVVSASNLCKSTANRQSSNGGTMPGIADNKVSQTFVEVEVGNLMRKTSTSKGLNPTWNSTFNMVLHGETGIVKFLLYELDSGGVKFNFLTSCEIKVKYVHDGSTIFWAIGHNFLVVVRLKFYLLLNLFV

SEQ ID NO: 81849 - protein, 98 aa, Setaria italica
  misc_feature (65)..(65): Xaa can be any naturally occurring amino acid
  misc_feature (79)..(79): Xaa can be any naturally occurring amino acid
  Transcript Sequence Number=SeqID_15875
DGRTIYLIFSLRFLCLNCTIETLLWSHFFHLFLSLFWREFVHKKNAHLLCILEIMGCLMNYLKLXQMRLSGLRYLYCFXSYFRLSGILLFTGIAPCYY

SEQ ID NO: 81850 - protein, 135 aa, Setaria italica
  Transcript Sequence Number=SeqID_15876
  Gene Ontology: Mol. function=hydrolase activity, hydrolyzing O -glycosyl compounds; Cellular component=cell wall; Biological process= carbohydrate metabolic process
  Homolog annotation: Hit_ID=Q94IY5; Match level="QueryCoverage=77%, HitCoverage=12%, E-value=6e-52, Identity=89%"; Hit description =Putative alpha-L-arabinofuranosidase/beta-D-xylosidase isoenzyme ARA- I
  Pfam annotation: Domain name=Glyco_hydro_3; Domain location=1-99; Score=-116.9; E_value=0.045; Accession=PF00933.13; Description =Glycosyl hydrolase family 3 N terminal domain
CCKHFAAYDVDAWFDADRLTFDARVQERDMVETFERPFEMCIRDGDASCVMCSYNRVNGIPACADARLLSETVRGQWQLHGYIVSDCDSVRVMVRDAKWLNFTGGGNHGKKSSSKDAASGGGGGGGRPPGQQQRQ

SEQ ID NO: 81851 - protein, 367 aa, Setaria italica
  misc_feature (282)..(282): Xaa can be any naturally occurring amino acid
  Transcript Sequence Number=SeqID_15877
  Gene Ontology: Mol. function=hydrolase activity, hydrolyzing O -glycosyl compounds; Cellular component=cell wall; Biological process= carbohydrate metabolic process
  Homolog annotation: Hit_ID=Q94IY5; Match level="QueryCoverage=96%, HitCoverage=42%, E-value=1e-175, Identity=83%"; Hit description =Putative alpha-L-arabinofuranosidase/beta-D-xylosidase isoenzyme ARA- I
  Pfam annotation: Domain name=Glyco_hydro_3; Domain location=1-137; Score=-74.7; E_value=0.00015; Accession=PF00933.13; Description =Glycosyl hydrolase family 3 N terminal domain
  Pfam annotation: Domain name=Glyco_hydro_3_C; Domain location=213 -367; Score=15.0; E_value=4.2e-08; Accession=PF01915.14; Description =Glycosyl hydrolase family 3 C terminal domain
  Pfam module annotation: Pfam domain module=Glyco_hydro_3::Glyco_hydro_ 3_C; Domain location=1-137::213-367
GAVRTGPAPRPIKVSSCCKHFAAYDVDAWFDADRLTFDARVQERDMVETFERPFEMCIRDGDASCVMCSYNRVNGIPACADARLLSETVRGQWQLHGYIVSDCDSVRVMVRDAKWLNFTGVEATAAAMKAGLDLDCGMFWEGARDFFTTYGVDAVRQGKIKEADVDNALTNVYLTLMRLGFFDGMPEFESLGAGDVCTEEHKELAADAARQGMILLKNDARRLPLDPNRINSVSLVGLLEHINATDVMLGDYRGKPCRVVTPYNAIRKMVNATYVHACDNGXCDTAEGMGRAARTAKLGDTTIVIAGLNMSVERESNDREDLLLPWNQTTWISAVAEASPHPIVLVIMSAGGVDVSFAQSNPKIRSS

SEQ ID NO: 81852 - protein, 170 aa, Setaria italica
  Transcript Sequence Number=SeqID_15878
  Homolog annotation: Hit_ID=Q53MB0; Match level="QueryCoverage=30%, HitCoverage=7%, E-value=1e-14, Identity=70%"; Hit description=GRAS family transcription factor containing protein, expressed
MGSSYDPSPSPGAIADDLSFYLSDLGPTSPSAYLDLPPTPHHEQPQPQPQPQPSYPQPNGGAGAAASPEDMVLPFISRMLMEEDIDDKFFYEYPDHPALLQAQQPFLDILSDDTSTSPSATHSGASVSHPASSCSSDAANAPLTPAAVDSYASAPGAQFNGFDLDPAAFF

SEQ ID NO: 81853 - protein, 79 aa, Setaria italica
  misc_feature (67)..(67): Xaa can be any naturally occurring amino acid
  Transcript Sequence Number=SeqID_15879
MASWGVSHFTAKRAEGLVRKGLLYERTAADEWRLPETEQVPSPPAGYVVSFAHFHERGFASPPSRFXRGLLHYYGLELQ

SEQ ID NO: 81854 - protein, 361 aa, Setaria italica
  misc_feature (145)..(145): Xaa can be any naturally occurring amino acid
  misc_feature (205)..(205): Xaa can be any naturally occurring amino acid
  misc_feature (254)..(254): Xaa can be any naturally occurring amino acid
  misc_feature (288)..(288): Xaa can be any naturally occurring amino acid
  Transcript Sequence Number=SeqID_15880
  Gene Ontology: Mol. function=catalytic activity; Cellular component =endoplasmic reticulum membrane; Biological process=metabolic process
  Homolog annotation: Hit_ID=Q33AP4; Match level="QueryCoverage=99%, HitCoverage=44%, E-value=0.0, Identity=85%"; Hit description =Phosphatidylinositolglycan class O, putative, expressed
PSTFFQEKHPWMDKLQVLQKLAANEKTSARIFKALADPPTTSLQRLKALTTGGLPTFIDVGNSFGAPAIVEDNIMHQLVKNGKRVVMMGDDTWIQLYPEHFNKSFPYPSFNVKDLDTVDNGVIEHLLPSLHKNDWDVLIAHFLGXGHIFGVDSTPMIQKLEQYNQILEGVIDTLRSLSKPGGTHENTLLLVMGDHGQTLNGDHGXGGTAEEVETSLFAWSPKTPPDAVLSVLDDSSCNVDLHGEEVCISTMQQXTISALLGIPFPFGSIGHVNPELYALSTGTWDNQXMGTNACTSQNDLESWMRRYAEVLCVNCWQVKRYIDQYSATSVIGFPSEDLQHIMNLYSRAQANWSASLRTTCS

SEQ ID NO: 81855 - protein, 93 aa, Setaria italica
  Transcript Sequence Number=SeqID_15881
  Gene Ontology: Mol. function=double-stranded RNA binding; Cellular component=intracellular; Biological process=RNA processing
  Homolog annotation: Hit_ID=B9STZ1; Match level="QueryCoverage=80%, HitCoverage=21%, E-value=1e-14, Identity=48%"; Hit description =Ribonuclease III, putative
  Pfam annotation: Domain name=dsrm; Domain location=20-90; Score=54.8; E_value=3.3e-13; Accession=PF00035.17; Description=Double-stranded RNA binding motif
VLITGVGNGLGDEVGELRECKHKLTEHCIGKNWPKPIFKLEREGGPAHERKFVCSVQVETQNGTFVTIGDPMSRLKDAENSAAQKMVEPLLQL

SEQ ID NO: 81856 - protein, 208 aa, Setaria italica
  Transcript Sequence Number=SeqID_15882
  Gene Ontology: Mol. function=double-stranded RNA binding; Cellular component=intracellular; Biological process=gene silencing by RNA
  Homolog annotation: Hit_ID=Q6ATG6; Match level="QueryCoverage=87%, HitCoverage=57%, E-value=2e-74, Identity=75%"; Hit description =Ribonuclease 3-like protein 2
  Pfam annotation: Domain name=dsrm; Domain location=76-136; Score =37.7; E_value=4.7e-08; Accession=PF00035.17; Description=Double -stranded RNA binding motif
LVGQFIDSVKEELNEDLATAPYGGSVVKAPKVLADIVESIAAAVYVDCKFDLEKLWKVTRWLFEPIVTAETIDEQPVRTLHELCQKHGKVAQFKTWQRGGMMVVNVFVGGEMVGLGSSEQKVIAKLNAARDALGKLVSGAKQQVLITGVGNGLGDEVGELRECKHKLTEHCIGKNWPKPIFKLEREGGPAHERKFVCSVQALVLKMHG

SEQ ID NO: 81857 - protein, 61 aa, Setaria italica
  Transcript Sequence Number=SeqID_15883
SQIWRIYLHRKPVGKDDAGTSMFRKRSYFLSLWKLGNLKIRYKQEPPLVLHGITCMLEAGD

SEQ ID NO: 81858 - protein, 670 aa, Setaria italica
  misc_feature (325)..(325): Xaa can be any naturally occurring amino acid
  misc_feature (539)..(539): Xaa can be any naturally occurring amino acid
  Transcript Sequence Number=SeqID_15884
  Gene Ontology: Mol. function=ATP binding; Cellular component =chromosome; Biological process=response to DNA damage stimulus
  Homolog annotation: Hit_ID=UPI000186D6EE; Match level="QueryCoverage =94%, HitCoverage=60%, E-value=2e-57, Identity=27%"; Hit description =DNA double-strand break repair Rad50 ATPase, putative
  Pfam annotation: Domain name=CR6_interact; Domain location=153-341; Score=-93.9; E_value=0.044; Accession=PF10147.1; Description=Growth arrest and DNA-damage-inducibl
  Pfam annotation: Domain name=SMC_N; Domain location=34-639; Score= -134.2; E_value=0.1; Accession=PF02463.11; Description=RecFRecNSMC N terminal domain
  Pfam module annotation: Pfam domain module=CR6_interact::SMC_N; Domain location=153-341::34-639
AQVNVEIKNLKAERNTVESQLAREDESMRKCSYRLKEMESKNHKLLQALQINGADNISEAYHWVQDNKKNFRREVYGPVLLEVNVQDKLHATYLESHVPNYIWKSFITQDASDRDYMAREMKKYGIPVLNYIVDEGIRRRPLNITPEMEQLGIYSRLDQVFQAPDAVKDVLISQAILDDSYIGTDETHCRADQVSKLGISDFWTPNNHYRWSKSRYGGYMSASVDAVNPSRLFKSNLDVSDIENLRLQKEKHEKDIEGMHEALKQLQRKQRQLEDEEANIHRQKEEIINMMKSQKKKREEIQRRVDMRRRKLEDLCKEEDVESSXKKLVDQVAKLNDRRFQAMKELKDLLTEAVALKWSHTEKHMASIELDAKIWEMEKGVKKLEKDANLAAREYEDCKRITAEHKRKLAMAKQHAESIAKISDLEKEFRAMPPTIEELEAAIQDTELEANSMLFLNQNVLQEYQNRQREIESISNKLKGDKDEYEICCSEIETVKGKWLPTLRTLVSKINDTFSHNFQEMAVAGEVSLDEHGLDFDHXRQFLIKVKFRQTSQLQVLSAHHQSGGERSVSTILYLVSLQDLTNCPFRVVDEINQGMDPINERKMFQQLVRAASQINTPQCFLLTPKLLPDLEYSDACSILNIMNGPWIEKPAEVWSAGDCWRDVMRSAVH

SEQ ID NO: 81859 - protein, 216 aa, Setaria italica
  Transcript Sequence Number=SeqID_15885
  Gene Ontology: Mol. function=zinc ion binding
  Homolog annotation: Hit_ID=B6TKH8; Match level="QueryCoverage=100%, HitCoverage=58%, E-value=1e-54, Identity=60%"; Hit description=Dof zinc finger protein
GAASKNPKLAHEGAQDLNLAFPHHSGLHAPEFGAFPSLESSSVCNSGGAMASNGRGGGGGGAGPAVGALSAMELLRSSGCYMPLQMPMHMPGDYAAGGFALGEFRAPPPSQSVLGFSLDAHGPGPGAAAAGYGSSAGLQGVPENAGRLLFPFEDLKPPVSSGGGGVATGASGGDGDGNSGHPQFDHNKDQGGGAPSAGHDPPGFWNGMIGGSGASW

SEQ ID NO: 81860 - protein, 407 aa, Setaria italica
  Transcript Sequence Number=SeqID_15886
  Gene Ontology: Mol. function=mismatched DNA binding; Cellular component=intracellular; Biological process=mismatch repair
  Homolog annotation: Hit_ID=Q69MM0; Match level="QueryCoverage=91%, HitCoverage=30%, E-value=1e-128, Identity=61%"; Hit description=DNA mismatch repair protein-like
  Pfam annotation: Domain name=MutL_C; Domain location=165-325; Score =19.9; E_value=1.9e-06; Accession=PF08676.3; Description=MutL C terminal dimerisation domain
  Subcellular localization annotation: CTP_CleavageSite=23; ConfidenceScore=5.19e-01
RNDSTLTQDLLNQHNLGLDQRSRLSKGSRSRSHSAPPFYRGKQKFSRLNEPLSKLATDGDKGICINNPKDNASRPVDVLPMSSTQPVPATDGSEFPDLNFRLEDSAARITKWRDDSGQHTASNLPHGPFGCYDDVLSISSGTLHLSCTSLVPECVDRNCFEEARVLLQLDKKFIPVISGNTILLVDQHAADERIRLEELRRKVLSEEGHVVTYLDSEEELCLPETGFQLFQKYAEQIQKWGWIISSDSNSSESFKKNMNILRRQTRLVTLVAVPCILGVNLTGKDLMEFIQQLDETDGSSAMPPAVLRILNFKACRGAIMFGDPLLPSECCLIIEELKATSLCFQCAHGRPTTVPIVNVASLHDELARHQMLSGRQAESWHGLAHQGPSLERAQMRLKQLRNLRRGL

SEQ ID NO: 81861 - protein, 145 aa, Setaria italica
  Transcript Sequence Number=SeqID_15887
  Pfam annotation: Domain name=FBD; Domain location=51-100; Score=18.2; E_value=0.0011; Accession=PF08387.2; Description=FBD
ESLQLLMFAMASTNLAHIYMFLKTCQCPQLERLFVQLPTSSRDTSVGNSSKQSEEDVPGYGLNNLMTAKMIKFKGHYFEMRLVSFLLRKASVLKKLLLVAPKGHIKALGKGTFNISHFIEPKLLRSRKASPDAQVILSETDFAEN

SEQ ID NO: 81862 - protein, 63 aa, Setaria italica
  Transcript Sequence Number=SeqID_15888
HVGFALDLLCTLREKQYCRFQTSLLRLTLGYVLVWNKFYIEEQHKMLTVDSKKKARSKMPILL

SEQ ID NO: 81863 - protein, 156 aa, Setaria italica
  misc_feature (93)..(93): Xaa can be any naturally occurring amino acid
  misc_feature (100)..(100): Xaa can be any naturally occurring amino acid
  Transcript Sequence Number=SeqID_15889
  Gene Ontology: Cellular component=integral to membrane
MDAKTTQLRTHLLAHDHDRLPCAPPLPLSPPLNDDVPPVLSRCAVRRSLLLATSYAALFAGSLSSSLLSRFYFAHGGADRWLATLVQSAGFPXLLLVLLXGHRRWGKMFGGFTPRLVLYCVLLGLVMGLNNLLYSCGTSYLPVSTTSLLLSMQLAF

SEQ ID NO: 81864 - protein, 89 aa, Setaria italica
  Transcript Sequence Number=SeqID_15890
  Subcellular localization annotation: CTP_CleavageSite=54; ConfidenceScore=5.66e-01
SCRRTAISRCPPHGSLTSSSTNLRSTIAQLRRRAPMATLQSPPDFLFWNQSRISAARAGERLELSLFPPLLPHLSPVPLCLLSVCSFCG

SEQ ID NO: 81865 - protein, 132 aa, Setaria italica
  Transcript Sequence Number=SeqID_15891
  Gene Ontology: Mol. function=transferase activity; Cellular component= chloroplast
  Homolog annotation: Hit_ID=A1YKE2; Match level="QueryCoverage=98%, HitCoverage=68%, E-value=5e-44, Identity=35%"; Hit description=Auxin efflux carrier
  Pfam annotation: Domain name=PPR; Domain location=11-45; Score=38.1; E_value=3.4e-08; Accession=PF01535.12; Description=PPR repeat
  Pfam annotation: Domain name=PPR; Domain location=46-80; Score=40.8; E_value=5.5e-09; Accession=PF01535.12; Description=PPR repeat
  Pfam annotation: Domain name=PPR; Domain location=81-115; Score=36.6; E_value=1e-07; Accession=PF01535.12; Description=PPR repeat
  Pfam module annotation: Pfam domain module=PPR::PPR::PPR; Domain location=11-45::46-80::81-115
RSKLDHIADTITFNHLIEGHLRQHNKEEAFWLLNEMRKDGISPNVYTYSIIINGLCQIGELETAGGLLEQMVAEGIKPNAFVYAPLISGYCREGKFSLACEAFKKMTSSNVVPDLYCYNSLIIGLSKVGKME

SEQ ID NO: 81866 - protein, 544 aa, Setaria italica
  misc_feature (270)..(270): Xaa can be any naturally occurring amino acid
  Transcript Sequence Number=SeqID_15892
  Gene Ontology: Mol. function=transferase activity
  Homolog annotation: Hit_ID=A1YKE2; Match level="QueryCoverage=99%, HitCoverage=86%, E-value=0.0, Identity=34%"; Hit description=Auxin efflux carrier
  Pfam annotation: Domain name=PPR; Domain location=1-34; Score=28.2; E_ value=3.3e-05; Accession=PF01535.12; Description=PPR repeat
  Pfam annotation: Domain name=PPR; Domain location=105-139; Score =49.9; E_value=1e-11; Accession=PF01535.12; Description=PPR repeat
  Pfam annotation: Domain name=PPR; Domain location=140-173; Score =22.9; E_value=0.0013; Accession=PF01535.12; Description=PPR repeat
  Pfam annotation: Domain name=PPR; Domain location=174-208; Score =24.2; E_value=0.00055; Accession=PF01535.12; Description=PPR repeat
  Pfam annotation: Domain name=PPR; Domain location=209-243; Score =30.7; E_value=6e-06; Accession=PF01535.12; Description=PPR repeat
  Pfam annotation: Domain name=PPR; Domain location=244-278; Score =42.0; E_value=2.3e-09; Accession=PF01535.12; Description=PPR repeat
  Pfam annotation: Domain name=PPR; Domain location=279-313; Score =37.3; E_value=5.9e-08; Accession=PF01535.12; Description=PPR repeat
  Pfam annotation: Domain name=PPR; Domain location=314-348; Score =55.2; E_value=2.5e-13; Accession=PF01535.12; Description=PPR repeat
  Pfam annotation: Domain name=PPR; Domain location=349-382; Score =11.4; E_value=0.4; Accession=PF01535.12; Description=PPR repeat
  Pfam annotation: Domain name=PPR; Domain location=35-69; Score=40.8; E_value=5.5e-09; Accession=PF01535.12; Description=PPR repeat
  Pfam annotation: Domain name=PPR; Domain location=383-417; Score =37.3; E_value=6e-08; Accession=PF01535.12; Description=PPR repeat
  Pfam annotation: Domain name=PPR; Domain location=472-506; Score =15.2; E_value=0.14; Accession=PF01535.12; Description=PPR repeat
  Pfam annotation: Domain name=PPR; Domain location=507-541; Score =40.9; E_value=4.9e-09; Accession=PF01535.12; Description=PPR repeat
  Pfam annotation: Domain name=PPR; Domain location=70-104; Score=36.6; E_value=1e-07; Accession=PF01535.12; Description=PPR repeat
  Pfam module annotation: Pfam domain module=PPR::PPR::PPR::PPR::PPR::PP R::PPR::PPR::PPR::PPR::PPR::PPR::PPR::PPR; Domain location=1-34::105 -139::140-173::174-208::209-243::244-278::279-313::314-348::349 -382::35-69::...
  Pfam module annotation: Domain location=383-417::472-506::507-541::70- 104
TFNHLIEGHLRQHNKEEAFWLLNEMRKDGISPNVYTYSIIINGLCQIGELETAGGLLEQMVAEGIKPNAFVYAPLISGYCREGKFSLACEAFKKMTSSNVVPDLYCYNSLIIGLSKVGKMEEAIEYYDQMLEKGVHPNEFTYDGLIHGYSMTGNVEKAEQLLHQMLNRLKPKDFIYAHLLEVYFKSDNLEKVSSILQSMLDRGVMPDNRLYGIVIHNLSRSGHMEAAFRVLSVMEKNGLVPDLHIYSSLISGLCKTADVEKAVGLLDEMXKKGVEPGIVCYNALIDGLCKSDNISHARNVFSSILIKGLVPNCVTYTCLIDGYCKAGDIHDAIGLYNEMLARGVTPDAFVYSVLTSGCSNSGDLQQALFITEEMVLRGYASISSFNTLVHGFCKRGKLQETVKFLHMMMDKDIVPNMLTVENIVKGLDEAGKLSEAHTIFVELQQKKASQHDTDHLSSLFTGMINQGLAPLDVTHNMIQSHCKGGDLDKALMLHDALVAKGAPMSCTSYLALLDGLCRKSKLTEAFNLLKEMEEMGICPSEISA

SEQ ID NO: 81867 - protein, 200 aa, Setaria italica
  misc_feature (35)..(35): Xaa can be any naturally occurring amino acid
  Transcript Sequence Number=SeqID_15893
FHVPCIDTWLRAHVNCPLCRSDVIDPAVTAATGDXGGGGEASSDTPTDQDANDNVEAEQAAAASDAIPDHEQEDRESDHQEEEASPAVEDQQERSSSPDPPPPQQQPFCPLPRNVRRAASMDAAIVSTAAEVAARERLPEAAPEEEQIGGRRKRSCAKASGSGHRSNLSIDRPASGGIPRSFFSRHSRARSSVLPLSSPS

SEQ ID NO: 81868 - protein, 109 aa, Setaria italica
  Transcript Sequence Number=SeqID_15894
  Subcellular localization annotation: CTP_CleavageSite=65; ConfidenceScore=5.60e-01
PLSSTPLPEAQGCAVLRRLPSSHLLRSPRTTPHRTAPARARQRARTRPRRKRRRRGGGEEGGWIRSSNPAGASLPSLPRPHAAPASRSPRGARRVDPRRRGAMRSSAAG

SEQ ID NO: 81869 - protein, 235 aa, Setaria italica
  Transcript Sequence Number=SeqID_15895
  Gene Ontology: Mol. function=nucleic acid binding; Cellular component= mating-type region heterochromatin; Biological process=chromatin silencing at silent mating-type cassette
  Homolog annotation: Hit_ID=B7U385; Match level="QueryCoverage=98%, HitCoverage=25%, E-value=8e-84, Identity=66%"; Hit description=SNF2P
ILQLGADTVIFYEQDWNPQADKQALQRAHRIGQLNHVLSINLVSERTIEEVIMRRAERKLKLSHNVIGEEDRTDVKGGDMGNEASDMRSIIFGLHLFDPADTTTDTINEDTTSETISVEKLAKLKTMSEKVVMMRSHEPSEKDERAFEINPNLADGSGTVIRRASDSISVDPGLDESAYLSWFKKFKEASHSIEDAAAELGRQRAAPEEKLLKREVNKKKVEEKRLAKWETMGYK

SEQ ID NO: 81870 - protein, 61 aa, Setaria italica
  Transcript Sequence Number=SeqID_15896
  Gene Ontology: Mol. function=binding; Cellular component =mitochondrial inner membrane; Biological process=transport
  Homolog annotation: Hit_ID=Q42422; Match level="QueryCoverage=78%, HitCoverage=15%, E-value=9e-18, Identity=93%"; Hit description=2 -oxoglutarate/malate translocator
  Subcellular localization annotation: CTP_CleavageSite=53; ConfidenceScore=5.15e-01
MADAKQQQQAPPPSVAWKTVKPFVNGGASGMLATCVIQPIDMVKVKIQLGEGSAATVTKKM

SEQ ID NO: 81871 - protein, 93 aa, Setaria italica
  misc_feature (75)..(75): Xaa can be any naturally occurring amino acid
  Transcript Sequence Number=SeqID_15897
  Gene Ontology: Mol. function=binding; Cellular component=cytoplasm; Biological process=regulation of phosphoprotein phosphatase activity
  Homolog annotation: Hit_ID=Q7XTT5; Match level="QueryCoverage=100%, HitCoverage=11%, E-value=2e-34, Identity=72%"; Hit description =OSJNBa0058K23.19 protein
MFWRMTGLSAASPVDTILDKENFTLEELLDEDEIIQECKALNSRLINFLRDKAQVEQLLRYVVEEVPEDNRKKRXFKFPFIACEIFTCEIDVV

SEQ ID NO: 81872 - protein, 182 aa, Setaria italica
  Transcript Sequence Number=SeqID_15898
  Gene Ontology: Mol. function=nucleotide binding; Biological process =defense response
  Homolog annotation: Hit_ID=Q2R1F8; Match level="QueryCoverage=94%, HitCoverage=16%, E-value=5e-26, Identity=38%"; Hit description=NB -ARC domain containing protein, expressed
ESLIALELCGMMVQLPVWITQLDAVTKLTLSITALRTDNLSKLSKLKTLFSLTFTLAAEKQGPEIMAILAKNKLFSDGHIVFPDGGFENLKLLRLCAPVVPLVSFMENAMAKLERLEVRFKILEGIYGVENLARLEEMYLRLNDKDGEAMTNHIVEEMKSAVRGDPANKSVVRIIFHITTTD

SEQ ID NO: 81873 - protein, 393 aa, Setaria italica
  Transcript Sequence Number=SeqID_15899
  Gene Ontology: Mol. function=nucleotide binding; Biological process =defense response
  Homolog annotation: Hit_ID=Q2R4B6; Match level="QueryCoverage=98%, HitCoverage=51%, E-value=1e-101, Identity=52%"; Hit description=NB -ARC domain containing protein, expressed
MVLEHIVSKASEENFITVVGGHWLMHPPSSKVRRLSLQGSDPKRAKDTEKMNLSHVRSLTMFESLKQLPSNSFKFGTIVQVLDLEGCTDIKEQHAKEICGMLLLKYLSLRRTDTKELPKAIGKLQNLETLDIRETKIVKLPKEVCSLERLINILGGDKETRRALKLPEEFVKKQKMKGLRVLSGIGIVGELEDLHHLTDLRKLAIYKLELTGDSANLKLSSSIQYLCGYSLHTLVIHDESSKFLKCLDEMTSPPESLIALELCGMMVQLPVWITQLDAVTKLTLSITALRTDNLSKLSKLKTLFSLTFTLAAEKQGPEIMAILAKNKLFSDGHIVFPDGGFENLKLLRLCAPVVPLVSFMENAMAKLERLEVRFKILEGIYGVENLARLFKHA

SEQ ID NO: 81874 - protein, 78 aa, Setaria italica
  Transcript Sequence Number=SeqID_15900
  Gene Ontology: Mol. function=hydrolase activity, acting on glycosyl bonds; Cellular component=beta-galactosidase complex; Biological process=carbohydrate metabolic process
  Homolog annotation: Hit_ID=B6SXY3; Match level="QueryCoverage=91%, HitCoverage=15%, E-value=2e-24, Identity=74%"; Hit description=Beta -galactosidase
WVNGHHIGRYWSYKAAGGGGCGGCGYAGTYSETKCQSGCGDVSQRYYHVPRSWLNPSGNLVVLLEEFGGNLMPSWSPA

SEQ ID NO: 81875 - protein, 68 aa, Setaria italica
  misc_feature (53)..(53): Xaa can be any naturally occurring amino acid
  Transcript Sequence Number=SeqID_15901
  Gene Ontology: Mol. function=hydrolase activity, acting on ester bonds; Cellular component=cellular_component; Biological process =lipid metabolic process
  Homolog annotation: Hit_ID=B4FZ87; Match level="QueryCoverage=100%, HitCoverage=16%, E-value=2e-30, Identity=94%"; Hit description=Alpha- L-fucosidase 2
YNKVAQLFNLRLKETVASLRKTHPDAAFTYVDVYTAKYKLISEAKKLGFDDPXLLTCCGYGGGRYNFD

SEQ ID NO: 81876 - protein, 371 aa, Setaria italica
  Transcript Sequence Number=SeqID_15902
  Gene Ontology: Mol. function=hydrolase activity, acting on ester bonds; Cellular component=extracellular region; Biological process =lipid metabolic process
  Homolog annotation: Hit_ID=B4FZ87; Match level="QueryCoverage=97%, HitCoverage=90%, E-value=0.0, Identity=92%"; Hit description=Alpha-L- fucosidase 2
  Pfam annotation: Domain name=Lipase_GDSL; Domain location=18-350; Score=312.7; E_value=7.7e-91; Accession=PF00657.14; Description=GDSL- like LipaseAcylhydrolase
RASGAAGAGRGDCHFPAIFNFGDSNSDTGGLSSLFGAAPPPNGRTFFGMPAGRYSDGRLVIDFIAESLGIPHLSAYLNSIGSNFTQGANFATAGSSIRRQNTSLFLSGFSPISLDVQSWEFEQFINRSQFVYSNKGGIYRALLPRAEYFSQALYTFDIGQNDITSSYFVNNTTEEVEAIIPDLMERLTFIIQTVYSRGGRYFWIHNTGPLGCLPYALLHRPDLAAPTDGAGCSVTYNKVAQLFNLRLKETVASLRKTHPDAAFTYVDVYTAKYKLISEAKKLGFDDPLLTCCGYGGGRYNFDLNIGCGGKKQVNGTWVVVGKSCADPSKRVSWDGVHFTEAANKFVFDQIVAGALSDPPVPLKRACQSKGR

SEQ ID NO: 81877 - protein, 210 aa, Setaria italica
  Transcript Sequence Number=SeqID_15903
  Homolog annotation: Hit_ID=B3V945; Match level="QueryCoverage=97%, HitCoverage=51%, E-value=7e-53, Identity=43%"; Hit description=PAE
  Pfam annotation: Domain name=PAE; Domain location=1-189; Score=92.4; E_value=1.5e-24; Accession=PF03283.5; Description=Pectinacetylesteras e
FHALLPKDSRVKCLADGGFFLDVEDISGKRTMQSFYSSTDRLQHLGEQFSHCNSNLEPGQCFFPREVVKHIVTPVFILNPAYDAWQVQHALAPEASDPQHSWLDCRLDIAKCSSEQLEILQGFRKELHDAISEVKQKRDWGFYINSCFVHCQSLNSLTWHSPTSPRVNNKSIAEAVGDWFFDRREVKEIDCEYPCNPTCHNLVFTRPFKI

SEQ ID NO: 81878 - protein, 113 aa, Setaria italica
  Transcript Sequence Number=SeqID_15904
  Gene Ontology: Mol. function=structural constituent of ribosome; Cellular component=ribonucleoprotein complex; Biological process =translation
  Homolog annotation: Hit_ID=B9S8X7; Match level="QueryCoverage=99%, HitCoverage=68%, E-value=7e-40, Identity=67%"; Hit description=50S ribosomal protein L18, chloroplast, putative
  Pfam annotation: Domain name=Ribosomal_L18p; Domain location=2-103; Score=4.5; E_value=3.1e-06; Accession=PF00861.14; Description =Ribosomal L18pL5e family
PKVRNQRLQKKFNGTATKPRLSVFCSNRQLYAVLADDHNKKVLFYGSTLQKSICGDPPCGTVEAARRVGEELVRACEELGISEISSYDRNGFARGDKMMAFEVPVSQHGFLPR

SEQ ID NO: 81879 - protein, 310 aa, Setaria italica
  Transcript Sequence Number=SeqID_15905
  Gene Ontology: Mol. function=transferase activity, transferring phosphorus-containing groups; Cellular component=TORC2 complex; Biological process=protein catabolic process
  Homolog annotation: Hit_ID=B9RWX7; Match level="QueryCoverage=100%, HitCoverage=29%, E-value=1e-116, Identity=67%"; Hit description=Fkbp- rapamycin associated protein, putative
  Pfam annotation: Domain name=HEAT; Domain location=120-156; Score =4.3; E_value=15; Accession=PF02985.14; Description=HEAT repeat
  Pfam annotation: Domain name=HEAT; Domain location=75-112; Score =16.7; E_value=0.099; Accession=PF02985.14; Description=HEAT repeat
  Pfam module annotation: Pfam domain module=HEAT::HEAT; Domain location=120-156::75-112
LDQSMDSKCREESARLLGCLIRSCARLILPYIAPVHKALVTRLCEGTGPNANNALAAGVLATVGELAKVGGFAMRQYIPELMPVVVDALLDGGAVSKREVAVATLGQIIQSTGYVIAPYNEYPLLLGLLLKLLNGELEWSTRLEVLKVLGIMGALDPHAHKRNQHNLPGQHREVLRPTIETAQHIVSMEELPTDFWPSFSASEDYYSTVAISSLMRILQDPSLSSYHQMVVGSLIFIFKSMGLGCVPYLPKVLPELFRAVRMCEDGGLKEFITWKLGTLISIVRQHIRKYLQDILSLISELWTSSFSLPA

SEQ ID NO: 81880 - protein, 486 aa, Setaria italica
  Transcript Sequence Number=SeqID_15906
  Gene Ontology: Mol. function=actin binding; Cellular component=plasma membrane; Biological process=cytoskeleton organization and biogenesis
  Homolog annotation: Hit_ID=Q53K24; Match level="QueryCoverage=90%, HitCoverage=90%, E-value=0.0, Identity=83%"; Hit description =Adenylyl cyclase-associated protein
  Pfam annotation: Domain name=CAP_C; Domain location=324-484; Score =313.7; E_value=3.8e-91; Accession=PF08603.3; Description=DE Adenylate cyclase associated (CA
  Pfam annotation: Domain name=CAP_N; Domain location=1-314; Score =180.9; E_value=3.5e-51; Accession=PF01213.11; Description=Adenylate cyclase associated (CAP) N
  Pfam module annotation: Pfam domain module=CAP_C::CAP_N; Domain location=324-484::1-314
MEAALVERLEAAVARLEAAVASGASLALAAPRDLDVPAAADPVIVAYDEFVAEAVGRLNTAAEKIGGKVLDATKVLAEAFAVAKDLLVQAKQLQKPASMADAQGFLKPLGDVIAKATAMTEGRRPDYFNHLKSVADSLPALAWVAFLGKDCGMSFPTAHVEESWQMAEFYNNKVLVEYRNKDPDHVEWAKALKDLYVPGLRDFVKKHYPLGPVWGPVGGATASQPKAAAPTPKAPAAKAPPPPAPPSAPLFTTEKSPKSSRPKEGMSAVFQEISSKPVTAGLRKVTDDMKSKNRTDRSGVVSSTAAAPAAPEKTSRAGSFSFKSGPPKLELQMGRKWVVENQVGKKTLAIDDCDSRQSIYVYGCKDSVLQVNGKVNNITVDKCTKFGIVFKDVVAAFEVVNCNGVEVQCQGTAPTISIDNTSGCQLYLSKDSLGASITSAKSSEINVMVPSGATDGDWVEHALPQQYIHSFKDGQFITSPVSHSGA

SEQ ID NO: 81881 - protein, 79 aa, Setaria italica
  misc_feature (55)..(55): Xaa can be any naturally occurring amino acid
  Transcript Sequence Number=SeqID_15907
MAKPVKYDDEEISSSAEEEEDQSDAAGSGSGDEGDEDEEDAAAPPGGGCGGGRGXGEGQQQEEEEVDEEEIEAVTTGGG

SEQ ID NO: 81882 - protein, 38 aa, Setaria italica
  Transcript Sequence Number=SeqID_15908
FSARKHHQVAATAVSYGLRFVLKSFLPITFLLYLATGC

SEQ ID NO: 81883 - protein, 51 aa, Setaria italica
  Transcript Sequence Number=SeqID_15909
  Homolog annotation: Hit_ID=B4F8G6; Match level="QueryCoverage=100%, HitCoverage=13%, E-value=2e-12, Identity=68%"; Hit description=CF9
LHAGTRAGGDARVGAGLRALRHMSDRSMVIATICIALCLHILNGTWLLVPA

SEQ ID NO: 81884 - protein, 147 aa, Setaria italica
  Transcript Sequence Number=SeqID_15910
  Homolog annotation: Hit_ID=B6SV26; Match level="QueryCoverage=96%, HitCoverage=24%, E-value=3e-40, Identity=71%"; Hit description=Amino acid permease
DYFGGSERSFLIESDDEDAAAAVEDGKRRGHGGEESGDDDVSGSDSSSPCDSPRVVAARCSQPSSYTQQWPQSYRQSIDMYSSVHSPNLSFLGTPSLSRLSNSFLTNSFRGKPPEIISSLIKPLLPTSTAPTSDEHQQQQQEDVRKS

SEQ ID NO: 81885 - protein, 213 aa, Setaria italica
  Transcript Sequence Number=SeqID_15911
  Gene Ontology: Cellular component=anchored to membrane
  Homolog annotation: Hit_ID=Q84QW4; Match level="QueryCoverage=71%, HitCoverage=58%, E-value=1e-52, Identity=72%"; Hit description =Putative auxin-induced protein
  Pfam annotation: Domain name=DUF568; Domain location=87-208; Score =172.4; E_value=1.3e-48; Accession=PF04526.5; Description=Protein of unknown function (DUF568)
MAASAMLLLFLLLASPAATRLASAACASEKFPAGRAYATCEDLPKLGASLHWTYDASKSSLSVAFVAAPAAPGGWVAWGLNPTGEGMAGAQALVALKGSGSGAPTVKTYNISGYGLGASSPLEFPATELAADAGGSGGKIRVYGKLQLRKGMKAVNQVWQVGSSVTGGAPDKHAFGADNLSAKAKLVLAGSKAAAAGSPSLSPVPAPSSGAPA

SEQ ID NO: 81886 - protein, 92 aa, Setaria italica
  misc_feature (85)..(85): Xaa can be any naturally occurring amino acid
  Transcript Sequence Number=SeqID_15912
  Gene Ontology: Mol. function=hydrolase activity, hydrolyzing O -glycosyl compounds; Cellular component=cell wall; Biological process= carbohydrate metabolic process
  Homolog annotation: Hit_ID=Q67VC5; Match level="QueryCoverage=81%, HitCoverage=11%, E-value=9e-27, Identity=78%"; Hit description =DeliriumA-like
NSIRSLYLNGNYGGPLGASSLARGVLGNKSLREIHLHGNGIGNEGIHELMSALSAHKGKITVVDIGNNNISPEGLRPVAEFIKRXKSLLWFS

SEQ ID NO: 81887 - protein, 103 aa, Setaria italica
  Transcript Sequence Number=SeqID_15913
  Gene Ontology: Mol. function=serine-type endopeptidase activity; Cellular component=cell wall; Biological process=negative regulation of catalytic activity
  Homolog annotation: Hit_ID=Q9ZUF6; Match level="QueryCoverage=98%, HitCoverage=13%, E-value=2e-18, Identity=50%"; Hit description =Putative subtilisin serine protease
  Subcellular localization annotation: CTP_CleavageSite=37; ConfidenceScore=5.66e-01
LNYPSFSVVFKQKSKRFMRFRREVTNVGPATSVYNVKVTSPASVSVTVTPTKLTFKKVGQKQRYYVTFASKAGQGQAKPDFGWISWANDDHVVRSPVAYTWKM

SEQ ID NO: 81888 - protein, 320 aa, Setaria italica
  Transcript Sequence Number=SeqID_15914
  Gene Ontology: Mol. function=serine-type endopeptidase activity; Cellular component=cell wall; Biological process=negative regulation of catalytic activity
  Homolog annotation: Hit_ID=Q9ZUF6; Match level="QueryCoverage=94%, HitCoverage=39%, E-value=1e-113, Identity=67%"; Hit description =Putative subtilisin serine protease
KKGAVVKAAGGAGMVLANTAASGEELVADSHLLPAVAVGRTVGDKIREYAARGGGRPMAMLSFGGTVLGVRPSPVVAAFSSRGPNTVVPEILKPDMIGPGVNILAGWSGLAGPTGLAKDGRRTNFNIISGTSMSCPHISGVAALLKAAHPNWSPAAIKSALMTTAYTVDNTNSSLRDAADGSLANVFAYGAGHVDPQKALSPGLVYDISTNDYVAFLCSLDYSAPHIQVITKMSNFSCPKKFRPGDLNYPSFSVVFKQKSKRFMRFRREVTNVGPATSVYNVKVTSPASVSVTVTPTKLTFKKVGQKQRYYVTFASYGWY

SEQ ID NO: 81889 - protein, 290 aa, Setaria italica
  misc_feature (15)..(15): Xaa can be any naturally occurring amino acid
  misc_feature (29)..(29): Xaa can be any naturally occurring amino acid
  misc_feature (117)..(117): Xaa can be any naturally occurring amino acid
  misc_feature (290)..(290): Xaa can be any naturally occurring amino acid
  Transcript Sequence Number=SeqID_15915
  Gene Ontology: Mol. function=peptidyl-prolyl cis-trans isomerase activity; Cellular component=ubiquitin ligase complex; Biological process=protein ubiquitination
  Homolog annotation: Hit_ID=Q10QD1; Match level="QueryCoverage=99%, HitCoverage=49%, E-value=1e-121, Identity=75%"; Hit description =Peptidylprolyl isomerase, putative, expressed
  Pfam annotation: Domain name=Pro_isomerase; Domain location=134-286; Score=198.6; E_value=1.7e-56; Accession=PF00160.13; Description =Cyclophilin type peptidyl-prolyl cis-tr
GKGKGSFLAGWRRAXSSKGKSCCSCCYFXRKEKDDSKSGKEPKPQQTFSIVDAASASVHGRSAAAAKAASAEKTAARIAMHMAGDRAPVNAKLVKSRYTTGAASRSFTSTAYDPVTXNEFEYVKVERNPKKKGYVQLHTTHGDLNLELHCDITPRTCENFLTHCENGYYNGLIFHRSIKNFMIQGGDPTGTGSGGESIWGKPFKDEVNSKLLHSGRGVVSMANSGPHTNGSQFFILYKSAPHLNFKHTVFGMVVGGLTTLSAMEKVPVDDDDRPLEEIKILRISIFVNPX

SEQ ID NO: 81890 - protein, 303 aa, Setaria italica
  misc_feature (283)..(283): Xaa can be any naturally occurring amino acid
  Transcript Sequence Number=SeqID_15916
MGFNPSKTNNHDDFTGRSYVGSPHKMPGSPIDRFKMEALPPRLAKRTLSVAQYKLLSPMKNPNHISSRNAADIMEAASRIIRPGLENISSYRVHDVGHTNAARAYNPGEIIGVQQRSQKLNEALRKRDGPASFRPPSGKPLDGRSRSSEGTSSSRISQSNGCAPVGPKVKSGNRSSNVAQAMHAQGGMRKGSRKLETRRNPENSLVERNGLHQPKDNNQMGSTSSSSVLVPNNRRQNTMASKHKVNSNPANPSRQRSNIHQINASPRKAGAASTFAGNNTQGXRKMDLQPTARANVRNDSIAK

SEQ ID NO: 81891 - protein, 63 aa, Setaria italica
  Transcript Sequence Number=SeqID_15917
MRLYAAGVWAAAAGASVAYSRRGAAPQRAATSLRLIHARIHAQALTLAVLGGAAAFVHYRSKK

SEQ ID NO: 81892 - protein, 65 aa, Setaria italica
  Transcript Sequence Number=SeqID_15918
CDRESSFCIVLKLGFWGDKQAPRVPAFLLHHRMKPGATEPTRKPPTELDKRRNEFIRTKPTTSEL

SEQ ID NO: 81893 - protein, 109 aa, Setaria italica
  Transcript Sequence Number=SeqID_15919
  Homolog annotation: Hit_ID=Q2RBG7; Match level="QueryCoverage=87%, HitCoverage=90%, E-value=7e-11, Identity=38%"; Hit description =Hypoxia induced protein conserved region containing protein, expressed
  Pfam annotation: Domain name=HIG_1_N; Domain location=1-68; Score= -7.9; E_value=0.016; Accession=PF04588.5; Description=Hypoxia induced protein conserved region
MDSKRMSSSSSVQSWVEEHKLSTVAGVWAAAVGASVAYSRRRATSLRLIHARIHAQALTLAVLGGAAAFVHYRSKKGKNHAADKLDLDFYSQLPPATDADGNENERWSW

SEQ ID NO: 81894 - protein, 115 aa, Setaria italica
  misc_feature (42)..(42): Xaa can be any naturally occurring amino acid
  Transcript Sequence Number=SeqID_15920
  Homolog annotation: Hit_ID=Q2RBG7; Match level="QueryCoverage=87%, HitCoverage=90%, E-value=8e-10, Identity=37%"; Hit description =Hypoxia induced protein conserved region containing protein, expressed
  Pfam annotation: Domain name=HIG_1_N; Domain location=1-74; Score= -13.7; E_value=0.074; Accession=PF04588.5; Description=Hypoxia induced protein conserved region
MDSKRMSSSSSVQSWVEEHKLSTVAGVWAAAAGASVAYSRRXGAPQRAATSLRLIHARIHAQALTLAVLGGAAAFVHYRSKKGKNHAADKLDLDFYSQLPPATDADGNENERWSW

SEQ ID NO: 81895 - protein, 794 aa, Setaria italica
  misc_feature (219)..(219): Xaa can be any naturally occurring amino acid
  Transcript Sequence Number=SeqID_15921
  Gene Ontology: Mol. function=protein binding; Cellular component =integral to membrane; Biological process=transport
  Homolog annotation: Hit_ID=B9RR38; Match level="QueryCoverage=94%, HitCoverage=90%, E-value=0.0, Identity=55%"; Hit description =Phosphoinositide 5-phosphatase, putative
  Pfam annotation: Domain name=Syja_N; Domain location=89-393; Score =396.5; E_value=4.7e-116; Accession=PF02383.10; Description=SacI homology domain
MAAAAAAGAEADGCLQSFELYEAESKFYILGTNTDKTLWRLLTIDRMEPSELNVDEDSTVHSQSGYLDLLKILDEEHRSTGGVKFVTNCFGIIGFVKFLGPYYMLIITEQRKIGDIFGHPVYQVTKTAMIELSNSKTRPKLNNSKDENRYKKLLQTIDLRKDFFFSHSYHIMRSLQKNFSDPQEGWELYDTMFVWNEFLTRGIRNILKTTLWTVALVYXFFKQDKLAICGKDIMLTLIARRSRHYAGTRYLKRGVNDEGRVANDVETEQIVYEDMLGPRQISSVVQNRGSIPLFWSQETSKLNLKPDIILHEKDKNYEATRLHFENLRKRYGNPIIILNLIKTREKRPREIILRREFDRAIKIINNGLPGEDHLRFLHWDLHKNSQSKSTNALQVLLKVAFEALNLTEFFYHQVSPARRTECFLNLSATLKNDFGPHVCDDNSNCGNADYVSDLDDISQDDTCGSSDPGNGIAEDNSEVNGSTQTKPPKFQKGVLRTNCIDCLDRTNVAQYAYGLAALGHQLHAIGSLESPDIHIDSGLSRHLMHFYERMGDTLALQYGGSAAHNKIFSAKRGHLKFAIQSQEFFRTLQRYYSNAYMDAYKQAAINLFLGYFEPQVGKPALWEPESGDEHVLDDETSKLMKRARSDGSILNKSKPSLSSKGPNGMLKSAFTGSKKEGQYPNWSSGSMHGMSSTSDNSMSKLSYTPTVSHVKHISCELDYCNGSGDSNFLDLDWLSASDNERSKAISTPDVNISTDNAVGDVSSGTTDDQTIEIEAQGLSKDFMRWVNQGEAFWY

SEQ ID NO: 81896 - protein, 97 aa, Setaria italica
  Transcript Sequence Number=SeqID_15922
  Gene Ontology: Cellular component=plasma membrane
  Homolog annotation: Hit_ID=B6TQ96; Match level="QueryCoverage=100%, HitCoverage=63%, E-value=1e-42, Identity=84%"; Hit description=AIG2 -like protein
SAILPARAHAVNGKVIKGLTDRELHVFDLFEDEEYVKRTVEVSLTDTLERSLAYAYIWGNEGDPDLYGEWDYEEWRKVHLKDYLEMTREFMDEVGQL

SEQ ID NO: 81897 - protein, 159 aa, Setaria italica
  Transcript Sequence Number=SeqID_15923
  Gene Ontology: Mol. function=signal transducer activity; Cellular component=plasma membrane
  Homolog annotation: Hit_ID=B9RMQ6; Match level="QueryCoverage=92%, HitCoverage=36%, E-value=3e-52, Identity=63%"; Hit description =Signal transducer, putative
LILTKFNLNTVWAEGPFGFGLLISCRIVQGFQLYHVFVKHRLPPIRPSIILVVILLPWICGAAVFHWNKPLNHRCHMQAQWVIPVMCIHGFYIAGLIVITLSIRHIEFRFSEFKDLLQAIIVSTIAVGFWIVAYVLNEIHEDIAWIQVFSRFSLLVMHR

SEQ ID NO: 81898 - protein, 94 aa, Setaria italica
  misc_feature (78)..(78): Xaa can be any naturally occurring amino acid
  Transcript Sequence Number=SeqID_15924
  Subcellular localization annotation: CTP_CleavageSite=73; ConfidenceScore=5.27e-01
LPVPPPPQMPAGQDQPTYPALVLPNTGSSGAAPPAAGSHESKKASKLVPAILLPLLTVAVLGLSIAFFFSHRRSNAAXGGGGGGCVGGRGTQVL

SEQ ID NO: 81899 - protein, 102 aa, Setaria italica
  Transcript Sequence Number=SeqID_15925
  Gene Ontology: Mol. function=protein serine/threonine kinase activity; Cellular component=extracellular region; Biological process=response to biotic stimulus
  Homolog annotation: Hit_ID=Q2XX98; Match level="QueryCoverage=99%, HitCoverage=57%, E-value=2e-43, Identity=83%"; Hit description =Pathogenesis-related protein 5
  Pfam annotation: Domain name=Thaumatin; Domain location=1-102; Score =95.2; E_value=2.3e-25; Accession=PF00314.9; Description=Thaumatin family
RTGCSFNGNSGRCATGDCAGALSCTLSGQPPMTLAEFTLGGTQDFYDISVIDGYNLAMAFSCSSGDRIVCTSSSCPQAYLFPNDNKTHACSGNSNYQVTFCT

SEQ ID NO: 81900 - protein, 210 aa, Setaria italica
  Transcript Sequence Number=SeqID_15926
  Gene Ontology: Mol. function=electron carrier activity; Cellular component=extracellular region; Biological process=response to oxidative stress
  Homolog annotation: Hit_ID=B6STZ5; Match level="QueryCoverage=100%, HitCoverage=62%, E-value=1e-108, Identity=90%"; Hit description =Peroxidase 1
  Pfam annotation: Domain name=peroxidase; Domain location=1-172; Score= 167.3; E_value=4.4e-47; Accession=PF00141.15; Description=Peroxidase
SCADILALMARDAVVLARGPSWPVALGRRDGRVSIANETNQLPPPTANFTRLVQMFAAKGLGVKDLVVLSGGHTLGTAHCNLFSDRLYNFTGANNLADVDPALDATYLARLRSRCQSLADNTTLNEMDPGSFLSFDASYYRLVAKRRGLFHSDAALLSDPATRAYVQRQATGLFADEFFRDFADSMVKMSTVDVLTGAQGEIRKKCYLVN

SEQ ID NO: 81901 - protein, 250 aa, Setaria italica
  misc_feature (62)..(62): Xaa can be any naturally occurring amino acid
  misc_feature (219)..(219): Xaa can be any naturally occurring amino acid
  Transcript Sequence Number=SeqID_15927
  Gene Ontology: Mol. function=protein binding
  Homolog annotation: Hit_ID=B9S586; Match level="QueryCoverage=100%, HitCoverage=41%, E-value=5e-52, Identity=45%"; Hit description =Protein binding protein, putative
  Pfam annotation: Domain name=LRR_1; Domain location=203-226; Score =8.5; E_value=7.3; Accession=PF00560.25; Description=Leucine Rich Repeat
  Pfam annotation: Domain name=LRR_1; Domain location=3-29; Score=5.6; E_value=26; Accession=PF00560.25; Description=Leucine Rich Repeat
  Pfam annotation: Domain name=LRR_1; Domain location=31-53; Score=7.7; E_value=10; Accession=PF00560.25; Description=Leucine Rich Repeat
  Pfam annotation: Domain name=LRR_1; Domain location=63-85; Score=3.5; E_value=65; Accession=PF00560.25; Description=Leucine Rich Repeat
  Pfam annotation: Domain name=LRR_1; Domain location=92-114; Score =3.4; E_value=68; Accession=PF00560.25; Description=Leucine Rich Repeat
  Pfam module annotation: Pfam domain module=LRR_1::LRR_1::LRR_1::LRR _1::LRR_1; Domain location=203-226::3-29::31-53::63-85::92-114
LNSLSVVNLRGNNLQQDDVVDLHKILIQMPNLRDLDISGNPIMDEGIRSLVPFISWAIQKEXPLLKLRVENCDLSSIGVSELLECLTYVKQPLDVLSIADNPLGSSVAAVLAKFLGSHVRDLNIEDIDLGALGFQILEEALPMEVALSHINISKNRGGIRAAYFVSKLILQTPNLVSVNAAANILPPESLEVICNTLKQRTCNLERVDLTGNFHLSSTXFPAFLEFKKHGKPILVVPSNLSTCAPYDDDP

SEQ ID NO: 81902 - protein, 597 aa, Setaria italica
  Transcript Sequence Number=SeqID_15928
  Homolog annotation: Hit_ID=Q9SAD8; Match level="QueryCoverage=57%, HitCoverage=53%, E-value=7e-34, Identity=35%"; Hit description =F3F19.5
YNKGLKQKSCKKLGGHNDVHCIQDPEVVEKRPLPVDHEILAIEYQKDGSKYQEEEEDGDRQPEENATVSHNIENNGACSKRKCHDGVAGIPEIKRKKLKVANSGKHIDDSKEDNVQQYQDQSGSKNLMLSAIDIETQKETLQPETTATSMEQPKAERNNQTELKCETEAADCNAQSDIKKSESRSARRKKIKRQLRQKSKLQTEKNVHEDSPIAADCPSPSNQDSLPGPSNNQNGSHVPCSSHKADEEESDTSDEIVPVVVRPGHIRFEPAGGQPDKSPAKEIQGTFQWSGTMSKKKGQKWGMNNSNKKYADIGAGSSMEANHHFIDRKITENDFCAVSNQKDDESSNIKRPSVKTIANEEKFNGEPLDFESLYPLTRLPKEGDLIAYRLVELSSSLCPELSSYRVGKVLIYDPISLRIILLPVPEHPMVTTEENKPEGESDMFMDLSPYKEDGSLEIEYSSLLDVRLLKGIESVPGVVSTPSAEICKGGSLAGKTVTLDDNEGKIDCQKPGMVPNNTKDQEATLEKTENTVWEENVEPSNDKTDVQENGWGTWKRNASTSAWSYRALRSSALGPTMAMLRGKNSQRGKPPCRKYGK

SEQ ID NO: 81903 - protein, 36 aa, Setaria italica
  Transcript Sequence Number=SeqID_15929
EMWASRISVLRTNIEWLYCNALFKTVKRCDHMASKC

SEQ ID NO: 81904 - protein, 192 aa, Setaria italica
  Transcript Sequence Number=SeqID_15930
  Gene Ontology: Mol. function=inositol or phosphatidylinositol phosphatase activity
  Homolog annotation: Hit_ID=B6SMK8; Match level="QueryCoverage=100%, HitCoverage=56%, E-value=1e-104, Identity=94%"; Hit description =Inositol-1-monophosphatase
  Pfam annotation: Domain name=Inositol_P; Domain location=1-190; Score= 56.4; E_value=1.1e-13; Accession=PF00459.17; Description=Inositol monophosphatase family
ENSADYVWVLDPIDGTKSFITGKPLFGTLIALLHNGKPVIGVIDQPILRERWIGVDGKQTTLNGQEISVRSCNSLAQVYLYTTSPHLFEGDAEDAFIRVRDKVKVPLYGCDCYAYALLASGFVDLVVESGLKPYDFLSLVPVIEGAGGSITDWRGGKLYWPVTADSRPTSFNVVAAGDARVHKQALDALQWR

SEQ ID NO: 81905 - protein, 169 aa, Setaria italica
  Transcript Sequence Number=SeqID_15931
  Gene Ontology: Mol. function=small conjugating protein ligase activity; Biological process=ubiquitin-dependent protein catabolic process
  Homolog annotation: Hit_ID=Q943L1; Match level="QueryCoverage=100%, HitCoverage=100%, E-value=3e-79, Identity=89%"; Hit description =Ubiquitin carrier protein
  Pfam annotation: Domain name=UQ_con; Domain location=11-162; Score =299.7; E_value=6.2e-87; Accession=PF00179.18; Description=Ubiquitin -conjugating enzyme
MAATTSQASLLLQKQLRDLAKHPVDGFSAGLVDDSNVFEWQVTIIGPPDTLYDGGYFNAIMSFPQNYPNSPPSVRFTSEMWHPNVYPDGRVCISILHPPGEDPNGYELASERWTPVHTVESIVLSIISMLSSPNDESPANIEAAKEWREKREDFKKKVRRIVRKSQEML

SEQ ID NO: 81906 - protein, 46 aa, Setaria italica
  Transcript Sequence Number=SeqID_15932
KLDGLWWHAILNLRCCCNTCYYVFLLSPTKALKGLHDFEGLLIIKK

SEQ ID NO: 81907 - protein, 745 aa, Setaria italica
  Transcript Sequence Number=SeqID_15933
  Gene Ontology: Mol. function=substrate-specific transmembrane transporter activity; Cellular component=integral to membrane; Biological process=transmembrane transport
  Homolog annotation: Hit_ID=Q7X9Y6; Match level="QueryCoverage=98%, HitCoverage=98%, E-value=0.0, Identity=79%"; Hit description =Putative sugar transporter type 2a
  Pfam annotation: Domain name=MFS_1; Domain location=11-685; Score =112.6; E_value=1.3e-30; Accession=PF07690.8; Description=Major Facilitator Superfamily
  Pfam annotation: Domain name=Sugar_tr; Domain location=6-734; Score =227.5; E_value=3.3e-65; Accession=PF00083.16; Description=Sugar (and other) transporter
  Pfam module annotation: Pfam domain module=MFS_1::Sugar_tr; Domain location=11-685::6-734
MSGAVLVAIAASIGNLLQGWDNATIAGAVLYIKKEFNLQSEPTVEGLIVAMSLIGATIITTFSGPVSDLIGRRPMLILSSILYFCSSLIMLWSPNVYVLLLARLVDGFGIGLAVTLVPLYISETAPPEIRGLLNTLPQFSGSGGMFLSYCMVFGMSLLPSPDWRIMLGVLAIPSLFFFGLTIFYLPESPRWLVSKGRMAEAKKVLQKLRGKDDVSSEMALLVEGLEVGGDTSIEEYIIGPATEPADDHVADGDKEHITLYGPEEGQSWIARPSKGPSMLGSVLSLASRHGSMVNQSVPLMDPIVTLFGSVHENMPQAGGSMRSTLFPNFGSMFSVTDQHTKNEQWDEENLHRDDEEYASDGAGGDYEDNVHSPLLSRQTTSAEGKDIAHHGHRGSSLSMRRPSLLGEGGEGVSSTGIGGGWQLAWKWSEREGEDGKKEGGFKRIYLHQEGVPGSRRGSIVSLPGGGDVPEGGEFIHAAALVSQPALYSKDLTERRMSGPAMIHPSEAAAKGPSWKDLFEPGVRRALLVGVGIQILQQFAGINGVLYYTPQILEQAGVAVLLSNLGLSSASASILISSLTTLLMLPSIGLAMRLMDLSGRRFLLLGTIPILIASLVVLVISNVVDLGTVPHAALSTVSVIIYFCCFVMGFGPIPNILCAEIFPTRVRGLCIAICALTFWIGDIIVTYSLPVMLNAIGLAGVFGIYAVVCMISFVFVFLKVPETKGMPLEVISEFFAVGAKQAAAKA

SEQ ID NO: 81908 - protein, 65 aa, Setaria italica
  Transcript Sequence Number=SeqID_15934
FFSYGRDRPDIAPVRRTIKEAKHLQHDLLIPICNSSVRAEKYTLHTNGATKEKIDQFCQIKFCLT

SEQ ID NO: 81909 - protein, 857 aa, Setaria italica
  Transcript Sequence Number=SeqID_15935
  Gene Ontology: Mol. function=receptor activity; Cellular component =cytoplasm; Biological process=protein transport
  Homolog annotation: Hit_ID=Q9M838; Match level="QueryCoverage=99%, HitCoverage=53%, E-value=1e-118, Identity=41%"; Hit description =T27C4.14 protein
LWGDSPIAVSCRQLIVQLCSLAGSVFPNDNGDAQIKHLITILSAVVLWIEPPDVIAASIRNGGSESEFIDGCHALLSMASLTTGSLFDNLLKSIRHYGTINLLSALTSEAVKSVLVNQSEEETWGIDSLDILLETWNVILGDVDADKSPIAVDGALAASSLFKIIVESHLKAAADSAFEDTDDTEYFHVSVSKRDEQLALYALIARAAPDTTIPFLAQLFSERFARLNQRNGESDPTQTLEELYWLLLVTSHVLTDSGEGETLLIPDALQAGFSNVIEAAQHPVVTLSWSIINFSRQCLDPGIRAKYFSPRLMEAVIWFLARWVATYLVPLDVSRGQVSRGEIDSIGTNGSQHSRKLLNSFAWENNQGELVLDFVVLISMLALTTYQGENELQTLTCQKLLATVVRRKHTCAYLVQLDSWRDLTRAFASGRSLLSLSGRLQRSLAETLACAASCIKDPEASAQYLRDLMGPVAGCLVENASRSDLKSVAHQADVVYMVCCLLERLRGAARAAQPRTQKVLFEMGRTVMNPLLTLLEVYKNQSTVIYMILKFVVDFVDGQAVFLDAKETSALVSFCLRLLQIYSSHNIGKVMLSLSSSLRSESQAEKYKDLRALLRLLTNICSKDLVGFLSDCDGDGSPDIAEVIYVGLDIVTPLISLDLLKYPKLSRDYFVLMSHLLEVYPEKVAHLNRDAFARIIGSLDFGLRNQDSDVVERCLAAVNALASYHFKERLGGRGGLNSQLMESEGSNGKVQESISSHFLRLLLQILLFEDFRLELAGHAADALLPLLFCEQELYQGLVHEVLEKQQNPTMKSRLATAFHNLTSSNNLSSALDRPNRQRFRKNLLNFLVDISSFMQIK

SEQ ID NO: 81910 - protein, 39 aa, Setaria italica
  Transcript Sequence Number=SeqID_15936
MASNGGGGGVLRHSNSSRLSRMSYSGEDGRGAQAPPATA

SEQ ID NO: 81911 - protein, 198 aa, Setaria italica
  misc_feature (7)..(7): Xaa can be any naturally occurring amino acid
  misc_feature (24)..(24): Xaa can be any naturally occurring amino acid
  misc_feature (193)..(193): Xaa can be any naturally occurring amino acid
  Transcript Sequence Number=SeqID_15937
  Gene Ontology: Mol. function=electron carrier activity; Cellular component=endoplasmic reticulum membrane; Biological process =oxidation reduction
  Homolog annotation: Hit_ID=Q69NF4; Match level="QueryCoverage=96%, HitCoverage=39%, E-value=7e-50, Identity=54%"; Hit description =Putative Cytochrome P450
  Pfam annotation: Domain name=p450; Domain location=1-198; Score= -191.4; E_value=0.02; Accession=PF00067.14; Description=Cytochrome P450
MAEAWDXKFLSEIVAAHKEKGPAXCREEDEDFLDVLLRLREEGADGLELTDDRIKSTVEDMIAAATETSSQTLEWTMAELVANPRVMAKLQDEIARAAAADEPAIAESDLNKMGYLKAVFKEVLRLHAPAPLLVPHESTAPAVVQGYEIPAKTSLFVNVWAIGRDPAAWDAPDEFRPERFVGGSAPLDFRGTXYQLIP

SEQ ID NO: 81912 - protein, 58 aa, Setaria italica
  Transcript Sequence Number=SeqID_15938
QLVLQIRTGNSRTSLPGQCISCNEQRFVVGFFNLEGRSMPPSWPEPSSASIINRLGSG

SEQ ID NO: 81913 - protein, 443 aa, Setaria italica
  misc_feature (232)..(232): Xaa can be any naturally occurring amino acid
  Transcript Sequence Number=SeqID_15939
  Gene Ontology: Mol. function=iron-sulfur cluster binding; Biological process=oxidation reduction
  Homolog annotation: Hit_ID=Q8LHR9; Match level="QueryCoverage=99%, HitCoverage=31%, E-value=0.0, Identity=78%"; Hit description =Putative aldehyde oxidase
  Pfam annotation: Domain name=Ald_Xan_dh_C2; Domain location=1-350; Score=182.1; E_value=1.6e-51; Accession=PF02738.10; Description =Aldehyde oxidase and xanthine dehydrogenase, molybdopterin binding domain
KNNNWGGLSYEAKVCKTNTATKSAMRGPGEVQGSYVAEAIVEHVASALSTDANLVRQRNLHTIESLALFHSECTEDDMGYTLPSICGQLTASENFQHRLEVVKSFNKNNRWKKRGLSFVPIVHKVLSRPTPGKVSILNDGSIAVEVGGIELGQGLWTKVKQMAAFGLGQLWADRSQELLERIRVIQADTLSNVQGGWTTGSTTSESSCEAVRLACNILVDRLKLVKEQFQRXQSNLSWDELISKAKMAGVDLSAREYYIPGPSGSYLNYGAAASEVEIDLLTGATTIVRSDLIYDCGQSLNPAVDLGQVEGAFVQGIGYFMTEEYVTNSDGLVISDGTWTYKIPTVDTIPKQFNVKLLNSGFHKKRVLSSKASGEPPLLLAASVHCATREAIRAARREPHCSASGPSSPSHFDLEVPAIMPVVKELCGLDNVERYLESLLSSK

SEQ ID NO: 81914 - protein, 82 aa, Setaria italica
  misc_feature (59)..(59): Xaa can be any naturally occurring amino acid
  Transcript Sequence Number=SeqID_15940
  Gene Ontology: Mol. function=small conjugating protein ligase activity; Cellular component=proteasome complex; Biological process =ubiquitin-dependent protein catabolic process
  Homolog annotation: Hit_ID=Q42973; Match level="QueryCoverage=85%, HitCoverage=48%, E-value=1e-29, Identity=90%"; Hit description =Ubiquitin carrier protein
  Pfam annotation: Domain name=UQ_con; Domain location=3-82; Score =35.0; E_value=1.1e-07; Accession=PF00179.18; Description=Ubiquitin -conjugating enzyme
NVCHVLSICYVLQVAFKTKVFHPNININGSICLDILKEQWSPALTVSKVLLSICSLLTXPDDPLVPEIAHMYKTDRVKYEST

SEQ ID NO: 81915 - protein, 72 aa, Setaria italica
  Transcript Sequence Number=SeqID_15941
  Subcellular localization annotation: CTP_CleavageSite=43; ConfidenceScore=5.15e-01
MGSGKASSPGAVAGASGGPPQQPPGAAVCCMCGDRGLLPELFRCSACSVRSQHTYCTDRYPKVESYGTCNWC

SEQ ID NO: 81916 - protein, 92 aa, Setaria italica
  Transcript Sequence Number=SeqID_15942
SYHTSIPFTSYTDLHRGKMPGKMRIFVASIQSNSSPEQEQPLPVKKYSSTNVLAYHTFTRHYRNNVTSLYAIQYASLCTVAKERRGCGFQSC

SEQ ID NO: 81917 - protein, 354 aa, Setaria italica
  Transcript Sequence Number=SeqID_15943
  Gene Ontology: Mol. function=ligase activity; Cellular component =chloroplast; Biological process=response to auxin stimulus
  Homolog annotation: Hit_ID=B9T6N8; Match level="QueryCoverage=99%, HitCoverage=61%, E-value=1e-130, Identity=63%"; Hit description =Indole-3-acetic acid-amido synthetase GH3.5, putative
  Pfam annotation: Domain name=GH3; Domain location=1-339; Score=258.6; E_value=1.5e-74; Accession=PF03321.5; Description=GH3 auxin -responsive promoter
ERVWEELCADIRAGALSATRVTSPAVRRAVSALLPAPNPALADEVARRCAALSNWYGVIPALFPNARYVHGIMTGSMEHYVKKLRHYAGGLPLVAAEYGASEGWVGANVEPETPPESATFTVLPNIGYFEFIPLKAGDGGAAASDTCFAEAEPVGLTEVTVGEHYEVVMTTFAGLYRYRLGDVVKVAGFYNSTPKLKFVCRRNLMLSINIDKNSEHDLQLAVDSAAKILAAEKLEVVDYSSHADVSRDPGHYVVFWELNAEANGDVLQSCCDELDRAFTDPGYVGSRKAAAIGPLELRVLQRGTFQKVLRHYLSLGAPVSQFKSPRCVGRSNNSGVLQILSGGVVKVFFSAAYD

SEQ ID NO: 81918 - protein, 797 aa, Setaria italica
  Transcript Sequence Number=SeqID_15944
  Gene Ontology: Mol. function=GTPase activity; Cellular component =chloroplast; Biological process=immune response
  Homolog annotation: Hit_ID=B9RB86; Match level="QueryCoverage=100%, HitCoverage=75%, E-value=0.0, Identity=52%"; Hit description =Interferon-induced guanylate-binding protein, putative
  Pfam annotation: Domain name=GBP_C; Domain location=46-345; Score =90.8; E_value=4.8e-24; Accession=PF02841.6; Description=Guanylate -binding protein, C-terminal domain
VRPVNNEKDLQRLDQLPLTNFRPEFRSGLDAFTKFVLDRTRPKQLGASTMTGPILAGLTQSFLDAINSGAVPTISSSWQSVEEAECRRAYDSAVDAYNSSFDQKKQVEEDSLREAHEDAMRKAITAFNASAVGAGPARSKFEKLLHSSLRKAFEDYKRNAFLEADLQCSNRVQNMESKVRAACNRPDAKLDDVVRLLDGLLTEYESMAYGPGKWKRLATFLQQCLAGPVLDLFRRQLEHIDAERNALRLKCNSSDDKLALLRKQLEASEGHRAEYLRRYEEVINDKQKISKDYSVRITELQAKGSKLEERCMSLSSSLETAKRESNDWKSKYDHIILQQKADESKLKSQIASLESRVSISEGRLSATREQAESAQEEASEWKRKYEVAVSEAKTALQRAAVAQERTNKKVQEREDALRAELANQLSEKEEEISRLSAKVSQTEIHATSLISRLEATEAKLKSHESDSLALKEEIRLLTDNLESIRSEVLSREKEVRILEQEKNHLQEKYLAECKKFDETDIRCKEAEREARRATELADVARAEAAAAQKDKGEAQRLAMERLALIERMERQVEALERDKVKMVEEVEKLHQSEKDAVSKVALLEKSVDEREKEIDEMLKRNNQQRSSTVQVLESLLATEREACAEANKRAEALSLQLQATQGKLDMLQQELTSVQLNETALDSKLKTSARRLRGEATESVHDMDIDNDNNGRRRKRSKSTTSPFKNNHTEDGGSVFIGEDTYTGSQQGTETEDYTKFTVQKLKQELTKHGFGAQLLQLKNPNKKDIVALYEKHVVGK

SEQ ID NO: 81919 - protein, 199 aa, Setaria italica
  Transcript Sequence Number=SeqID_15945
  Gene Ontology: Mol. function=peptidase activity; Biological process =proteolysis
  Homolog annotation: Hit_ID=Q7X7Q3; Match level="QueryCoverage=77%, HitCoverage=17%, E-value=1e-77, Identity=86%"; Hit description =OSJNBa0019D11.4 protein
MSRIPRGQGSSMSNRENPKVDQAVDSNEESRKHRRGAYLLLGLLIVFLHGSWSVYQIQFGNLPLPLDAKQAGKRGFSEASALEHVKYLTSLGPHPVGSDSLDLAVQYVYAVAEKIKKTSHWEVDVQLELFHTDIGANRLSKGLFKGKTLLYSDLKHVLLRVVPKYMPEAEENLILVSSHIDTCSTTEGAGDCSSCVGVM

SEQ ID NO: 81920 - protein, 99 aa, Setaria italica
  Transcript Sequence Number=SeqID_15946
  Gene Ontology: Mol. function=extracellular-glutamate-gated ion channel activity; Cellular component=integral to membrane; Biological process=G-protein coupled receptor protein signaling pathway
  Homolog annotation: Hit_ID=B9H686; Match level="QueryCoverage=82%, HitCoverage=8%, E-value=1e-19, Identity=54%"; Hit description =Glutamate-gated kainate-type ion channel receptor subunit GluR5
  Subcellular localization annotation: CTP_CleavageSite=47; ConfidenceScore=5.30e-01
MKIVFLMLLLLSLFLFPNGIHNSLAARPSVVSIGSILRFNSTTGGVSAVAIRAALEDINSDPTVLNGTMLRVDMRDTNCDDGFLGMVEALQFMETDVIA

SEQ ID NO: 81921 - protein, 80 aa, Setaria italica
  Transcript Sequence Number=SeqID_15947
MAMAKSILAVVAVAAALVVQLAAAADHPVGGNGAWDASGTSYNAWSANQKFVQGDTMCKPIHYSFPSTALLICDHCSCPS

SEQ ID NO: 81922 - protein, 47 aa, Setaria italica
  Transcript Sequence Number=SeqID_15948
MYWLTHGVDADYAKNLTAKCKPGNVATVQPLDPTTPSTFDLGYYNNV

SEQ ID NO: 81923 - protein, 180 aa, Setaria italica
  Transcript Sequence Number=SeqID_15949
  Gene Ontology: Mol. function=electron carrier activity
  Homolog annotation: Hit_ID=B6SQI9; Match level="QueryCoverage=80%, HitCoverage=72%, E-value=4e-42, Identity=60%"; Hit description =Uclacyanin-2
  Pfam annotation: Domain name=Cu_bind_like; Domain location=45-126; Score=114.3; E_value=4.1e-31; Accession=PF02298.9; Description =Plastocyanin-like domain
QHPQEEAELEMAMASRAILAVAAVAALAVQLAAAVDHPVGGSGAWDASGTNYNAWAAKQPIKQGDTMSFQYSASHDVTEVTKADYDTCSGANPIKSYTGGATTIKLTTPGKRYFICSVTGHCSAGMKLEVTVAAAAPAPAGKSKPRHQRSVAPTPAPAMAPEPSSTEELPNVSSPTAAPA

SEQ ID NO: 81924 - protein, 410 aa, Setaria italica
  misc_feature (26)..(26): Xaa can be any naturally occurring amino acid
  Transcript Sequence Number=SeqID_15950
  Gene Ontology: Mol. function=triacylglycerol lipase activity; Cellular component=extracellular region; Biological process=lipid catabolic process
  Homolog annotation: Hit_ID=B9SPI7; Match level="QueryCoverage=99%, HitCoverage=87%, E-value=0.0, Identity=74%"; Hit description =Catalytic, putative
GERDERRGAGPVVLDGSPPPIVLVQXAIFGFGKGRLGGLSYFAGAEKKDDRVLVPDLGSLTGIHDRACELFYYLKGGQVDYGEDHSKACGHTRFGRIYHTGHYPVWDDQNPVHFVGHSAGAQVVRVLHQMLADKAFPGHDTSEDWILSLTSLSGALNGTTRTYYDGMLVEDGRFMRSICLLQLCRLGVIVYDWLDIPWLKNYYNFGFDHYEMSRRKVGFSGLIDLLLGRTGPFASGDWILPDLTIQGSIKLNSSLRTFPNTFYFSYATKKTRKLFGITVPSSVLGVHPMLFLRVLQMCMWRHPQNAPLPYKGYRDEDWEDNDGALNTISMTYPRIPIEHPHRFVVDDSDCHPLQPGIWYYKIIEADHILFIVNRERAGVQFDLLYDGIFQRCRKHAFRKSLPTVPNETSQ

SEQ ID NO: 81925 - protein, 92 aa, Setaria italica
  Transcript Sequence Number=SeqID_15951
LHFSYVNLIKSIETSDPGQAILILALQANLGHKKKPTRDTLASCFSFPCQLRSPVIGRFTLERDARTARRRPRRSSRRGGGRVRARRRPRGR

SEQ ID NO: 81926 - protein, 100 aa, Setaria italica
  Transcript Sequence Number=SeqID_15952
  Subcellular localization annotation: CTP_CleavageSite=80; ConfidenceScore=5.55e-01
MMCTPLSVSTTSLISPTFRANAAFSKAFCILPLPNEPRSPPRLAELQSEFSAAMSSNLRSPETICSRSARARSAASSRVVAEMATPSGSLHEALRREPSC

SEQ ID NO: 81927 - protein, 139 aa, Setaria italica
  Transcript Sequence Number=SeqID_15953
  Gene Ontology: Mol. function=phosphatidylinositol N-acetylglucosaminyl transferase activity; Cellular component=integral to membrane; Biological process=GPI anchor biosynthetic process
  Homolog annotation: Hit_ID=B9SVS0; Match level="QueryCoverage=71%, HitCoverage=13%, E-value=1e-26, Identity=65%"; Hit description =Phosphatidylinositol N-acetylglucosaminyltransferase, putative
  Pfam annotation: Domain name=Gpi1; Domain location=1-63; Score=-93.9; E_value=0.097; Accession=PF05024.7; Description=N-acetylglucosaminyl transferase component (Gpi1)
NTCFSIRFFHTYLVSLLIICLCHNRGRKWNPLRQRLDSYDYTVEQHVVGSLLFTPVLLLIPTTSVFYVFFSILTTTVIWVCVMLEIVIAVIQSTPYAELTLWVTRRQRFPAGVFFLHVPSSSGRTFEDDDLSAQSKSRR

SEQ ID NO: 81928 - protein, 439 aa, Setaria italica
  Transcript Sequence Number=SeqID_15954
  Gene Ontology: Mol. function=phosphatidylinositol N-acetylglucosaminyl transferase activity; Cellular component=integral to membrane; Biological process=GPI anchor biosynthetic process
  Homolog annotation: Hit_ID=Q2HRH2; Match level="QueryCoverage=98%, HitCoverage=60%, E-value=1e-106, Identity=49%"; Hit description=N -acetylglucosaminyl transferase component
  Pfam annotation: Domain name=Gpi1; Domain location=77-266; Score =249.2; E_value=1e-71; Accession=PF05024.7; Description=N -acetylglucosaminyl transferase component (Gpi1)
MGIFLASASTILYIMILMFRKCLSHMFQYLMLHKVFKHSWNNIHLRSCQILHWPIVLRDTSLSSTVNVEYAHKAAIRKHALWSSIAVDLLMGFVLGAAFLLHTETICSCTIDLVHHMTDAILRSGCVWLMGVPAGFKLNTELAELLGMISLNAVQIYSTLWFFVGGYLRHIIRGIALSGIILGLTAPVSFFIDIIQLATLHVTMLHWLISSIYSRQIQTVASLWRLFRGRKWNPLRQRLDSYDYTVEQHVVGSLLFTPVLLLIPTTSVFYVFFSILTTTVIWVCVMLEIVIAVIQSTPYAELTLWVTRRQRFPAGVFFLHVPSSSGRTFEDDDLSAHPVRGFNERKTKDTVDEQSESLVSELDCNYATLVQVIGSNYERVFNRTGFSFCKQLAYGILSGERVPSSLHLQPSPSFPWMNIGITEYWMHCRDSVLSCAPKR

SEQ ID NO: 81929 - protein, 287 aa, Setaria italica
  Transcript Sequence Number=SeqID_15955
  Gene Ontology: Mol. function=metalloendopeptidase activity; Cellular component=proteinaceous extracellular matrix; Biological process =metabolic process
  Homolog annotation: Hit_ID=B6U4D1; Match level="QueryCoverage=89%, HitCoverage=71%, E-value=1e-93, Identity=66%"; Hit description =Metalloendoproteinase 1
  Pfam annotation: Domain name=PG_binding_1; Domain location=61-119; Score=67.8; E_value=4.1e-17; Accession=PF01471.10; Description =Putative peptidoglycan binding domain
  Pfam annotation: Domain name=Peptidase_M10; Domain location=156-287; Score=139.6; E_value=9.5e-39; Accession=PF00413.16; Description =Matrixin
  Pfam module annotation: Pfam domain module=PG_binding_1::Peptidase _M10; Domain location=61-119::156-287
  Subcellular localization annotation: CTP_CleavageSite=15; ConfidenceScore=5.07e-01
MTMASTTSPLLVLLSAMAVVALVAAPVSSADLPSTFADIASKIPNPWSAFRNLTGCHFGEEQQGVAKLKDYLAHFGYLPESSGFTDIFDADLEEAIKVYQRNFGLNITGVMDATTVAQMMAPRCGVADVINGTSTMGASSHAHGRNLYSYFPGSPSWPRSKKRLTYAITDTAATTIDRATLSRVFARAFARWSAATTLNFTETASARDADITIGFHAGDHGDGEAFDGPLGTLAHAFSPTDGRFHLDAAEAWVAAGDVSRASSDVAYDLESVAVHEIGHLLGLGHSS

SEQ ID NO: 81930 - protein, 282 aa, Setaria italica
  misc_feature (19)..(19): Xaa can be any naturally occurring amino acid
  misc_feature (87)..(87): Xaa can be any naturally occurring amino acid
  Transcript Sequence Number=SeqID_15956
  Gene Ontology: Mol. function=aspartic-type endopeptidase activity; Cellular component=chromatin; Biological process=chromatin assembly or disassembly
  Homolog annotation: Hit_ID=Q8SA91; Match level="QueryCoverage=98%, HitCoverage=11%, E-value=4e-94, Identity=60%"; Hit description =Putative gag-pol polyprotein
HFEFLVMSFRLCGVPVSFXGAMNSTLEPLLRKCVLVFFDDILVYSKTFEEHLLHLRAVLQLLATDKWQVKLSKYSFAQRQISYLVKXQISYLGHIVSFEGISIDSNKISTITSWSPPVNAKELRSFLGLAGYYRKFVKHFAVIAKPLTALLKKHIIFMWTSDHQPAFDALKSALSSAPVLATPDVSKQFCVETDACATGIGAVLTQNGHPLAFISKPLGPKTSGLSTYEKEYLAILLAVEQWRSYLQHAEFTIYTDQRSLIHLSDQRLNTPWQQKVFTKTFR

SEQ ID NO: 81931 - protein, 97 aa, Setaria italica
  Transcript Sequence Number=SeqID_15957
RALVGLSVLATAGVDVIRMHELAYENRLVCRSANRRFDRRWAETGESPCRRLRSHARARFSRELLVPRWLSCARANSWRTRCARCRGERRGDGMGLD

SEQ ID NO: 81932 - protein, 466 aa, Setaria italica
  Transcript Sequence Number=SeqID_15958
  Gene Ontology: Cellular component=plasma membrane
  Homolog annotation: Hit_ID=Q9ZPI0; Match level="QueryCoverage=99%, HitCoverage=76%, E-value=1e-176, Identity=61%"; Hit description =F15P23.2 protein
  Pfam annotation: Domain name=DUF248; Domain location=1-456; Score =819.8; E_value=1.7e-243; Accession=PF03141.8; Description=Putative methyltransferase
  Pfam annotation: Domain name=Methyltransf_11; Domain location=74-169; Score=45.4; E_value=2.3e-10; Accession=PF08241.4; Description =Methyltransferase domain
  Pfam annotation: Domain name=Methyltransf_12; Domain location=74-167; Score=14.1; E_value=0.025; Accession=PF08242.4; Description =Methyltransferase domain
  Pfam module annotation: Pfam domain module=DUF248::Methyltransf _11::Methyltransf_12; Domain location=1-456::74-169::74-167
YRRPWPESLHKIWHDNMPYGKIAERKGHQGWMKHEGSHFIFPGGGTMFPDGAEQYIEKLSQYVPLKTGVLRTGLDMGCGVASFGGFLLKENIMTLSFAPRDSHKSQIQFALERGIPAFLLMLGTRRLPFPAQSFDFVHCSRCLIPFTAYNGSYLIEVDRLLRPGGYLIISGPPVKWKKQEKEWDELQVMAGALCYKLITVDGNTAIWKKPAEASCLPNQNEFGLDLCSTDDDPDEAWYFKLKKCVSKVSMVEEIAIGSIQRWPDRLSKPSARASLINNGANLFGVDSQKWVRRVSYYKKSLGVKLGTTHIRNVMDMNAFLGGFAAAIVSDPVWVMNVVPARKPLTLGVIYDRGLIGVYHDWCEPFSTYPRTYDLIHADAIDSLISDPISGTSRCDLFDVMLEMDRILRPEGIAVIRGSPDLIAKAAQVAQSIRWNAQVRDSEPESGNTEKILVATKTFWKLPLTSQ

SEQ ID NO: 81933 - protein, 71 aa, Setaria italica
  misc_feature (17)..(17): Xaa can be any naturally occurring amino acid
  Transcript Sequence Number=SeqID_15959
  Gene Ontology: Mol. function=protein serine/threonine kinase activity; Biological process=protein amino acid phosphorylation
MPPWWSKSSSKDVKKTXTKENLIDTFHRLISPNEQKGSTKSKRNCRRGNNAAVEKVCKSTTVSRPTSPSKE

SEQ ID NO: 81934 - protein, 333 aa, Setaria italica
  Transcript Sequence Number=SeqID_15960
  Gene Ontology: Mol. function=zinc ion binding; Cellular component =intracellular
  Homolog annotation: Hit_ID=Q9M9L9; Match level="QueryCoverage=54%, HitCoverage=46%, E-value=5e-25, Identity=38%"; Hit description =F10A16.6 protein
DVKSGAPTAGERMKASNFHANVLKIGNWEYISRYEGDLVAKCYFAKHKLVWEVLHDGLKSKIEIQWSDITALKATYPENEQEATLDLVLARPPLFFKETDPQPRKHTLWQAASDFTDGQASLNRKHTLQCHSSLLSKNFEKLTQCDQRLYELSQQPDAILETPDFEPKRSIFEDPNDSKDCLGFNGLKYEREASLPKFNDPASPCVISSLSKNVGQPINIGSGATDFQGRDVPQGPKNCNQWNQLKGPGLRASISVEDLVNHLGDCIGEQRSAGDPPLANNEEQSKEVLEGLVQYLFSDTQGLPASDDKYLMARVDSLYSCLRKHSTIHHTQA

SEQ ID NO: 81935 - protein, 76 aa, Setaria italica
  Transcript Sequence Number=SeqID_15961
FLQCVRFLQKYPQYNRRNSLFDTVVEKFGTGDIGKRYMPELLSHTYLVSLICYHLNKDLFEMNPLMKQLYARMMIG

SEQ ID NO: 81936 - protein, 302 aa, Setaria italica
  Transcript Sequence Number=SeqID_15962
  Gene Ontology: Mol. function=methyltransferase activity; Cellular component=plastid inner membrane; Biological process=metabolic process
  Homolog annotation: Hit_ID=B6TYV2; Match level="QueryCoverage=90%, HitCoverage=77%, E-value=1e-148, Identity=93%"; Hit description =Inner envelope membrane protein
  Pfam annotation: Domain name=Methyltransf_11; Domain location=80-175; Score=104.2; E_value=4.5e-28; Accession=PF08241.4; Description =Methyltransferase domain
  Pfam annotation: Domain name=Methyltransf_12; Domain location=80-173; Score=49.7; E_value=1.1e-11; Accession=PF08242.4; Description =Methyltransferase domain
  Pfam annotation: Domain name=Ubie_methyltran; Domain location=32-222; Score=-49.9; E_value=2.2e-08; Accession=PF01209.10; Description =ubiECOQ5 methyltransferase family
  Pfam module annotation: Pfam domain module=Methyltransf _11::Methyltransf_12::Ubie_methyltran; Domain location=80-175::80 -173::32-222
LARRSPVAAGARLRCAASSSSAARPVTAPRFIQHKKEAFWFYRFLSIVYDHVINPGHWTEDMRDDALEPADLYSRYLKVVDVGGGTGFTTLGIVKHVNPENVTLLDQSPHQLEKARQKEALKGVTIMEGDAEDLPFPTDTFDRYISAGSIEYWPDPQRGIKEAYRVLRMGGTACVIGPVYPTFWLSRFFADMWMLFPKEEEYIEWFKKAGFKDVKLKRIGPKWYRGVRRHGLIMGCSVTGVKRERGDSPLELGPKAEDVSKPVNPITFLFRFLMGTICAAYYVLVPIYMWIKDQIVPKGMPI

SEQ ID NO: 81937 - protein, 71 aa, Setaria italica
  Transcript Sequence Number=SeqID_15963
  Gene Ontology: Mol. function=6'-deoxychalcone synthase activity; Biological process=flavonoid biosynthetic process
  Homolog annotation: Hit_ID=B6TLR8; Match level="QueryCoverage=97%, HitCoverage=20%, E-value=3e-21, Identity=62%"; Hit description =NAD(P)H-dependent oxidoreductase
HLPLMIMMRLVRACRNLQMEYLDLYLIHWPICIKPVPPSFPAKKEDAMPFDSEGVWLAMEECHRLGLAKAI

SEQ ID NO: 81938 - protein, 70 aa, Setaria italica
  Transcript Sequence Number=SeqID_15964
VHGGGVEVAVAHLDGRQHGVLGGLGHQGERRRAHADRRHRRRVARPQGHLRHHRRRRRRRRRGCHASWCA

SEQ ID NO: 81939 - protein, 85 aa, Setaria italica
  Transcript Sequence Number=SeqID_15965
  Gene Ontology: Mol. function=oxidoreductase activity; Biological process=oxidation reduction
  Homolog annotation: Hit_ID=B6TH11; Match level="QueryCoverage=90%, HitCoverage=21%, E-value=7e-31, Identity=79%"; Hit description =NAD(P)H-dependent oxidoreductase
YTSIILFLQVALRWIYEQGVTSIVKSYNKERLKQNLEIFDWELTDEDQLKISQIPQKKIFEASDMFSQEGEFRSVDPADLDIVEE

SEQ ID NO: 81940 - protein, 68 aa, Setaria italica
  Transcript Sequence Number=SeqID_15966
  Gene Ontology: Mol. function=oxidoreductase activity; Biological process=oxidation reduction
  Homolog annotation: Hit_ID=B6TH11; Match level="QueryCoverage=100%, HitCoverage=19%, E-value=4e-22, Identity=73%"; Hit description =NAD(P)H-dependent oxidoreductase
EQGVTSIAKSYNMERLKQNLETFDWELTDEDRLKISQIPQKKVVKGTDLFSREGEFTSVDAADLDVEE

SEQ ID NO: 81941 - protein, 338 aa, Setaria italica
  Transcript Sequence Number=SeqID_15967
  Gene Ontology: Mol. function=oxidoreductase activity; Biological process=oxidation reduction
  Homolog annotation: Hit_ID=B6TLR8; Match level="QueryCoverage=98%, HitCoverage=100%, E-value=1e-155, Identity=78%"; Hit description =NAD(P)H-dependent oxidoreductase
  Pfam annotation: Domain name=Aldo_ket_red; Domain location=24-309; Score=435.6; E_value=7.9e-128; Accession=PF00248.13; Description =Aldoketo reductase family
  Subcellular localization annotation: CTP_CleavageSite=54; ConfidenceScore=5.06e-01
MEMRIGMASKGTATVAAAVPEVALRSGNARPMPAVGMGTAAFPLVPEATKNAVLAAIEVGYRHFDTASMYGTEKPLGEAVAEAVRRGLLQSREELFVTSKLWCTQNHPDLVLPSLRETLKNLQMEYLDLYLIHWPICIKPVPPSFPAKKEDAMPFDFEGVWLAMEECHRLGLAKAIGVSNFTTKHLDKVLAAATIPPAVNQVELNPAWQQRTLRAYCAEKGIHVAAYSPLGGQNWDGTGRNAVLESDALAGIAKARGKTVAQVALRWIYEQGVTSIVKSYNKERLKQNLEIFDWELTDEDQLKISQIPQKKIFEASDMFSQEGEFRSVDPADLDIVEE

SEQ ID NO: 81942 - protein, 42 aa, Setaria italica
  Transcript Sequence Number=SeqID_15968
  Gene Ontology: Mol. function=oxidoreductase activity, acting on the CH-CH group of donors; Cellular component=peroxisome; Biological process=fatty acid metabolic process
  Homolog annotation: Hit_ID=C1K4P7; Match level="QueryCoverage=95%, HitCoverage=16%, E-value=3e-12, Identity=75%"; Hit description=Acyl -CoA dehydrogenase (Fragment)
FVVTRSLYEEAWKDPLNETVVPDGYHEYLRPLLKQQLRLSRL

SEQ ID NO: 81943 - protein, 249 aa, Setaria italica
  misc_feature (114)..(114): Xaa can be any naturally occurring amino acid
  misc_feature (139)..(139): Xaa can be any naturally occurring amino acid
  misc_feature (150)..(150): Xaa can be any naturally occurring amino acid
  misc_feature (217)..(217): Xaa can be any naturally occurring amino acid
  Transcript Sequence Number=SeqID_15969
  Gene Ontology: Mol. function=oxidoreductase activity, acting on the CH-CH group of donors; Cellular component=peroxisome; Biological process=fatty acid metabolic process
  Homolog annotation: Hit_ID=B9SH72; Match level="QueryCoverage=99%, HitCoverage=57%, E-value=1e-52, Identity=76%"; Hit description=Acyl -CoA oxidase, putative
MAMDAVDHLAAERAAARFDVEEMKVAWAGSRHAVDVEDRMARLVASDPVFRKDNRTMLSRKDLFKDTLRKAAHAWKRIVELRLTEEEANLLRLYVDQPGYVDLHWVCLSILYSXGMFVPANKGQGTEEQQQKWLPLYKXVPKQLLYGTMXFVRQSIVADASKALSRAVCIAVRYSAIRKQFGSQDGGPETQVLNYKTQQSRLFPLLASAYAFRFGGXDWLRWLYTDVTQKLEAKDYSTLQEAHACTAGF

SEQ ID NO: 81944 - protein, 108 aa, Setaria italica
  Transcript Sequence Number=SeqID_15970
  Gene Ontology: Mol. function=oxidoreductase activity, acting on the CH-CH group of donors; Cellular component=peroxisome; Biological process=fatty acid metabolic process
  Homolog annotation: Hit_ID=O23977; Match level="QueryCoverage=92%, HitCoverage=15%, E-value=3e-47, Identity=88%"; Hit description =Putative acyl-CoA oxidase
  Pfam annotation: Domain name=ACOX; Domain location=2-101; Score=51.8; E_value=2.6e-12; Accession=PF01756.11; Description=Acyl-CoA oxidase
RRLVTILHKHLGDFLATGCITPKQGALANEQLGKLYAQVRPNAVALVDAFNYTDHYLGSVLGRYDGNVYPALYEEAWKDPLNETVVPEGYHEYLRPLLKQQLNLSSRL

SEQ ID NO: 81945 - protein, 670 aa, Setaria italica
  misc_feature (660)..(660): Xaa can be any naturally occurring amino acid
  Transcript Sequence Number=SeqID_15971
  Gene Ontology: Mol. function=oxidoreductase activity, acting on the CH-CH group of donors; Cellular component=peroxisome; Biological process=fatty acid metabolic process
  Homolog annotation: Hit_ID=B9SH72; Match level="QueryCoverage=94%, HitCoverage=95%, E-value=0.0, Identity=80%"; Hit description=Acyl -CoA oxidase, putative
  Pfam annotation: Domain name=ACOX; Domain location=481-663; Score =255.6; E_value=1.2e-73; Accession=PF01756.11; Description=Acyl-CoA oxidase
  Pfam annotation: Domain name=Acyl-CoA_dh_1; Domain location=279-444; Score=-16.0; E_value=0.0085; Accession=PF00441.16; Description=Acyl -CoA dehydrogenase, C-terminal dom
  Pfam annotation: Domain name=Acyl-CoA_dh_M; Domain location=139-199; Score=70.1; E_value=8.2e-18; Accession=PF02770.11; Description=Acyl -CoA dehydrogenase, middle domain
  Pfam module annotation: Pfam domain module=ACOX::Acyl-CoA_dh_1::Acyl -CoA_dh_M; Domain location=481-663::279-444::139-199
MAMDAAAEADHLAAERAAARFDVEEMKVAWAGSRHAVDVADRMARLVASDPVFRKDNRTMISRKDLFKDTLRKAAHAWKRIVELRLTEEEAGLLRQYVDQPGYVDLHWGMFVPAIKGQGTEEQQKKWLPLAYKFQIIGCYAQTELGHGSNVQGLETTATFDPKTDEFVIHSPTLTSSKWWPGGLGKASTHAVVYARLITEGKDYGIHGFIVQLRSLEDHSPLPGVTLGDIGGKFGSGAYNSMDNGVLRFHHVRIPRDQMLMRLSQVTREGKYVHSDVPKQLLYGTMVFVRQSIVADASKALSRAVCIAVRYSAVRKQFGSQDGGPETQVLNYRTQQSRLFPLLASAYAFRFVGDWLKWLYTDVTQKLEAKDYSTLQEAHACTAGLKAVTTSATADAIEECRKLCGGHGYLNSSGLPELFAVYVPACTYEGDNVVLLLQVARILMKTVSQLTSGKQPVGTMAYMGKVQYLMQCKCAVNTAEDWLNPAAIQEAFEARALRMAVNCAQNIGQATSQEEGFYERSPDLLEAAAAHIQLIIVTKFIEKVQQDIPGHGVKEQLQNLCNVYALYILHKHLGDFLATGCITPKQGALANEQLGKLYAQVRPNAVALVDAFNYTDHYLGSVLGRYDGNVYPALYEEAWKDPLNETVVPDGYHEYLRPLXLKQQLRLSRL

SEQ ID NO: 81946 - protein, 235 aa, Setaria italica
  Transcript Sequence Number=SeqID_15972
  Gene Ontology: Mol. function=transporter activity; Cellular component= integral to membrane; Biological process=transport
  Homolog annotation: Hit_ID=B6TB19; Match level="QueryCoverage=100%, HitCoverage=45%, E-value=1e-118, Identity=87%"; Hit description =Patellin-5
  Pfam annotation: Domain name=CRAL_TRIO; Domain location=8-164; Score =44.4; E_value=4.5e-10; Accession=PF00650.12; Description=CRALTRIO domain
FTDDAVYKKALGSEEGKARFLRWRVRAMESHVAELDFKPGGAASLLQVTDLKNSPGPAKKDFRVAVKQVLDLFQDNYPELVARNILINVPFWYYAFSTLFYPFLTQRTKSKFVIARPSKVTETLLKYIPIEAIPVKYGGLKRDSDTEFSADDSEVTELTVKGSSTETIEIEATEADATLTWDLTVLGWEVNYKEEFVPADEGSYTIIVRKGKKMGAGEEAVRNSFRAGEPGKVVL

SEQ ID NO: 81947 - protein, 141 aa, Setaria italica
  Transcript Sequence Number=SeqID_15973
  Gene Ontology: Mol. function=cytokinin dehydrogenase activity; Cellular component=extracellular region; Biological process =cytokinin metabolic process
  Homolog annotation: Hit_ID=B9GRI7; Match level="QueryCoverage=85%, HitCoverage=22%, E-value=7e-52, Identity=75%"; Hit description =Cytokinin oxidase
  Pfam annotation: Domain name=Cytokin-bind; Domain location=1-137; Score=78.4; E_value=2.5e-20; Accession=PF09265.2; Description =Cytokinin dehydrogenase 1, FAD and cytok
VVAAEGLINNWRSSFFSPQNPVKLSSLKHHSGVLYCLEVTKNYDDATAASVDQDVDALLGELNFLPGTVFTTDLPYVDFLDRVHKAELKLRTKGMWEVPHPWLNLFVPASRIADFDRGVFRGILGGRTAGAGGPILIPNPN

SEQ ID NO: 81948 - protein, 101 aa, Setaria italica
  Transcript Sequence Number=SeqID_15974
TKLNKRRNRNRSNLVPGGGEGGWLPAITAAAGTAAGRLHRHTLRAQFNWILFFDYECYYSVCVHVYGTMAAMLGAACSRLPAAYRVYADVNMNTYHYKKKT

SEQ ID NO: 81949 - protein, 81 aa, Setaria italica
  Transcript Sequence Number=SeqID_15975
  Gene Ontology: Mol. function=electron carrier activity; Biological process=oxidation reduction
  Homolog annotation: Hit_ID=Q9ATV0; Match level="QueryCoverage=70%, HitCoverage=10%, E-value=7e-19, Identity=73%"; Hit description =Putative cytochrome P450
GNDDRNLLSAMLRSAASSGGSVAAEDFIVDNCKNIYFAGYETTAVTAAWCLMLLALHPEWQCRVRDEVRHACAGAGAAPDF

SEQ ID NO: 81950 - protein, 194 aa, Setaria italica
  Transcript Sequence Number=SeqID_15976
  Gene Ontology: Cellular component=chloroplast
  Homolog annotation: Hit_ID=Q8LB30; Match level="QueryCoverage=61%, HitCoverage=51%, E-value=1e-66, Identity=96%"; Hit description=DAG protein, putative
SAALPRAAFPAIAVAAVRPRRAQQLKPPAAAGAAGGEQRETILLPGCDYNHWLIVMEFPKDPAPTREQMIDTYLNTLATVLGSMEEAKKNMYAFSTTTYTGFQCTVDEETSEKFKGLPGVLWVLPDSYIDVKNKDYGGDKYINGEIIPCTYPTYQPKERRTSKYESRRYERRRDGPPANRRPRQQAPQTESASS

SEQ ID NO: 81951 - protein, 218 aa, Setaria italica
  Transcript Sequence Number=SeqID_15977
  Gene Ontology: Mol. function=protein serine/threonine kinase activity; Biological process=protein amino acid phosphorylation
  Homolog annotation: Hit_ID=Q6YVV6; Match level="QueryCoverage=67%, HitCoverage=22%, E-value=9e-69, Identity=89%"; Hit description =Putative serine/threonine-specific protein kinase
  Pfam annotation: Domain name=Pkinase; Domain location=79-218; Score= -61.4; E_value=7.8e-05; Accession=PF00069.17; Description=Protein kinase domain
  Pfam annotation: Domain name=Pkinase_Tyr; Domain location=79-218; Score=-82.3; E_value=3e-08; Accession=PF07714.9; Description=Protein tyrosine kinase
  Pfam module annotation: Pfam domain module=Pkinase::Pkinase_Tyr; Domain location=79-218::79-218
PAAGEGRRNYNVPGIVLAVVLAVLAALNLVACLCFWRRRQRQRRRPTAEAKKPYQAEDVEMVDSMMMDVSTLRTATGDFDESNKLGEGGFGAVYKGVLPDGDEIAVKRLSDSSTQGEDELKNELALVAKLKHKNLVMLVGVCLEQQERLLVYEYVPNRSLDLILFDTENENHEQLDWRQRYRIINGIARGLQYLHEDSQLKVVHRDLKASNILLDANM

SEQ ID NO: 81952 - protein, 389 aa, Setaria italica
  misc_feature (204)..(204): Xaa can be any naturally occurring amino acid
  misc_feature (218)..(218): Xaa can be any naturally occurring amino acid
  Transcript Sequence Number=SeqID_15978
  Gene Ontology: Mol. function=sugar binding; Cellular component =cytosol; Biological process=cell proliferation
  Homolog annotation: Hit_ID=B9R809; Match level="QueryCoverage=90%, HitCoverage=46%, E-value=3e-90, Identity=48%"; Hit description =Pentatricopeptide repeat-containing protein, putative
  Pfam annotation: Domain name=Jacalin; Domain location=240-370; Score =113.8; E_value=5.6e-31; Accession=PF01419.9; Description=Jacalin -like lectin domain
  Pfam annotation: Domain name=Jacalin; Domain location=33-164; Score =93.5; E_value=7.5e-25; Accession=PF01419.9; Description=Jacalin-like lectin domain
  Pfam module annotation: Pfam domain module=Jacalin::Jacalin; Domain location=240-370::33-164
WNKMVSFPSYYGDKGAAAMNSTHTYGPWGGSGGTIFDDGVYTGVWQINLTRAVGISSMKVLYDRNGQAVWWNTYTYSGGVPPDKIVFDFPSEVLTHITGFLDSAIIMGPTVVRSLTFHTNKRTYGPYGDESGTYFSTSFTNGRIVGFHGREGWYIDGIGVHVQEGKVAPQRFVSRPTTPTSPSLHYNMLAQAQSNTYTNDEMRXLKQTMTEAFEPLCXVAYGMVKEPVPMGPGPWGGEGGRPWDDGVYTGVKQIYIMRGAFIGSIQVEYDRSGYSVWSARHGNIGHITHRVKLDYPHEVLTCVYGYYNTSREDGPRVLRSLTFVTNRGKYGPFGDEFGAYFSSAMTEGKVVGFHGRSGQHLDAIGVHMQHWLGGQGGLPPKYVLSKYLF

SEQ ID NO: 81953 - protein, 43 aa, Setaria italica
  Transcript Sequence Number=SeqID_15979
FMALALLRGGVSRRTIKASAIYGLHMALHPKALILPKGMDPAY

SEQ ID NO: 81954 - protein, 112 aa, Setaria italica
  misc_feature (43)..(43): Xaa can be any naturally occurring amino acid
  misc_feature (71)..(71): Xaa can be any naturally occurring amino acid
  Transcript Sequence Number=SeqID_15980
  Pfam annotation: Domain name=zf-CCCH; Domain location=16-40; Score =18.8; E_value=0.005; Accession=PF00642.16; Description=Zinc finger C- x8-C-x5-C-x3-H type (and similar)
FVTFYFLHLFTAATSDNVEVCRDFKRGECNRPACRFFHPYTSXKFLLAKSECPALCRCYRCAAAAAATAAXPILLLPPMSHVPIPYPEMLYMPPPPPPPLGVPMMGPPPSPP

SEQ ID NO: 81955 - protein, 258 aa, Setaria italica
  Transcript Sequence Number=SeqID_15981
  Gene Ontology: Mol. function=nucleic acid binding; Cellular component= cytoplasm; Biological process=compound eye photoreceptor cell differentiation
  Homolog annotation: Hit_ID=B6U1D3; Match level="QueryCoverage=96%, HitCoverage=75%, E-value=1e-106, Identity=75%"; Hit description=Zinc finger C-x8-C-x5-C-x3-H type family protein
  Pfam annotation: Domain name=zf-CCCH; Domain location=128-152; Score =10.1; E_value=0.071; Accession=PF00642.16; Description=Zinc finger C- x8-C-x5-C-x3-H type (and similar)
  Pfam annotation: Domain name=zf-CCCH; Domain location=200-224; Score =18.7; E_value=0.0052; Accession=PF00642.16; Description=Zinc finger C-x8-C-x5-C-x3-H type (and similar)
  Pfam annotation: Domain name=zf-CCCH; Domain location=21-47; Score =7.4; E_value=0.16; Accession=PF00642.16; Description=Zinc finger C -x8-C-x5-C-x3-H type (and similar)
  Pfam annotation: Domain name=zf-CCCH; Domain location=232-256; Score =18.8; E_value=0.005; Accession=PF00642.16; Description=Zinc finger C- x8-C-x5-C-x3-H type (and similar)
  Pfam annotation: Domain name=zf-CCCH; Domain location=56-81; Score =4.8; E_value=0.35; Accession=PF00642.16; Description=Zinc finger C -x8-C-x5-C-x3-H type (and similar)
  Pfam annotation: Domain name=zf-CCCH; Domain location=98-124; Score =9.3; E_value=0.09; Accession=PF00642.16; Description=Zinc finger C -x8-C-x5-C-x3-H type (and similar)
  Pfam module annotation: Pfam domain module=zf-CCCH::zf-CCCH::zf -CCCH::zf-CCCH::zf-CCCH::zf-CCCH; Domain location=128-152::200 -224::21-47::232-256::56-81::98-124
TKTKIRNLQPPDGRRRRHNDLTVEACRDFLRDRCTRSDLECRYAHPHPSVSVDRENKVTACADSLRNNCFRGRTCRYYHPPPHIQEQLLRSIGVEDPKVKTICRDFTRGKCSRSANECRFLHHSSVEELAIVCQDFLRGQCNRKSCRYSHAVAHPVPPMSHVPIPYPEMLYMPPPPPPPLGVPMMGPPPSPPRPYSDNKNRVEVCRDFLKNMCTRESCRFLHPETHTAATSDNVEVCRDFKRGECNRPACRFFHPYTS

SEQ ID NO: 81956 - protein, 93 aa, Setaria italica
  Transcript Sequence Number=SeqID_15982
  Gene Ontology: Mol. function=protein serine/threonine kinase activity; Cellular component=integral to plasma membrane; Biological process=protein amino acid phosphorylation
  Homolog annotation: Hit_ID=Q84Q68; Match level="QueryCoverage=100%, HitCoverage=18%, E-value=2e-35, Identity=72%"; Hit description =Protein kinase
LEGAGEVAIKRLRPGSGQGDREFRAEVEIISRVHHRHLVSLVGYCIHGDQRLLVYEYVPNKTLELHLHGGNRPALDWQHRWRIALGSAKGLAY

SEQ ID NO: 81957 - protein, 59 aa, Setaria italica
  Transcript Sequence Number=SeqID_15983
ILYFTTEPLHYLFYTFTYAKQNISRQKIGWDNYHEEIRNVLNIVKMAFQSKLIHHSLFT

SEQ ID NO: 81958 - protein, 871 aa, Setaria italica
  Transcript Sequence Number=SeqID_15984
  Gene Ontology: Mol. function=endoribonuclease activity, producing 5' -phosphomonoesters; Cellular component=endoplasmic reticulum membrane; Biological process=protein amino acid phosphorylation
  Homolog annotation: Hit_ID=B9S6W8; Match level="QueryCoverage=49%, HitCoverage=48%, E-value=1e-152, Identity=59%"; Hit description =Kinase, putative
  Pfam annotation: Domain name=Pkinase; Domain location=452-737; Score =163.9; E_value=4.7e-46; Accession=PF00069.17; Description=Protein kinase domain
  Pfam annotation: Domain name=Pkinase_Tyr; Domain location=452-737; Score=-12.5; E_value=6.8e-13; Accession=PF07714.9; Description =Protein tyrosine kinase
  Pfam annotation: Domain name=Ribonuc_2-5A; Domain location=742-868; Score=236.8; E_value=5.3e-68; Accession=PF06479.4; Description =Ribonuclease 2-5A
  Pfam module annotation: Pfam domain module=Pkinase::Pkinase _Tyr::Ribonuc_2-5A; Domain location=452-737::452-737::742-868
DSPPPGARSTEVVAPAAPKKQSLRELFVVPKPPRHEPARAVSGEAEAEPRSVLQFYDNGTIQLVDRSSQSPLWEISTGPPLSDHITTAESGLNYLIYPLNGNENMNGNGTELWEVYNGNNVMLPWKLEEFVARSPYIRDSVVTVGSKASTVFVVDADNGEIIYKRSIPAPLNELEGPGVEGAPPKLNARTSDDSDNIIVVVRTDYSLSASDLGKHLFNWTRTSFTANYYMKYSHPDMLDQSSCLRGDIPCIRTEGLPLALPDSDSANAIILRDETPIISRDGTDTLKSLQTSRKLPKVSGKSNFVLDDAQNQTHDDARSHFISPDPKATNMPTRNTYRWFFPLFPIFLVIGYLFSLMSANKTCRQFVIQLMRPFMREKKPVDIRGRSEGTPNKRRKTRKKDGLVNGHETLSASDKESNETGGSMEAPVRENSAVTDKGITGGLDGRQIGKLFVSNKEIGRGSNGTVVFEGSYDGRQVAVKRLLHSHNDIAEKETQNLIISDRDPNIVRLYGCEHDNDFVYISLERCQCSLADLIQKQSSLSSGESIANIEVSISIKSKFSNVKGVDVELWMQDGLPSAQLLKLMRDVVAGLAHLHNLGIIHRDLKPQNVLISADGPIRAKLSDMGISKRLQDDMTSVSHHGTGIGSSGWQAPEQLCHGRQTRAMDLFSLGCLIFYCITKGKHPFGEYYERDRNIVNNCFDLFVVDYIPEAVHLISQLLHPNPEMRPTAVYVMHHPLFWSPELRLSFLRDTSDRIEKTSETDLINALEGVGPVAFGGKWGDKFDAALVTDMGRYRKYNFESIRDLLRYIRNKSGHYRELSDDVKAILGSLPEGFDRYFASRFPKLLIEVYKVMWVHCKEEEAFSKYFNGSSV

SEQ ID NO: 81959 - protein, 60 aa, Setaria italica
  Transcript Sequence Number=SeqID_15985
GDRRRSLERKKKKEGGYNLNKREGRGRKLRFNQNSWSVRQDRVRASSQQDLSCVIHDYTK

SEQ ID NO: 81960 - protein, 161 aa, Setaria italica
  misc_feature (133)..(133): Xaa can be any naturally occurring amino acid
  Transcript Sequence Number=SeqID_15986
  Homolog annotation: Hit_ID=B6U7W0; Match level="QueryCoverage=95%, HitCoverage=19%, E-value=7e-72, Identity=81%"; Hit description =Signal transducer
  Pfam annotation: Domain name=WD40; Domain location=3-40; Score=43.7; E_value=7.5e-10; Accession=PF00400.24; Description=WD domain, G-beta repeat
  Pfam annotation: Domain name=WD40; Domain location=44-82; Score=34.8; E_value=3.4e-07; Accession=PF00400.24; Description=WD domain, G-beta repeat
  Pfam annotation: Domain name=WD40; Domain location=86-123; Score=5.7; E_value=8.4; Accession=PF00400.24; Description=WD domain, G-beta repeat
  Pfam module annotation: Pfam domain module=WD40::WD40::WD40; Domain location=3-40::44-82::86-123
LSEKPVITFAGHSEDVLDLSWSKSQYLLSSSMDKTVRLWHMSSTYCLKTFSHSDYVTCIQFNPVDDRYFISGSLDEKVRIWSIPKREIVDWVDLHEMVTAACYTPDGKGALIGSHKGSCHLYDTSDDMLCYKXKIDLQIKKRKSSQKKITGFQVLILNILL

SEQ ID NO: 81961 - protein, 643 aa, Setaria italica
  misc_feature (314)..(314): Xaa can be any naturally occurring amino acid
  Transcript Sequence Number=SeqID_15987
  Homolog annotation: Hit_ID=B6U7W0; Match level="QueryCoverage=100%, HitCoverage=79%, E-value=0.0, Identity=74%"; Hit description=Signal transducer
  Pfam annotation: Domain name=WD40; Domain location=139-177; Score =43.3; E_value=9.7e-10; Accession=PF00400.24; Description=WD domain, G-beta repeat
  Pfam annotation: Domain name=WD40; Domain location=245-282; Score =43.7; E_value=7.5e-10; Accession=PF00400.24; Description=WD domain, G-beta repeat
  Pfam annotation: Domain name=WD40; Domain location=315-353; Score =24.0; E_value=0.0006; Accession=PF00400.24; Description=WD domain, G- beta repeat
  Pfam annotation: Domain name=WD40; Domain location=357-394; Score =5.7; E_value=8.4; Accession=PF00400.24; Description=WD domain, G -beta repeat
  Pfam annotation: Domain name=WD40; Domain location=407-446; Score =6.0; E_value=7.6; Accession=PF00400.24; Description=WD domain, G -beta repeat
  Pfam annotation: Domain name=WD40; Domain location=448-488; Score =16.7; E_value=0.099; Accession=PF00400.24; Description=WD domain, G -beta repeat
  Pfam annotation: Domain name=WD40; Domain location=569-635; Score =7.2; E_value=5.6; Accession=PF00400.24; Description=WD domain, G -beta repeat
  Pfam module annotation: Pfam domain module=WD40::WD40::WD40::WD40::WD4 0::WD40::WD40; Domain location=139-177::245-282::315-353::357 -394::407-446::448-488::569-635
  Subcellular localization annotation: CTP_CleavageSite=75; ConfidenceScore=5.07e-01
SVREVGTGRQLTVEELGRSPIVQELMRRQAFSTPNSNCTSNSQSGASTPIERSSSSSSNGGARSKRRSSWLRSIRCVAGSMATHSRDRRSSDEKDTSSEKGGHHSSSATDDSQDRVPRHGPSRVKVRQYGKTYKELSSLFMTQDIQAHNGSIWSIKFSPDGRYLASAGEDCVIHVWEVLEFERVGKERAVEENGVCNESSELMVSSAAPSGSHWEKKLRSKVLHSGGSVSSDRLMVPEYVFALSEKPVITFAGHSEDVLDLSWSKSQYLLSSSMDKTVRLWHMSSTYCLKTFSHSDYVTCIPLESLSFSVSALXSIFLLISFLFDSVTCIQFNPVDDRYFISGSLDEKVRIWSIPKREIVDWVDLHEMVTAACYTPDGKGALIGSHKGSCHLYDTSDDMLCYKKRIDLQIKKRKSSQKKITGFQFVPGSPSKVVITSADSRIRVLDGFELVNRFKGFRNTSSQISACSAGNGRHIISASEDSHVYMWRNNDDFEPSRKKGIVSVTNTHEHFHCKSVTVAVTWPFTSTTMTSLMNPRKQEELDCGLENDHVLQTKPAKAQEMPDVKYQSTTITSNNSNHTGDWTSVTWPEELTTPAKQSHRPTTCLADEGDQVPNRSAWGLVIVTAGRGGQIRTFQNFGFPVRV

SEQ ID NO: 81962 - protein, 368 aa, Setaria italica
  Transcript Sequence Number=SeqID_15988
  Gene Ontology: Mol. function=oxidoreductase activity, acting on the CH-OH group of donors, NAD or NADP as acceptor; Cellular component =endoplasmic reticulum membrane; Biological process=isoprenoid biosynthetic process
  Homolog annotation: Hit_ID=Q9XHL5; Match level="QueryCoverage=88%, HitCoverage=58%, E-value=1e-159, Identity=83%"; Hit description=3 -hydroxy-3-methylglutaryl-coenzyme A reductase 3
  Pfam annotation: Domain name=HMG-CoA_red; Domain location=39-353; Score=701.4; E_value=7.3e-208; Accession=PF00368.10; Description =Hydroxymethylglutaryl-coenzyme A reductase
PARQAPAPAPCALLGNPAAAPEKMPEEDEEIVASVVAGEIPSYVLETRLGDCRRAAGIRREAVRRITGREIEGLPLDGFDYASILGQCCELPVGYVQLPVGIAGPLLLDGQRFYVPMATTEGCLVASTNRGCKAIAESGGANSVVLRDGMTRAPVARLPTARRAAEVRAFLEDPANFETLSMVFNRSSRFARLKSVQCAMAGRNLYMRFTCSTGDAMGMNMISKGVQNVLDFLQDDFPDMDVISISGNFCSDKKPAAVNWIEGRGKSVVCEAVIKEEVVKKVLKTNVQSLVELNTIKNLAGSAIAGALGGFNAHASNIVTAIFIATGQDPAQNVESSHCITMLEPPNCAHLNRRHGDRDVKISSIIYG

SEQ ID NO: 81963 - protein, 199 aa, Setaria italica
  Transcript Sequence Number=SeqID_15989
  Gene Ontology: Mol. function=oxidoreductase activity, acting on the CH-OH group of donors, NAD or NADP as acceptor; Cellular component =endoplasmic reticulum membrane; Biological process=isoprenoid biosynthetic process
  Homolog annotation: Hit_ID=Q9XHL5; Match level="QueryCoverage=99%, HitCoverage=35%, E-value=8e-65, Identity=64%"; Hit description=3 -hydroxy-3-methylglutaryl-coenzyme A reductase 3
  Pfam annotation: Domain name=HMG-CoA_red; Domain location=1-189; Score=236.8; E_value=5.5e-68; Accession=PF00368.10; Description =Hydroxymethylglutaryl-coenzyme A reductase
SISGNFCSDKKPAAVNWIEGRGKSVVCEAVIKEEVVKKVLKTNVQSLVELNTIKNLAGSAIAGALGGFNAHASNIVTAIFIATGQDPAQNVESSHCITMLEPINDGRDLHISVTMPSIEVGTVGGGTQLASQSACLDLLGVKGANRDSPGANARLLATVVAGGVLAGELSLLSALAAGQLVKSHMKYNRSIKDMSKAVP

SEQ ID NO: 81964 - protein, 114 aa, Setaria italica
  misc_feature (106)..(106): Xaa can be any naturally occurring amino acid
  Transcript Sequence Number=SeqID_15990
  Gene Ontology: Mol. function=oxidoreductase activity, acting on the CH-OH group of donors, NAD or NADP as acceptor; Cellular component =mitochondrial matrix; Biological process=cellular carbohydrate metabolic process
  Homolog annotation: Hit_ID=Q94JA2; Match level="QueryCoverage=100%, HitCoverage=33%, E-value=9e-57, Identity=96%"; Hit description =Malate dehydrogenase
  Pfam annotation: Domain name=Ldh_1_C; Domain location=1-114; Score =93.9; E_value=5.7e-25; Accession=PF02866.10; Description =lactatemalate dehydrogenase, alphabeta C-t
VNVPVVGGHAGITILPLFSQATPATNALSHEDIKALTKRTQDGGTEVVEAKAGKGSATLSMAYAGAVFADACLKGLNGVPDVVECSFVQSTVTELPFFASKVRLGXNGVEEVLG

SEQ ID NO: 81965 - protein, 340 aa, Setaria italica
  Transcript Sequence Number=SeqID_15991
  Gene Ontology: Mol. function=oxidoreductase activity, acting on the CH-OH group of donors, NAD or NADP as acceptor; Cellular component =mitochondrial matrix; Biological process=cellular carbohydrate metabolic process
  Homolog annotation: Hit_ID=Q94JA2; Match level="QueryCoverage=99%, HitCoverage=100%, E-value=1e-165, Identity=86%"; Hit description =Malate dehydrogenase
  Pfam annotation: Domain name=Ldh_1_C; Domain location=172-337; Score =262.8; E_value=7.8e-76; Accession=PF02866.10; Description =lactatemalate dehydrogenase, alphabeta C-t
  Pfam annotation: Domain name=Ldh_1_N; Domain location=27-170; Score =261.0; E_value=2.9e-75; Accession=PF00056.15; Description =lactatemalate dehydrogenase, NAD bin
  Pfam module annotation: Pfam domain module=Ldh_1_C::Ldh_1_N; Domain location=172-337::27-170
MRPSMMRSAAQLARRRSYSAASGQPERKVAILGAAGGIGQPLALLMKLNPLVSSLSLYDLAGTPGVAADVSHINTPALVKGFTGEDQLGEALEGSDVVIIPAGVPRKPGMTRDDLFNINAGIVKNLSAAIAKYCPNALVNMISNPVNSTVPIAAEVFKKAGTYDEKRLFGVTTLDVVRAKTFYAGKANVPVTDVNVPVVGGHAGITILPLFSQATPATNALSHEDIKALTKRTQDGGTEVVEAKAGKGSATLSMAYAGAVFADACLKGLNGVPDVVECSFVQSTVTELPFFASKVRLGKNGVEEVLGLGELSDFEKEGLENLKGELKSSIEKGIKFAHAN

SEQ ID NO: 81966 - protein, 103 aa, Setaria italica
  Transcript Sequence Number=SeqID_15992
  Gene Ontology: Mol. function=RNA methyltransferase activity; Biological process=RNA processing
  Homolog annotation: Hit_ID=B9RQ77; Match level="QueryCoverage=99%, HitCoverage=16%, E-value=5e-21, Identity=50%"; Hit description=RNA m5u methyltransferase, putative
DGALPGERLIARVRRLRRGTFAEAAKLKTLEPHHDAVEAPCPLAADCGGCKTQALAYAAQIRHKHLQVRDLLVNVGKFDPKRLESSEPDAILKPIVPCDEIFR

SEQ ID NO: 81967 - protein, 40 aa, Setaria italica
  Transcript Sequence Number=SeqID_15993
FKRTIKDEGFSSLWRGNTANVIRYFPTQVALAFLHFPYAW

SEQ ID NO: 81968 - protein, 77 aa, Setaria italica
  Transcript Sequence Number=SeqID_15994
  Homolog annotation: Hit_ID=Q9ZSJ8; Match level="QueryCoverage=94%, HitCoverage=22%, E-value=9e-16, Identity=53%"; Hit description =Putative copper-inducible 35.6 kDa protein
HLVDSDNLLRFDTQIALNGKKKSSFKRIIAFEFCPSNPSKLMVTSADSKIKILDGTIVTQNYSGLRSGSCQSLATFT

SEQ ID NO: 81969 - protein, 151 aa, Setaria italica
  misc_feature (46)..(46): Xaa can be any naturally occurring amino acid
  misc_feature (56)..(56): Xaa can be any naturally occurring amino acid
  misc_feature (69)..(69): Xaa can be any naturally occurring amino acid
  Transcript Sequence Number=SeqID_15995
  Gene Ontology: Mol. function=cyclin-dependent protein kinase activity; Cellular component=nucleus; Biological process=protein amino acid phosphorylation
  Homolog annotation: Hit_ID=B6U109; Match level="QueryCoverage=96%, HitCoverage=29%, E-value=1e-72, Identity=91%"; Hit description =Serine/threonine-protein kinase bur1
  Pfam annotation: Domain name=Pkinase; Domain location=5-151; Score= -36.9; E_value=2.7e-06; Accession=PF00069.17; Description=Protein kinase domain
  Pfam annotation: Domain name=Pkinase_Tyr; Domain location=7-151; Score=-159.3; E_value=0.0039; Accession=PF07714.9; Description =Protein tyrosine kinase
  Pfam module annotation: Pfam domain module=Pkinase::Pkinase_Tyr; Domain location=5-151::7-151
LHESRLRLEQIGEGTYGQVYMAKEMGTNEIVALKKIRMDNEREGFXTAIREIKILXHHQNVIKLKEIVXPGPERDEQGKPIDGNKYKGSIYMVFEYMDHDLTGLADRPGMRFTVPQIKCYMRQLLTGLHYCHVNQVLHRDIKGSNLLIDNE

SEQ ID NO: 81970 - protein, 73 aa, Setaria italica
  Transcript Sequence Number=SeqID_15996
  Gene Ontology: Mol. function=cyclin-dependent protein kinase activity; Cellular component=plasma membrane; Biological process =protein amino acid phosphorylation
  Homolog annotation: Hit_ID=B6U109; Match level="QueryCoverage=100%, HitCoverage=14%, E-value=1e-35, Identity=97%"; Hit description =Serine/threonine-protein kinase bur1
DHNGHLTNRVITLWYRPPELLLGSTKYGPAVDMWSVGCIFAELLNGKPILPGKNEPEQLTKIFELCGTPDDVI

SEQ ID NO: 81971 - protein, 118 aa, Setaria italica
  Transcript Sequence Number=SeqID_15997
  Gene Ontology: Mol. function=cyclin-dependent protein kinase activity; Biological process=protein amino acid phosphorylation
  Homolog annotation: Hit_ID=B6U109; Match level="QueryCoverage=100%, HitCoverage=23%, E-value=1e-61, Identity=97%"; Hit description =Serine/threonine-protein kinase bur1
MAVAAPGQLNLDEAPSWGSRSVDCFEKLEQIGEGTYGQVYMAKEMGTNEIVALKKIRMDNEREGFPITAIREIKILKKLHHQNVIKLKEIVTSPGPERDEQGKPIDGNKYKGSIYMVF

SEQ ID NO: 81972 - protein, 55 aa, Setaria italica
  Transcript Sequence Number=SeqID_15998
  Gene Ontology: Mol. function=transferase activity, transferring glycosyl groups
  Homolog annotation: Hit_ID=B6TUG3; Match level="QueryCoverage=98%, HitCoverage=31%, E-value=1e-12, Identity=69%"; Hit description =Phosphatidylinositol N-acetylglucosaminyltransferase subunit P
  Pfam annotation: Domain name=PIG-P; Domain location=1-53; Score= -51.3; E_value=0.09; Accession=PF08510.4; Description=PIG-P
GLNFSPLSPTSFGTIFDENSRERVAFSPAMEEERPIEPISDISIVQVNSVMFGDT

SEQ ID NO: 81973 - protein, 365 aa, Setaria italica
  Transcript Sequence Number=SeqID_15999
  Gene Ontology: Mol. function=protein tyrosine kinase activity; Cellular component=plasma membrane; Biological process=protein amino acid phosphorylation
  Homolog annotation: Hit_ID=Q69IN5; Match level="QueryCoverage=95%, HitCoverage=96%, E-value=1e-180, Identity=85%"; Hit description =Putative Pto kinase interactor 1
  Pfam annotation: Domain name=Pkinase; Domain location=63-341; Score =96.3; E_value=1e-25; Accession=PF00069.17; Description=Protein kinase domain
  Pfam annotation: Domain name=Pkinase_Tyr; Domain location=51-341; Score=138.5; E_value=2.1e-38; Accession=PF07714.9; Description =Protein tyrosine kinase
  Pfam module annotation: Pfam domain module=Pkinase::Pkinase_Tyr; Domain location=63-341::51-341
MRRWFCCTQFHASYREHENELPISPDEKEGNGFVANSDPNKAPPPIEVPELSFEELKEKTDNFGSKALIGEGSYGRVYYAILDSGKHVAVKKLDASTDPELDNEFLTQVSIASKLKHANFVEMLGYCVEGNQRLVAYEFATMGSLHDILHGRKGVPGAQPGPALDWMQRVKIAIDAAKGLEYLHEKVRPSIVHRDIRSSNVLLFEDYKAKIADFNLSNQSPDMAARLHSTRVLGTFGYHAPEYAMTGQLTQKSDVYSFGVVLLELLTGRKPVDHTMPRGQQSLVTWATPRLTEDTVKQCVDPRLKGEYPPKGVAKLAAVAALCVQYESEFRPSMSIVVKALSPLLQHKPHPPPAVAPDATAPSDA

SEQ ID NO: 81974 - protein, 157 aa, Setaria italica
  misc_feature (111)..(111): Xaa can be any naturally occurring amino acid
  Transcript Sequence Number=SeqID_16000
  Gene Ontology: Mol. function=RNA-directed DNA polymerase activity; Cellular component=protein complex; Biological process=RNA-dependent DNA replication
  Homolog annotation: Hit_ID=Q2QXK8; Match level="QueryCoverage=98%, HitCoverage=17%, E-value=2e-23, Identity=42%"; Hit description =Transposon protein, putative, Mutator sub-class
  Pfam annotation: Domain name=MuDR; Domain location=85-156; Score =60.0; E_value=8.8e-15; Accession=PF03108.7; Description=MuDR family transposase
TCDWSQLIIIPDLDQDGEPYVLADEDIVFEAMEFKAADESATQAAKEEAAIPAIPEDLVDDMNETSIDVLDNKDSEPVLDWDRDNPEMAVVTIYPCMVDFRLAIKQHAIVXEFELGTEKFDKSKFRGYCKANGCPWVIRARTQADRFVRVQLLTRFF

SEQ ID NO: 81975 - protein, 93 aa, Setaria italica
  misc_feature (80)..(80): Xaa can be any naturally occurring amino acid
  misc_feature (84)..(84): Xaa can be any naturally occurring amino acid
  Transcript Sequence Number=SeqID_16001
  Gene Ontology: Mol. function=RNA-directed DNA polymerase activity; Biological process=RNA-dependent DNA replication
  Homolog annotation: Hit_ID=Q2QXK8; Match level="QueryCoverage=95%, HitCoverage=9%, E-value=2e-17, Identity=41%"; Hit description =Transposon protein, putative, Mutator sub-class
VPSLVQINNLEHKCASRSRVCGTMASQAWVAERAIPLLKRKSNMGAKEVKDALEDKYRIQINYQTVWYGRQRAAEKLFGXWDDXIDWLYRFKA

SEQ ID NO: 81976 - protein, 645 aa, Setaria italica
  misc_feature (45)..(45): Xaa can be any naturally occurring amino acid
  misc_feature (175)..(175): Xaa can be any naturally occurring amino acid
  misc_feature (242)..(242): Xaa can be any naturally occurring amino acid
  misc_feature (280)..(280): Xaa can be any naturally occurring amino acid
  misc_feature (346)..(346): Xaa can be any naturally occurring amino acid
  misc_feature (495)..(495): Xaa can be any naturally occurring amino acid
  misc_feature (514)..(514): Xaa can be any naturally occurring amino acid
  Transcript Sequence Number=SeqID_16002
  Gene Ontology: Mol. function=zinc ion binding; Biological process =transposition, DNA-mediated
  Homolog annotation: Hit_ID=Q2QXK8; Match level="QueryCoverage=97%, HitCoverage=68%, E-value=1e-163, Identity=45%"; Hit description =Transposon protein, putative, Mutator sub-class
  Pfam annotation: Domain name=MULE; Domain location=198-293; Score =81.7; E_value=2.6e-21; Accession=PF10551.1; Description=MULE transposase domain
  Pfam annotation: Domain name=MuDR; Domain location=19-91; Score=80.5; E_value=6e-21; Accession=PF03108.7; Description=MuDR family transposase
  Pfam annotation: Domain name=SWIM; Domain location=448-480; Score =22.6; E_value=0.0012; Accession=PF04434.9; Description=SWIM zinc finger
  Pfam module annotation: Pfam domain module=MULE::MuDR::SWIM; Domain location=198-293::19-91::448-480
RPVSALLGSEPVLDWDRDNPEMAVVTIYPCMVDFRLAIKQHAIVXEFELGTEKFDKSKFRGYCKANGCPWVIRARTQADRLQINNLEHKCASRSRVCGTMASQAWVAERAIPLLKRKSNMGAKEVKDALEDKYRIQINYQTVWYGRQRAAEKLFGNWDDLFDWLYRFKAEVELRXHFTRFFCASKGSIDGFLYGCRPYISIDSIALNRQWNGHMPAELALNGHNWMFPLAFGFFLSETKDDXIWFMEQLRRAIGELPKLAVCTDACKGLEAAVKHVFPWXQRECFRRLMENMKKHFIGEVYAANMWPTARAYAPGKHKYFMDKVIETSPDVEKWLREHHNLLWARXKFSTDIKCDYILNNLAESWNAWIKEFKDLPLHYMVDAIREKGVIMMAKRRRISRALHGVILSAVIHQLDAGSKGLGHLKVIKGLPDQAEVTKIYKDEEVRSHVVYLKDHMCTCRELQVTGKSCPHALAVITTDRQPNYDKFMDMAYLYXSFKQVYDLRWPNITDMNQXPEVEKEFKLYPLVAQKRGVRRQRKNKKYQSCLERTSKVKRQVKCDNCDEKGHRKGSWRCEVIGTKKRKRTKKTIVKAGRKNAKEDSASEVVLTTPRTRAIAANEAEASTSMQYTKRRLDLEAPLALEHHWL

SEQ ID NO: 81977 - protein, 103 aa, Setaria italica
  Transcript Sequence Number=SeqID_16003
  Gene Ontology: Mol. function=transcription coactivator activity; Biological process=regulation of transcription, DNA-dependent
  Homolog annotation: Hit_ID=Q9AVE8; Match level="QueryCoverage=60%, HitCoverage=37%, E-value=8e-11, Identity=53%"; Hit description =Putative transcriptional coactivator
  Pfam annotation: Domain name=DEK_C; Domain location=28-83; Score =36.7; E_value=9.5e-08; Accession=PF08766.3; Description=DEK C terminal domain
TAAGFSRTPAKAPNRRRQLGGVGMDEATKKKVEETVLGILRGSDMESVTEYKVRSAAAARLGIDLSAPDRKLFVRGVVEGYLTSLSSQEAEEEQQQQGGDGEE

SEQ ID NO: 81978 - protein, 51 aa, Setaria italica
  Transcript Sequence Number=SeqID_16004
GSGVATPLDGLPSSSLAGLFVCVAPYSQQHANEVFVKMLECFSLQRSCLAD

SEQ ID NO: 81979 - protein, 58 aa, Setaria italica
  misc_feature (29)..(29): Xaa can be any naturally occurring amino acid
  Transcript Sequence Number=SeqID_16005
  Gene Ontology: Mol. function=transporter activity; Cellular component= intracellular; Biological process=transport
  Homolog annotation: Hit_ID=Q53K09; Match level="QueryCoverage=89%, HitCoverage=18%, E-value=2e-10, Identity=61%"; Hit description =CRAL/TRIO domain, putative
MFSVEAETGKMYRANFRDKEGRAVVIMIXRPTKENTTSHDRQIRFTCMLCEDIIYFIL

SEQ ID NO: 81980 - protein, 59 aa, Setaria italica
  misc_feature (30)..(30): Xaa can be any naturally occurring amino acid
  Transcript Sequence Number=SeqID_16006
  Gene Ontology: Mol. function=transporter activity; Cellular component= intracellular; Biological process=transport
  Homolog annotation: Hit_ID=Q53K09; Match level="QueryCoverage=93%, HitCoverage=19%, E-value=1e-11, Identity=60%"; Hit description =CRAL/TRIO domain, putative
PDVSVEAETGKMYRANFRDKEGRAVVIMIXRPTKENTTSHDRQIRFTCMLCEDIIYFIL

SEQ ID NO: 81981 - protein, 139 aa, Setaria italica
  Transcript Sequence Number=SeqID_16007
TKIETRMDSSSKIVLLWYCVDHSGMKQTTQTHQIHSGLIIFLKENTSQMGYFTAACCQHRDLLIRLKQIAYTNNRSSKVIHRKTILGIGMNTMNTKAKIFQCQPLNLRRKKKEMQYSNKKFCFYIVGKLSDQMLSKKFS

SEQ ID NO: 81982 - protein, 295 aa, Setaria italica
  misc_feature (60)..(60): Xaa can be any naturally occurring amino acid
  Transcript Sequence Number=SeqID_16008
  Gene Ontology: Mol. function=transporter activity; Cellular component= intracellular; Biological process=transport
  Homolog annotation: Hit_ID=B9S6H8; Match level="QueryCoverage=95%, HitCoverage=95%, E-value=1e-94, Identity=55%"; Hit description =Transporter, putative
  Pfam annotation: Domain name=CRAL_TRIO; Domain location=91-261; Score= 71.8; E_value=2.5e-18; Accession=PF00650.12; Description=CRALTRIO domain
  Pfam annotation: Domain name=CRAL_TRIO_N; Domain location=8-78; Score= 23.7; E_value=0.00025; Accession=PF03765.7; Description=CRALTRIO, N -terminus
  Pfam module annotation: Pfam domain module=CRAL_TRIO::CRAL_TRIO_N; Domain location=91-261::8-78
MFRRKHASHFNSSDTEQREAKINELKSALGPLSARCEKYCSEACLTRYLEARNWNVAKSXKMLEESLKWRAAYRPEDIRWPDVSVEAETGKMYRANFRDKEGRTVVIMRPTKENTTSHDGQIRFLVYVLENAILNLHEGQEKMVWLIDFTGWTMAHATPIKTARECTSILQNYYPERLATAFLFNPPKVFETFYKAVKYFLDPRSIEKLNFVYLKDEESMKVLYSCIDPEVLPVEFGGRKNVVYNHEDYSKLMLEDDIKTSSFWADDAKPVNHVARGTLVADVTPQSSVIAAKAS

SEQ ID NO: 81983 - protein, 78 aa, Setaria italica
  Transcript Sequence Number=SeqID_16009
PELQFARLAGASSCIHATDTLYKLPDTPPLVHNKRPISACASRPLQACLFAECVGREENEFRLFQNVQRGIIFLFTHG

SEQ ID NO: 81984 - protein, 285 aa, Setaria italica
  Transcript Sequence Number=SeqID_16010
VDENVENILRMIGEETEQIENEQDDYGNPVKKSKLSSLVKGFHEDYQYLHKHYKQLISKLENVGYNFSGSDSSDSDTEGDSSDNDVTAPKVAVKEENGLNHKPTKHNNMEAEIEKLKQSTEEQAKEISDLKQLIDKAIKDKEATSSEIANLSSEYENLKLLVETAKREEGELLNTLKSKETEVTTLSGEKQIIEEERDNLKMLIADIEKEKEDMRNQLKDTMDKCSLLSSEVEKAQQAEKEVHALLEENQKLKNDNLMLLVEHDNLKALHQNLDVECFQLERTRP

SEQ ID NO: 81985 - protein, 115 aa, Setaria italica
  Transcript Sequence Number=SeqID_16011
  Gene Ontology: Mol. function=peptidyl-prolyl cis-trans isomerase activity; Cellular component=spliceosome; Biological process=protein folding
  Homolog annotation: Hit_ID=Q6ZJ10; Match level="QueryCoverage=100%, HitCoverage=22%, E-value=1e-60, Identity=94%"; Hit description =Putative cyclophilin (70.8 kD) (Cyp-15)
  Pfam annotation: Domain name=WD40; Domain location=1-32; Score=11.8; E_value=1.6; Accession=PF00400.24; Description=WD domain, G-beta repeat
  Pfam annotation: Domain name=WD40; Domain location=38-76; Score=24.0; E_value=0.00063; Accession=PF00400.24; Description=WD domain, G-beta repeat
  Pfam module annotation: Pfam domain module=WD40::WD40; Domain location=1-32::38-76
SYMHRDVVTHVAVSPADFFITGSADGHLKFWKKKPAGIEFAKHFRSHLSPIEGLAVSLDGLLCCTISSDRSVKIYDVVNYDMMFMMRLPFVPGAVEWVHREGDVKPKLAVSDRNT

SEQ ID NO: 81986 - protein, 62 aa, Setaria italica
  Transcript Sequence Number=SeqID_16012
  Subcellular localization annotation: CTP_CleavageSite=28; ConfidenceScore=5.21e-01
MGRRLESSGSLRSSSKAKTDRSYNSFGRPMSKSSDHHKPTSGTSNKRRVYKSDQACLDQNLF

SEQ ID NO: 81987 - protein, 40 aa, Setaria italica
  Transcript Sequence Number=SeqID_16013
RDEAKDAEAAAAAGMGAGIPHPAAGMPATDPMGYYYVQPQ

SEQ ID NO: 81988 - protein, 101 aa, Setaria italica
  Transcript Sequence Number=SeqID_16014
  Homolog annotation: Hit_ID=B6TSP7; Match level="QueryCoverage=51%, HitCoverage=38%, E-value=2e-09, Identity=54%"; Hit description =Electron transporter
  Subcellular localization annotation: CTP_CleavageSite=49; ConfidenceScore=5.58e-01
ASFRRRSTRARPVAAPRAPPPPSSTPGPRPASPGALPRPGAVRELQGVLAARGPGFSLAQLLVGGVDEVRRLHESDDGGFRFVPYYASDGSRKVRFTNCCS

SEQ ID NO: 81989 - protein, 323 aa, Setaria italica
  Transcript Sequence Number=SeqID_16015
  Homolog annotation: Hit_ID=Q9SH45; Match level="QueryCoverage=32%, HitCoverage=46%, E-value=3e-46, Identity=85%"; Hit description =F2K11.3
  Subcellular localization annotation: CTP_CleavageSite=39; ConfidenceScore=5.38e-01
LPSSTSTYSKRVPPPQSRCFAYVSRVSPPRARHRIRLVRAAEQPDGAASSGSGDDATANPTNNGLPKNRRDILLEYVKNVQPEFMELFIKRAPAQVVEAMRQTVTNMIGTLPPQFFAVTVTTVAENLAQLMYSVLMTGYMFRNAQYRLELQQSLEQIALPEPKEEEDSADYAPGTQKKVTGEVIRWNKATGPERIDAVKYIELLEAEIDELSRQVARKSSQGSNELLEYLKSLEPQNLKELTSTAGEDVVFAMNAFIKRLLAVSDPEKMKTTVSETSANQLANLLFWLMMVGYSMRNIEVRFDMERVLGAPPKVAELPPGETI

SEQ ID NO: 81990 - protein, 65 aa, Setaria italica
  Transcript Sequence Number=SeqID_16016
  Gene Ontology: Mol. function=hydrolase activity, acting on acid anhydrides, catalyzing transmembrane movement of substances; Cellular component=integral to membrane; Biological process=calcium ion transport
  Homolog annotation: Hit_ID=Q6ETP2; Match level="QueryCoverage=96%, HitCoverage=6%, E-value=2e-16, Identity=75%"; Hit description =Putative calcium-transporting ATPase
MAGGQQPEASPGRYQRRRDEIDDDCADVLGVDVRGPDADPFDIPAKRAPVERLRRWRQAALVLNA

SEQ ID NO: 81991 - protein, 51 aa, Setaria italica
  Transcript Sequence Number=SeqID_16017
  Gene Ontology: Cellular component=membrane
MVPAAAPPDAGGGGDPEAWYGSIQYLINISAVGAASCVLLFLLVKLRFDHR

SEQ ID NO: 81992 - protein, 616 aa, Setaria italica
  Transcript Sequence Number=SeqID_16018
  Gene Ontology: Mol. function=aminoacyl-tRNA ligase activity; Cellular component=cytoplasm; Biological process=tRNA aminoacylation for protein translation
  Homolog annotation: Hit_ID=B6SHH4; Match level="QueryCoverage=100%, HitCoverage=100%, E-value=0.0, Identity=87%"; Hit description=Lysyl -tRNA synthetase
  Pfam annotation: Domain name=tRNA-synt_2; Domain location=263-614; Score=427.3; E_value=2.5e-125; Accession=PF00152.12; Description =tRNA synthetases class II (D, K and N)
  Pfam annotation: Domain name=tRNA_anti; Domain location=146-227; Score=51.3; E_value=3.7e-12; Accession=PF01336.17; Description=OB -fold nucleic acid binding domain
  Pfam module annotation: Pfam domain module=tRNA-synt_2::tRNA_anti; Domain location=263-614::146-227
MADGAGSASGLEEKLAGLSTGGGGGDKQNPPPAGEGGEEPQLSKNAKKREEKRKKLEEERRLKEEEKKNKAAAAAAACGTTQRASAADDDDMDPTQYYENRLKTLDSLKTAGVNPYPHKFPVGISVAEYIEKYKSLSDGEKLDVTECLAGRIMNKRTSSSKLFFYDLYGGGMKVQVMADARTSELDEAEFTKYHSGVKRGDIVGICGYPGKSKRGELSVFPQKFVVLSPCLHMMPRQKGEGSAAPASWTPGMGRNIENYVLRDQETRYRQRYLDLMVNHEVRHIFKTRSKVVSFIRKFLDDREFLEVETPMMNMIAGGAAARPFVTHHNELNMRLFMRIAPELYLKELVVGGLDRVYEIGKQFRNEGIDLTHNPEFTTCEFYMAYADYNDLMELTETMLSGMVKELTGGYKIKYHANGVTNPPIEIDFTPPFRRIDMIKDLEAMANLDIPKDLSSDEANRYLIEACAKYDVKCPPPQTTSRLLDKLVGHFLEETCVNPTFIINHPEIMSPLAKWHRSRPGLTERFELFVNKHEVCNAYTELNDPVVQRQRFEEQLKDRQSGDDEAMALDETFCTALEYGLPPTGGWGLGIDRLTMLLTDSQNIKEVLLFPAMKPQE

SEQ ID NO: 81993 - protein, 70 aa, Setaria italica
  Transcript Sequence Number=SeqID_16019
  Gene Ontology: Mol. function=phosphoenolpyruvate carboxylase activity; Cellular component=cytoplasm; Biological process=carbon utilization by fixation of carbon dioxide
  Homolog annotation: Hit_ID=P29195; Match level="QueryCoverage=45%, HitCoverage=3%, E-value=2e-11, Identity=96%"; Hit description =Phosphoenolpyruvate carboxylase 1
WRALMDEMAIVATKEYRSIVFQEPRFVEYFRSVGSPVSSILYLNKYTLYTCTRCLYFVSKLLKETPSQNM

SEQ ID NO: 81994 - protein, 89 aa, Setaria italica
  Transcript Sequence Number=SeqID_16020
  Gene Ontology: Mol. function=phosphoenolpyruvate carboxylase activity; Cellular component=cytoplasm; Biological process=carbon utilization by fixation of carbon dioxide
  Homolog annotation: Hit_ID=Q8L4Z4; Match level="QueryCoverage=89%, HitCoverage=60%, E-value=4e-38, Identity=96%"; Hit description =Putative phosphoenolpyruvate carboxylase (Fragment)
IIHSCDSWVSLGEQLRKNYEETKELLLQVAGHKDVLEGDPYLKQRLRLRESYITTLNVCQAYTLKRIRDPGFQVSPQPALSKEFTDESQ

SEQ ID NO: 81995 - protein, 233 aa, Setaria italica
  misc_feature (29)..(29): Xaa can be any naturally occurring amino acid
  Transcript Sequence Number=SeqID_16021
  Gene Ontology: Mol. function=phosphoenolpyruvate carboxylase activity; Cellular component=cytoplasm; Biological process=carbon utilization by fixation of carbon dioxide
  Homolog annotation: Hit_ID=P29195; Match level="QueryCoverage=100%, HitCoverage=24%, E-value=1e-130, Identity=95%"; Hit description =Phosphoenolpyruvate carboxylase 1
LVEYFRSATPETEYGRMNIGSRPSKRKPXGGIESLRAIPWIFAWTQTRFHLPVWLGFGAAFKHLMQKDIRNIHTLKEMYNEWPFFRVTLDLLEMVFAKGDPGIAAVYDKLLVAEDLQSFGEQLRKNYEETKELLLQVAGHKDVLEGDPYLKQRLRLRESYITTLNVCQAYTLKRIRDPGFQVSPQPALSKEFTDESQPAQLVQLNPESEYAPGLEDTLILTMKGIAAGMQNTG

SEQ ID NO: 81996 - protein, 207 aa, Setaria italica
  Transcript Sequence Number=SeqID_16022
  Gene Ontology: Mol. function=nucleic acid binding; Cellular component= ribonucleoprotein complex; Biological process=rRNA processing
  Homolog annotation: Hit_ID=Q3MKM6; Match level="QueryCoverage=96%, HitCoverage=39%, E-value=3e-63, Identity=56%"; Hit description=U3 -55K-like protein 2
  Pfam annotation: Domain name=WD40; Domain location=101-138; Score =8.6; E_value=3.8; Accession=PF00400.24; Description=WD domain, G -beta repeat
  Pfam annotation: Domain name=WD40; Domain location=34-70; Score=16.3; E_value=0.13; Accession=PF00400.24; Description=WD domain, G-beta repeat
  Pfam module annotation: Pfam domain module=WD40::WD40; Domain location=101-138::34-70
HQNEILTMDAFSKDRILTVARDRTMHLWKIPEESQLVFRAPAAASLECCSFIDDKEFLSGSDDGSIELWSIMRKKPTFIVRNAHPSLDSDDQELPKENGIHKPENVSMAQSWVSAVTARKGSDLAASGAGNGLVRLWAIEPDSKGIRPLFKFKLDGFVNSLTIAKSGRFIVAGVGQEPRLGRWGRVRSAQNGVAIHPIRLKEEKDDL

SEQ ID NO: 81997 - protein, 141 aa, Setaria italica
  Transcript Sequence Number=SeqID_16023
LLLPAFRLPPPQEPYHGYPPPPQPGWDDYHGGGYAPHQGGGHWGRHGYGGHAGWLAAGAGAAAAAGAGVYGAYHRFRKHHGHGGDQYGGGYGHGYGHHAGKFTHEHQGKFKHYARHDGKFNNKHAAQGKFSAKSPVTVLDT

SEQ ID NO: 81998 - protein, 81 aa, Setaria italica
  Transcript Sequence Number=SeqID_16024
  Gene Ontology: Mol. function=metal ion binding
PTCPFCRGGIAALVVATRAPAGGDDEEGSRLESPRHRRSRRAMNLSGDAGSTSSLMGSIASSIGKMGRRRTDSSEQVDDKP

SEQ ID NO: 81999 - protein, 134 aa, Setaria italica
  Transcript Sequence Number=SeqID_16025
  Homolog annotation: Hit_ID=B6TEW7; Match level="QueryCoverage=72%, HitCoverage=25%, E-value=3e-23, Identity=52%"; Hit description =RAFTIN1a protein
  Subcellular localization annotation: CTP_CleavageSite=52; ConfidenceScore=5.37e-01
HGRRGCLTLLPVPWRASLPFSSPPPLPPLLAAGRLSHAAPSTAEVFWRAVLPGSAVPDAVLRFLRPDSFVSKAEVEDADRSNSPFDYQNYERSSAPYGYDYKAPDKGAAGGGGARDDTPFGYDYKAPSKAAADG

SEQ ID NO: 82000 - protein, 61 aa, Setaria italica
  Transcript Sequence Number=SeqID_16026
  Gene Ontology: Mol. function=metal ion binding
  Homolog annotation: Hit_ID=B9SE23; Match level="QueryCoverage=93%, HitCoverage=11%, E-value=6e-19, Identity=80%"; Hit description=Zinc ion binding protein, putative
CHCRLLTGSILAHELMHGWLRLKGYRNLNAEVEEGICQVMSYLWLESEILPASSRHAPSSS

SEQ ID NO: 82001 - protein, 463 aa, Setaria italica
  Transcript Sequence Number=SeqID_16027
  Gene Ontology: Mol. function=metal ion binding
  Homolog annotation: Hit_ID=B9SE23; Match level="QueryCoverage=99%, HitCoverage=90%, E-value=1e-159, Identity=64%"; Hit description=Zinc ion binding protein, putative
  Pfam annotation: Domain name=LIM; Domain location=111-167; Score =34.8; E_value=3.4e-07; Accession=PF00412.14; Description=LIM domain
  Pfam annotation: Domain name=UIM; Domain location=44-61; Score=8.4; E_ value=3.4; Accession=PF02809.12; Description=Ubiquitin interaction motif
  Pfam annotation: Domain name=UIM; Domain location=73-90; Score=13.2; E_value=0.77; Accession=PF02809.12; Description=Ubiquitin interaction motif
  Pfam module annotation: Pfam domain module=LIM::UIM::UIM; Domain location=111-167::44-61::73-90
MKWLCTFLKGQKPGEPNRRRPRVTAGEEDTLWQPPVRPKNDPPRNDNEELDRAIAESLEEDVKPPKERNHKGDSNDEDLARAIQDSLNMNPYTPYNPYAPSQAQPRGHRVCGRCKHEIGHGHYLSCMGIYWHPQCFRCCSCGHPIRETEFTLLGTDPYHKLCYKELHHPKCDVCLQFIPTNRSGLIEYRAHPFWGQKYCPLHEQDRTPRCCSCEKMEPRNTKYMSLGDGRSLCMECLGSAVMDTGECQPLYHSIRDYYEGMNMKLDQQIPMLLVERQALNEAMEGESRGPHHMPETRGLCLSEEQTVSSILRRPRIGGNRLLDMRTQPQKLTRRCEVTAILVLYGLPRLLTGSILAHELMHGWLRLKGYRNLNAEVEEGICQVMSYLWLESEILPASSRHAPSSSYASSSSSSYPPTSSKKGGISHTEKKLGEFFMHQIANDTSTAYGDGFRTAYAAVQTKLV

SEQ ID NO: 82002 - protein, 65 aa, Setaria italica
  Transcript Sequence Number=SeqID_16028
  Subcellular localization annotation: CTP_CleavageSite=35; ConfidenceScore=5.01e-01
LTKKKKNLGSNSNNKVVGEESALGGMRFLQNARKRASGNASSGTCKWPARPPWRRIEQTGGKSPA

SEQ ID NO: 82003 - protein, 84 aa, Setaria italica
  misc_feature (34)..(34): Xaa can be any naturally occurring amino acid
  misc_feature (64)..(64): Xaa can be any naturally occurring amino acid
  Transcript Sequence Number=SeqID_16029
  Gene Ontology: Mol. function=nucleic acid binding
  Homolog annotation: Hit_ID=Q10S18; Match level="QueryCoverage=92%, HitCoverage=10%, E-value=1e-29, Identity=79%"; Hit description=RNA recognition motif family protein, expressed
  Pfam annotation: Domain name=RRM_1; Domain location=4-72; Score=17.7; E_value=0.0045; Accession=PF00076.14; Description=RNA recognition motif. (a.k.a. RRM, RBD, o
ILQIFIAGIAGMISSEMLMEIVSAFGPLAAYRFXFNDELGGPCAFLEYADRSITSKACAGLNGXKLGGCVLTAVHVFRSSCGGC

SEQ ID NO: 82004 - protein, 57 aa, Setaria italica
  Transcript Sequence Number=SeqID_16030
PIPCVPSYPLLRVSAAGHPDPLAKVLEPLREGRGGLLPAPESTEQWCRAAEVEVASG

SEQ ID NO: 82005 - protein, 87 aa, Setaria italica
  misc_feature (64)..(64): Xaa can be any naturally occurring amino acid
  Transcript Sequence Number=SeqID_16031
  Gene Ontology: Mol. function=nucleic acid binding
  Homolog annotation: Hit_ID=Q10S18; Match level="QueryCoverage=91%, HitCoverage=11%, E-value=3e-31, Identity=80%"; Hit description=RNA recognition motif family protein, expressed
MVQVNNVAPKKPAEETGLISDVVADSPYKIFIAGIAGMISSEMLMEIVSAFGPLAAYRFLFNDXLGGPCAFLEYADRSITSTKLHPI

SEQ ID NO: 82006 - protein, 58 aa, Setaria italica
  Transcript Sequence Number=SeqID_16032
  Gene Ontology: Mol. function=transporter activity; Cellular component= integral to membrane; Biological process=transport
  Homolog annotation: Hit_ID=B6TKB3; Match level="QueryCoverage=74%, HitCoverage=10%, E-value=3e-16, Identity=100%"; Hit description =Triose phosphate/phosphate translocator, non-green plastid ,chloroplast
IRIASKEKHLYTKINIVTSVLFFRTPVSPINSLGTAIALAGVFLYSQLKRLKPKPKTA

SEQ ID NO: 82007 - protein, 167 aa, Setaria italica
  Transcript Sequence Number=SeqID_16033
  Gene Ontology: Mol. function=nucleic acid binding
  Homolog annotation: Hit_ID=Q10S20; Match level="QueryCoverage=75%, HitCoverage=14%, E-value=8e-28, Identity=52%"; Hit description=RNA recognition motif family protein, expressed
SNAAHCESEAPVADGHTDIDGTQTRAALPISQHSETDHTEAAADENKHTAVEATTTAKDDDAVEKRHQDPRTSEICSPAEPGDEMEKPGRDCEQDADDVTEDHAEKVPAVETSDTAFVFEPGSVLVEFMRKEAACMAAHSLHGRRFGSRTVYAGYAPYDLYLQKYPR

SEQ ID NO: 82008 - protein, 576 aa, Setaria italica
  misc_feature (85)..(85): Xaa can be any naturally occurring amino acid
  misc_feature (249)..(249): Xaa can be any naturally occurring amino acid
  Transcript Sequence Number=SeqID_16034
  Gene Ontology: Mol. function=nucleic acid binding; Cellular component= snRNP U2; Biological process=regulation of alternative nuclear mRNA splicing, via spliceosome
  Homolog annotation: Hit_ID=Q10S18; Match level="QueryCoverage=96%, HitCoverage=78%, E-value=1e-159, Identity=56%"; Hit description=RNA recognition motif family protein, expressed
  Pfam annotation: Domain name=RRM_1; Domain location=470-545; Score =10.4; E_value=0.021; Accession=PF00076.14; Description=RNA recognition motif. (a.k.a. RRM, RBD, o
MSRKIHGEHDSQRITSEGTAARTRPLSIQDIMLRREKKAASEAKKTKEELQENDKGTSNHLEQGRGYKLRKDLKDMPVEGSKRRXRDTSREESKKENLRVIPREGSRKDDTRYTPKEVSKKDNSKDRPKGCYKMDGLKDTPKASEKEDLRDALKRGSMKERPSIGDEYRSVGKDKGIGSSQKRTTSMSSRADESKDRNLGEIRARNGDVTRSEYQKGPGKRGNDETVDNDRIKDKSEKLRNETKRKNRXFDNEKSSEVDRPMSKKQDSAWFQGSKHSDRNDGRNEYAKPYHGEPRLKRRRSRSRDRDRERHGRSISPPPREQRHNYHGHDLGNYRPYYSMEKSRRKYAEVDKQRSSGSGGYSGGSHQRYESRLGGYSPRKRKTAPQAEQATTKTPPPVIQSPEKKSATWDQPPVKASQFKFPTTLQSTVGQMTPSTPKDPSTKVETILAGNSLSADSVQLTQATRPLRRLHIENLPDSATEDRLIDCLNDFLLSTGVKYTQRSKPCLSCTINKEKRQAFAEFLTPEDATAALSFDGRSLNGSALRIRRPKEYVEMVGILIGCVIIHVQQHREAKEL

SEQ ID NO: 82009 - protein, 52 aa, Setaria italica
  Transcript Sequence Number=SeqID_16035
MVLCPLLSINKKYRVPNVTTDNDPDTMPHPAITALEFTFGTLYVPSSKAGLL

SEQ ID NO: 82010 - protein, 51 aa, Setaria italica
  Transcript Sequence Number=SeqID_16036
  Gene Ontology: Mol. function=translation initiation factor activity; Biological process=translational initiation
  Homolog annotation: Hit_ID=Q9AXQ5; Match level="QueryCoverage=100%, HitCoverage=31%, E-value=1e-21, Identity=96%"; Hit description =Eukaryotic translation initiation factor 5A-2
  Pfam annotation: Domain name=eIF-5a; Domain location=22-51; Score= -1.1; E_value=0.033; Accession=PF01287.12; Description=Eukaryotic initiation factor 5A hypusine, DNA-binding OB fold
DIFNGKKLEDIVPSSHNCDVPHVNRTEYQLIDISEDGYVSLLTESGNTKDD

SEQ ID NO: 82011 - protein, 110 aa, Setaria italica
  misc_feature (48)..(48): Xaa can be any naturally occurring amino acid
  misc_feature (96)..(96): Xaa can be any naturally occurring amino acid
  misc_feature (101)..(101): Xaa can be any naturally occurring amino acid
  Transcript Sequence Number=SeqID_16037
  Gene Ontology: Mol. function=translation initiation factor activity; Biological process=translational initiation
  Homolog annotation: Hit_ID=Q9AXQ5; Match level="QueryCoverage=100%, HitCoverage=68%, E-value=3e-51, Identity=89%"; Hit description =Eukaryotic translation initiation factor 5A-2
  Pfam annotation: Domain name=KOW; Domain location=21-55; Score=21.4; E_value=0.0039; Accession=PF00467.21; Description=KOW motif
DSKADAGASKTYPQKAGTVRKNGYLVIKNRPCKVVEVSTSKTGKHGHXKCHFVASDIFNGKKLEDIVPSSHNCDVPHVNCTEYQLIDISEDGFVSXLLTEXGNTKDDLRL

SEQ ID NO: 82012 - protein, 105 aa, Setaria italica
  misc_feature (15)..(15): Xaa can be any naturally occurring amino acid
  misc_feature (76)..(76): Xaa can be any naturally occurring amino acid
  misc_feature (92)..(92): Xaa can be any naturally occurring amino acid
  Transcript Sequence Number=SeqID_16038
  Gene Ontology: Mol. function=translation initiation factor activity; Cellular component=nucleolus; Biological process=translational initiation
  Homolog annotation: Hit_ID=B9RCY4; Match level="QueryCoverage=99%, HitCoverage=19%, E-value=3e-41, Identity=83%"; Hit description =Initiation factor 5a, putative
  Pfam annotation: Domain name=eIF-5a; Domain location=29-100; Score =113.4; E_value=7.6e-31; Accession=PF01287.12; Description=Eukaryotic initiation factor 5A hypusine, DNA-binding OB fold
SHFVAIDIFNGKKLXEDIVPSSHNCDVPHVNRTEYQLIDISEDGFVSLLTSDGNTKDDLRLPTDETLLGQIKEGFXMGGKDLVVTVQSAMGXEEQICALKDVGPK

SEQ ID NO: 82013 - protein, 51 aa, Setaria italica
  Transcript Sequence Number=SeqID_16039
  Gene Ontology: Mol. function=translation initiation factor activity; Biological process=translational initiation
  Homolog annotation: Hit_ID=B9RCY4; Match level="QueryCoverage=94%, HitCoverage=9%, E-value=4e-16, Identity=81%"; Hit description =Initiation factor 5a, putative
  Pfam annotation: Domain name=eIF-5a; Domain location=1-46; Score =29.3; E_value=1.6e-05; Accession=PF01287.12; Description=Eukaryotic initiation factor 5A hypusine, DNA-binding OB fold
TAHQDDLRLPTDETLLGQIKEGFDGGKDLVVTVQSAMGEEQICALKDVGPK

SEQ ID NO: 82014 - protein, 185 aa, Setaria italica
  misc_feature (58)..(58): Xaa can be any naturally occurring amino acid
  misc_feature (174)..(174): Xaa can be any naturally occurring amino acid
  Transcript Sequence Number=SeqID_16040
  Gene Ontology: Mol. function=translation initiation factor activity; Cellular component=nucleolus; Biological process=translational initiation
  Homolog annotation: Hit_ID=B9RCY4; Match level="QueryCoverage=87%, HitCoverage=31%, E-value=1e-76, Identity=88%"; Hit description =Initiation factor 5a, putative
  Pfam annotation: Domain name=KOW; Domain location=53-88; Score=17.8; E_value=0.044; Accession=PF00467.21; Description=KOW motif
  Pfam annotation: Domain name=eIF-5a; Domain location=110-180; Score =124.9; E_value=2.7e-34; Accession=PF01287.12; Description=Eukaryotic initiation factor 5A hypusine, DNA-binding OB fold
  Pfam module annotation: Pfam domain module=KOW::eIF-5a; Domain location=53-88::110-180
SSAPPHLSPAPPPPRDPSKPGVAMSDSEEHHFESKADAGASKTYPQQAGTIRKNGFIXVIKGRPCKVVEVSTSKTGKHGHAKCHFVAIDIFNGKKLEDIVPSSHNCDVPHVNRTEYQLIDISEDGFVSLLTSDGNTKDDLRLPTDETLLGQIKEGFDGGKDLVVTVQSAMGEEXQICALKDVGPK

SEQ ID NO: 82015 - protein, 163 aa, Setaria italica
  misc_feature (133)..(133): Xaa can be any naturally occurring amino acid
  Transcript Sequence Number=SeqID_16041
  Gene Ontology: Mol. function=translation initiation factor activity; Biological process=translational initiation
  Homolog annotation: Hit_ID=B4FDE1; Match level="QueryCoverage=98%, HitCoverage=98%, E-value=8e-77, Identity=86%"; Hit description =Eukaryotic translation initiation factor 5A-1/2
  Pfam annotation: Domain name=KOW; Domain location=30-64; Score=23.8; E_value=0.0007; Accession=PF00467.21; Description=KOW motif
  Pfam annotation: Domain name=eIF-5a; Domain location=86-156; Score =121.2; E_value=3.3e-33; Accession=PF01287.12; Description=Eukaryotic initiation factor 5A hypusine, DNA-binding OB fold
  Pfam module annotation: Pfam domain module=KOW::eIF-5a; Domain location=30-64::86-156
MSDSEEHHFESKADAGASKTYPQQAGTIRKNGFIVIKNRPCKVVEVSTSKTGKHGHAKCHFVGIDIFNGKKLEDIVPSSHNCDVPHVNRTEYQLIDISEDGYVSLLTESGNTKDDLKLPTDEALQAQIRSGYXDEGKDIILTVQSAMGEEQICSLKEIGGGKN

SEQ ID NO: 82016 - protein, 130 aa, Setaria italica
  misc_feature (3)..(3): Xaa can be any naturally occurring amino acid
  misc_feature (122)..(122): Xaa can be any naturally occurring amino acid
  Transcript Sequence Number=SeqID_16042
  Homolog annotation: Hit_ID=Q2R047; Match level="QueryCoverage=100%, HitCoverage=13%, E-value=2e-43, Identity=63%"; Hit description=Salt -inducible protein, putative
  Pfam annotation: Domain name=PPR; Domain location=24-58; Score=15.9; E_value=0.12; Accession=PF01535.12; Description=PPR repeat
  Pfam annotation: Domain name=PPR; Domain location=59-93; Score=7.3; E_ value=1.2; Accession=PF01535.12; Description=PPR repeat
  Pfam annotation: Domain name=PPR; Domain location=94-128; Score=25.9; E_value=0.00017; Accession=PF01535.12; Description=PPR repeat
  Pfam module annotation: Pfam domain module=PPR::PPR::PPR; Domain location=24-58::59-93::94-128
SGXFMEIFDLLNLMMAEGLQPTSLIYGVAIDSLCKRGKLSEAEKLFYTVEEKGIDNIEALHSAMVCGYLNSGWSNYAYMLFLRVTQQGNLVDHFACSKLIDDLCRDENVKEASDVLSMMLKXNVVPDVVS

SEQ ID NO: 82017 - protein, 54 aa, Setaria italica
  Transcript Sequence Number=SeqID_16043
HLQRHSQEPNPIPNKRKPWTGYYRGRRHAHLHRHRLLRLHPLEQIKKRQISPGS

SEQ ID NO: 82018 - protein, 169 aa, Setaria italica
  Transcript Sequence Number=SeqID_16044
  Gene Ontology: Mol. function=protein serine/threonine kinase activity; Cellular component=integral to membrane; Biological process=protein amino acid phosphorylation
  Homolog annotation: Hit_ID=B9ST85; Match level="QueryCoverage=94%, HitCoverage=14%, E-value=1e-79, Identity=88%"; Hit description =Serine/threonine-protein kinase bri1, putative
  Pfam annotation: Domain name=Pkinase; Domain location=1-169; Score= -24.0; E_value=4.6e-07; Accession=PF00069.17; Description=Protein kinase domain
  Pfam annotation: Domain name=Pkinase_Tyr; Domain location=1-167; Score=-88.9; E_value=8.2e-08; Accession=PF07714.9; Description =Protein tyrosine kinase
  Pfam module annotation: Pfam domain module=Pkinase::Pkinase_Tyr; Domain location=1-169::1-167
VPLLGYCKIGDERLLVYEYMKHGSLDVVLHDKAKASVKFDWAARKKIAIGSARGLAFLHHSCIPHIIHRDMKSSNVLLDSNLEARVSDFGMARLMNALDTHLSVSTLAGTPGYVPPEYYQSFRCTTKGDVYSYGVVLLELLSGKKPIDPNEFGDNNLVGSKISPETRKG

SEQ ID NO: 82019 - protein, 153 aa, Setaria italica
  misc_feature (81)..(81): Xaa can be any naturally occurring amino acid
  misc_feature (144)..(144): Xaa can be any naturally occurring amino acid
  misc_feature (150)..(150): Xaa can be any naturally occurring amino acid
  Transcript Sequence Number=SeqID_16045
  Gene Ontology: Mol. function=protein serine/threonine kinase activity; Cellular component=integral to membrane; Biological process=protein amino acid phosphorylation
  Homolog annotation: Hit_ID=B9ST85; Match level="QueryCoverage=66%, HitCoverage=9%, E-value=3e-38, Identity=74%"; Hit description =Serine/threonine-protein kinase bri1, putative
RGQAPCRLRTRPRPGRAAGARDGERNRRRRGQGEVAAAGGFRCTTKGDAYSYGVVLLELLSGKKPIDPNEFGDNNLVGWVXVKQMVKENRSSEIFDPTLTNTKSGEAELYQYLKIACECLDDRPNRRPTMIQVMAMFKELQLDXSDSDFXDGF

SEQ ID NO: 82020 - protein, 421 aa, Setaria italica
  misc_feature (15)..(15): Xaa can be any naturally occurring amino acid
  misc_feature (146)..(146): Xaa can be any naturally occurring amino acid
  Transcript Sequence Number=SeqID_16046
  Homolog annotation: Hit_ID=Q67X84; Match level="QueryCoverage=99%, HitCoverage=76%, E-value=0.0, Identity=85%"; Hit description =Putative auxin-independent growth promoter
  Pfam annotation: Domain name=DUF246; Domain location=15-359; Score =679.9; E_value=2.2e-201; Accession=PF03138.6; Description=Plant protein family
VAGVQKPVASRGYLXVHTNGGLNQMRAGISDMVAVARILNATLIIPELDKKSFWHDRSNFSDVFDEEHFINSLANDVKVLKKLPKELVKAPKSVRYFKSWSGVDYYQEEISPLWDHRQVIRAAKSDSRLANNYLPTDIQKLRCRAXFQALRFAPPIEALGKLLVERMRSFGPYIALHLRYEKDMLAFSGCTYGLSQTESEELAMIRENTTYWKVKDIDPLEQRSHGYCPLTPKEVGMFLSALGYPSSTPVYIAAGEIYGGESHMVDLQSRFPILMNKEKLASAEELRPFSQYAAQMAALDYIVSVESHVFVPSYSGNMARAVAGHRRFLGHRKTISPDRKALVRLFDKVDRGLLKEGKKLSERILDIHRKRQGSPRKRKGPVSGTKGKDRFRSEEAFYENPLPDCLCQPGSPDSDDSLVSI

SEQ ID NO: 82021 - protein, 392 aa, Setaria italica
  misc_feature (7)..(7): Xaa can be any naturally occurring amino acid
  Transcript Sequence Number=SeqID_16047
  Gene Ontology: Mol. function=hydrolase activity
  Homolog annotation: Hit_ID=B6TXL2; Match level="QueryCoverage=87%, HitCoverage=86%, E-value=0.0, Identity=93%"; Hit description =Catalytic/ hydrolase
  Pfam annotation: Domain name=Abhydrolase_1; Domain location=154-375; Score=37.0; E_value=7.4e-08; Accession=PF00561.12; Description =alphabeta hydrolase fold
  Pfam annotation: Domain name=Abhydrolase_3; Domain location=127-362; Score=-90.6; E_value=0.093; Accession=PF07859.5; Description =alphabeta hydrolase fold
  Pfam module annotation: Pfam domain module=Abhydrolase_1::Abhydrolase_ 3; Domain location=154-375::127-362
  Subcellular localization annotation: CTP_CleavageSite=32; ConfidenceScore=5.61e-01
RAFARVXLPALPPPPFPSSRGSRPTTRGAGAAAMSSSSSAPAQAPRKWEGLVDEALEREVLEVCLDQAPERRRVREAFKDVQLNIDHCLFKGQYNGIGTKETYERNSRGLEIFSKCWFPENQRMKAIVCFCHGYGDTCTFFLDGVARKIASAGYGVFALDYPGFGLSEGLHGYIPSFDTLVDDVAEHFAKVKGNPEHRGLPSFLFGQSMGGAVALKVHFKQPNEWNGAILVAPMCKIADDVVPPWPVRQVLIFMAKLLPKEKLVPQKDLAELAFKEKKKQEQCSFNVIAYKDKPRLRTALEMLNTTQEIERRLEEVSLPMIILHGEADLVTDPDVSKALYEKAKSQDKKLCLYKGAYHAILEGEPDNTIFQVLDDIISWLDQHSTKEQGSSP

SEQ ID NO: 82022 - protein, 90 aa, Setaria italica
  Transcript Sequence Number=SeqID_16048
  Gene Ontology: Mol. function=ATPase activity, coupled to transmembrane movement of substances; Cellular component=integral to membrane; Biological process=transport
  Homolog annotation: Hit_ID=Q8GU76; Match level="QueryCoverage=75%, HitCoverage=5%, E-value=3e-16, Identity=60%"; Hit description=MDR -like ABC transporter
MAEDAGKAEAGSCSGGGGCEAVKKRPEQSVAFHELFGFADPLDWLLMAAGSAGAVVHGAAMPVFFLLFGELVNGFGKNQHNLRRMTDEVS

SEQ ID NO: 82023 - protein, 80 aa, Setaria italica
  Transcript Sequence Number=SeqID_16049
CAHNKTVKFSGTRKKQPMQAFLFILVYELTSLFSKYIYGMIKLTDHKEIQTVECKVPPPDNYILYKCSVFPCSCEKIAGH

SEQ ID NO: 82024 - protein, 49 aa, Setaria italica
  misc_feature (23)..(23): Xaa can be any naturally occurring amino acid
  Transcript Sequence Number=SeqID_16050
  Homolog annotation: Hit_ID=Q7XPK1; Match level="QueryCoverage=95%, HitCoverage=15%, E-value=5e-13, Identity=80%"; Hit description=Zinc finger CCCH domain-containing protein 31
MEGAAAARKRSRPETANGVASGXKRATETESFQTGQSSKSKPCTKFFRL

SEQ ID NO: 82025 - protein, 302 aa, Setaria italica
  Transcript Sequence Number=SeqID_16051
  Gene Ontology: Mol. function=nucleic acid binding
  Homolog annotation: Hit_ID=Q7XPK1; Match level="QueryCoverage=100%, HitCoverage=100%, E-value=1e-114, Identity=70%"; Hit description =Zinc finger CCCH domain-containing protein 31
  Pfam annotation: Domain name=KH_1; Domain location=174-236; Score =50.0; E_value=9.5e-12; Accession=PF00013.21; Description=KH domain
  Pfam annotation: Domain name=zf-CCCH; Domain location=104-130; Score =27.4; E_value=5.7e-05; Accession=PF00642.16; Description=Zinc finger C-x8-C-x5-C-x3-H type (and similar)
  Pfam annotation: Domain name=zf-CCCH; Domain location=269-294; Score =44.6; E_value=3.9e-10; Accession=PF00642.16; Description=Zinc finger C-x8-C-x5-C-x3-H type (and similar)
  Pfam annotation: Domain name=zf-CCCH; Domain location=38-64; Score =22.1; E_value=0.0018; Accession=PF00642.16; Description=Zinc finger C-x8-C-x5-C-x3-H type (and similar)
  Pfam module annotation: Pfam domain module=KH_1::zf-CCCH::zf-CCCH::zf- CCCH; Domain location=174-236::104-130::269-294::38-64
MEGAAAARKRSRPETANGVAAGGKRSKETESFQTGQSSKSKPCTKFFSTIGCPFGEGCHFLHFVPGGYPAVAKMLNLGSPAVSAPARASVDHAAVANSHPASTGKTRMCTKYNTVEGCKFGEKCHFAHGERELGRPAYMSHEGPPMGGRYGGRPEPPPPVAMGPPAGNFGASATAKISVDASLAGGIIGKGGVNTKQICRVAGVKLSIRDHESDPNLKNIELEGNFDQIKQASNMVSDLIASISASMPPKAPPAPAGGRGGAPGGRSNYKTKLCENFVKGTCTFGDRCHFAHGENEQRRGAA

SEQ ID NO: 82026 - protein, 90 aa, Setaria italica
  Transcript Sequence Number=SeqID_16052
FFFFFLLIGKPLRHKKHCSRKHGQIIYKLSAELSVGLVNNLCRIVILVNNQCLTTKNEKFDYSRIHVCALIGRRNKGNKSASTSVIPHFQ

SEQ ID NO: 82027 - protein, 501 aa, Setaria italica
  Transcript Sequence Number=SeqID_16053
  Gene Ontology: Mol. function=transferase activity, transferring glycosyl groups
  Homolog annotation: Hit_ID=B6U4S0; Match level="QueryCoverage=95%, HitCoverage=76%, E-value=0.0, Identity=71%"; Hit description =Transferase, transferring glycosyl groups
  Pfam annotation: Domain name=Glyco_transf_8; Domain location=172-475; Score=144.4; E_value=3.5e-40; Accession=PF01501.12; Description =Glycosyl transferase family 8
QTSTRDTREIRKDVQERQKGAKADDVERAKACQLEFGSYCLWSIEHKEVMKDSIVKRLKDQLFVARSYYPSIAKLQGQEALTQEMKQNIQDHERVLSVSTVDADLPSFINKRMEQMERTIARSKSCTVDCKNVDRKLRQILDMTEDEAHFHMKQSAFLYNLGAQTLPKSHHCLSMRLTLEYFKSSSLDSDDSPSGKFNSPKYRHYVILSRNVLAASVVINSTVSSCKEPGILAFHILTDAQNFYAMKHWFARNSYKSAAIHVINYEAIILERLPKYSIRHLYLPEEFRVLIRSTKQPTDNTRMEYLSLFSHSHFLIPEIFKYLNKVVLLDDDLVIQRDLSFLWNIDMGDKVNGAVEFCGLKLGQMRNVLGKTAYDPKSCAWISGVNLINLDKWREHNVTENYLMLMKKFKFKDEQSLRAAAFPLSLLSFQHLIYPLDEKLTLSGLGYDYGIDEEVARRSVSLHYNGNMKPWLELGIPHYKKYWKRFLVRGDQFMDECNVNP

SEQ ID NO: 82028 - protein, 98 aa, Setaria italica
  Transcript Sequence Number=SeqID_16054
  Gene Ontology: Mol. function=sequence-specific DNA binding; Cellular component=intracellular
  Homolog annotation: Hit_ID=Q5BJC0; Match level="QueryCoverage=100%, HitCoverage=40%, E-value=1e-20, Identity=50%"; Hit description =Zgc:112496
VDSFYRHDLPALLRGREPDPFIAKPELVRLLQWKLSRGKWRPRLMDFVKGLDDAVVESASRKAFAALPDLSRAITELTVLKGVGPATASAVLAAYAPD

SEQ ID NO: 82029 - protein, 91 aa, Setaria italica
  Transcript Sequence Number=SeqID_16055
  Gene Ontology: Cellular component=integral to membrane
  Homolog annotation: Hit_ID=O24564; Match level="QueryCoverage=81%, HitCoverage=5%, E-value=1e-09, Identity=43%"; Hit description =Embryogenesis transmembrane protein
NRVLLIVMIVDLLSLTGAFVMGSCRDAKKSISTSVLLCLVLVYVLLHVLIAIHVIPPECKRQVTDKLKNFSCGNVWSALPQLCHKQTGEKS

SEQ ID NO: 82030 - protein, 45 aa, Setaria italica
  Transcript Sequence Number=SeqID_16056
  Gene Ontology: Mol. function=structural molecule activity
PNHRLRQELDLVRREISKRRGGGFSFIVVIIVALIGIFLGYLTKS

SEQ ID NO: 82031 - protein, 229 aa, Setaria italica
  Transcript Sequence Number=SeqID_16057
  Gene Ontology: Mol. function=structural molecule activity; Cellular component=plasma membrane; Biological process=lipid transport
  Homolog annotation: Hit_ID=B9SSG0; Match level="QueryCoverage=99%, HitCoverage=95%, E-value=1e-68, Identity=58%"; Hit description =Vesicle-associated membrane protein, putative
  Pfam annotation: Domain name=Motile_Sperm; Domain location=1-104; Score=137.5; E_value=4.3e-38; Accession=PF00635.18; Description=MSP (Major sperm protein) domain
  Subcellular localization annotation: CTP_CleavageSite=58; ConfidenceScore=5.14e-01
PLELRFPFELKKQISCSMQLSNLSNDYIAFKVKTTSPKKYSVRPNTGVVSPRSTCDVVVTMQAQRETPPDMQCKDKFLVQSIVAPAGIITMKDVTADMFTKESGNKMEEVKLRVTYVAPPQPPSPVPEESEEGSPSRASESENGDGPAGGFTRALRERMEPQEKSSEAGALISKLTEEKNSAIQQNHRLRQELDLVRREISKRRGGGFSFIVVIIVALIGIFLGYLMKS

SEQ ID NO: 82032 - protein, 48 aa, Setaria italica
  Transcript Sequence Number=SeqID_16058
SSAVSCLAVDYLHIYLVISHPCDFPFASRAHHVPVRPGTLIRRLGLRC

SEQ ID NO: 82033 - protein, 107 aa, Setaria italica
  Transcript Sequence Number=SeqID_16059
  Gene Ontology: Mol. function=glutamine-tRNA ligase activity; Cellular component=cytoplasm; Biological process=tRNA aminoacylation for protein translation
  Homolog annotation: Hit_ID=B6UC34; Match level="QueryCoverage=100%, HitCoverage=13%, E-value=2e-42, Identity=83%"; Hit description =Glutaminyl-tRNA synthetase
  Pfam annotation: Domain name=tRNA_synt_1c_R1; Domain location=14-107; Score=8.2; E_value=5.2e-07; Accession=PF04558.7; Description =Glutaminyl-tRNA synthetase, non-specific RNA binding region part 1
MGTGGDGEKAAPALPLEALLALGLDQRTAENALVNSKVTANLAAVIAEAGIKECDKSVGNLLYAVATKYPTNALVHRPVLIKYVLSIKIKNPAQLDAALSFLTNTGP

SEQ ID NO: 82034 - protein, 152 aa, Setaria italica
  Transcript Sequence Number=SeqID_16060
  Gene Ontology: Mol. function=glutamine-tRNA ligase activity; Cellular component=cytoplasm; Biological process=tRNA aminoacylation for protein translation
  Homolog annotation: Hit_ID=B6UC34; Match level="QueryCoverage=96%, HitCoverage=18%, E-value=4e-59, Identity=73%"; Hit description =Glutaminyl-tRNA synthetase
  Pfam annotation: Domain name=tRNA-synt_1c_C; Domain location=31-152; Score=50.6; E_value=6e-12; Accession=PF03950.10; Description=tRNA synthetases class I (E and Q), anti-codon binding domain
YFVAGINRSDNSLIQVERLEYHIREELNKVAPRALVVLHPLKVVITNLDYGTIMNLDAKMWPNAPDSDASAHYKVPFRRTLYISYSDFRLKDSKDFYGLAPGKSVMLRHAFPIKCAEVIYGDNPDSIVEIRAEYDPSKATKPKGVFTTWVCP

SEQ ID NO: 82035 - protein, 81 aa, Setaria italica
  Transcript Sequence Number=SeqID_16061
AYVAFDTNWVPTTKKIIQNQIQSKQANSSHMHILQGGRPLNCCHGLNYHFLHKLYSSGAPLHPNKTDAVTWVQLYQMNRGG

SEQ ID NO: 82036 - protein, 67 aa, Setaria italica
  Transcript Sequence Number=SeqID_16062
  Gene Ontology: Mol. function=glutamine-tRNA ligase activity; Cellular component=cytoplasm; Biological process=tRNA aminoacylation for protein translation
  Homolog annotation: Hit_ID=B6UC34; Match level="QueryCoverage=98%, HitCoverage=8%, E-value=2e-30, Identity=98%"; Hit description =Glutaminyl-tRNA synthetase
GGILNPHSKEVIKDAYAVPSLATAVLGDKFQFERLGYFAVDTDSTPEKLVFNRTVTLRDSFGKAGPK

SEQ ID NO: 82037 - protein, 90 aa, Setaria italica
  Transcript Sequence Number=SeqID_16063
  Gene Ontology: Mol. function=glutamine-tRNA ligase activity; Cellular component=cytoplasm; Biological process=tRNA aminoacylation for protein translation
  Homolog annotation: Hit_ID=B6UC34; Match level="QueryCoverage=100%, HitCoverage=11%, E-value=1e-41, Identity=91%"; Hit description =Glutaminyl-tRNA synthetase
LKVEVRLFEKLFLSENPAELEDWLGDLNPQSKEVIKGAYAVPSLANAVLGDKFQFERLGYFAVDSDSTPEGLVFNRTVTLKDSYGKAGPK

SEQ ID NO: 82038 - protein, 370 aa, Setaria italica
  misc_feature (47)..(47): Xaa can be any naturally occurring amino acid
  misc_feature (186)..(186): Xaa can be any naturally occurring amino acid
  Transcript Sequence Number=SeqID_16064
  Gene Ontology: Mol. function=glutamine-tRNA ligase activity; Cellular component=cytoplasm; Biological process=tRNA aminoacylation for protein translation
  Homolog annotation: Hit_ID=B6UC34; Match level="QueryCoverage=96%, HitCoverage=45%, E-value=1e-168, Identity=80%"; Hit description =Glutaminyl-tRNA synthetase
  Pfam annotation: Domain name=tRNA-synt_1c; Domain location=257-370; Score=-53.0; E_value=9.4e-12; Accession=PF00749.13; Description=tRNA synthetases class I (E and Q), catalytic domain
  Pfam annotation: Domain name=tRNA_synt_1c_R1; Domain location=4-160; Score=215.9; E_value=1.1e-61; Accession=PF04558.7; Description =Glutaminyl-tRNA synthetase, non-specific RNA binding region part 1
  Pfam annotation: Domain name=tRNA_synt_1c_R2; Domain location=161 -250; Score=99.8; E_value=9.6e-27; Accession=PF04557.7; Description =Glutaminyl-tRNA synthetase, non-specific RNA binding region part 2
  Pfam module annotation: Pfam domain module=tRNA-synt_1c::tRNA_synt_1c_ R1::tRNA_synt_1c_R2; Domain location=257-370::4-160::161-250
LPQLESFLAIGLDQRTAENALANRKVTANLTAVIAEAGVTECHKSVXGNLLYTVATKYPANALVHRPDLIKYILSEKIKNSAQLDAALSFLSTLGPDSLDPVKFEEACGVGVVVSFEEIQSTVNDVLNENMEAILEQRYRINVGSLCGLVRKRQPWGDAKLVKEEIEKRLVEILGPKTEADNAKPXKKKKEKPAKVEEEKTVAAPPSEEELNPYSIFPQPEENFKVHTEIFFSDGNIWRAHNTKSILEKHLKVTGGKVMTRFPPEPNGYLHIGHSKAMFIDFGLAKERNGHCYLRFDDTNPEAEKKEYIDHIQEIVTWMGWEPYKVTYTSDYFQDLYELAICLIQKGLAYVDHQTLEEIKEYREKKMNSP

SEQ ID NO: 82039 - protein, 298 aa, Setaria italica
  Transcript Sequence Number=SeqID_16065
  Gene Ontology: Mol. function=glutamine-tRNA ligase activity; Cellular component=cytoplasm; Biological process=tRNA aminoacylation for protein translation
  Homolog annotation: Hit_ID=B6UC34; Match level="QueryCoverage=98%, HitCoverage=37%, E-value=1e-158, Identity=92%"; Hit description =Glutaminyl-tRNA synthetase
  Pfam annotation: Domain name=tRNA-synt_1c_C; Domain location=81-272; Score=238.8; E_value=1.4e-68; Accession=PF03950.10; Description=tRNA synthetases class I (E and Q), anti-codon binding domain
IKLLSNNVMSKRKLNRLVTDKWVDGWDDPRLLTLAGLRRRGVSSTAINSFIRGIGITRSDNSLIRVDRLEYHIREELNKTAPRSMVVLRPLKVVITNLEEGKVMDLDGKMWPDASDTDASSHYKVPFSRTVYIESTDFRLKDSKDYYGLAPGKSVMLRYAFPIKCTDVIYGNSPDDIVEIRAEYDPLKTSKLKGVLHWVAEPAPGIEPLKVEVRLFEKLFMSENPAELEDWLGDLNPHSKEVIKDAYAVPSLATAVLGDKFQFERLGYFAVDTDSTPEKLVFNRTVTLRDSFGKAGPK

SEQ ID NO: 82040 - protein, 78 aa, Setaria italica
  Transcript Sequence Number=SeqID_16066
ARATSSILPFPFCCIFMSQLHHIFSCLTIHSTLSFEGSTVLDIDIMTTNECIPIICRGTDYQQNYIWHDNISGMLGSS

SEQ ID NO: 82041 - protein, 44 aa, Setaria italica
  Transcript Sequence Number=SeqID_16067
PIVLPNRRLRVGSDPCEAHVAHHINPTPNLSSTILRRVQWLLAK

SEQ ID NO: 82042 - protein, 179 aa, Setaria italica
  Transcript Sequence Number=SeqID_16068
  Homolog annotation: Hit_ID=B6SWN7; Match level="QueryCoverage=100%, HitCoverage=36%, E-value=8e-76, Identity=79%"; Hit description=Amino acid permease
MCVIINNAGVLVVYLIIIGDVMSGSLKHIGVMDQLIGHGEWDNRKLLILVVLVIFLAPLCALEKIDSLSLSSAASVALAVVFVVVSCIIALIKIAEGKISMPRMGPDFSSREAMLDLLVVIPIMTNAYICHFNVQPIYNELKEKTPQNMYKVGRISTVLCVVVYALTALSGYLLFGDDT

SEQ ID NO: 82043 - protein, 236 aa, Setaria italica
  Transcript Sequence Number=SeqID_16069
  Gene Ontology: Mol. function=metal ion binding; Cellular component =integral to membrane; Biological process=multicellular organismal development
  Homolog annotation: Hit_ID=B6TJT8; Match level="QueryCoverage=75%, HitCoverage=40%, E-value=4e-43, Identity=49%"; Hit description =Palmitoyltransferase ZDHHC9
HERNYRYFFCFVSSAAVLCIYVCSMCGLYIKLLMSRGHDSLLKAIKESPAPTNQKQMKLICFWFVGGLTGFHSYLIATNKTTYENIKYKYSNQPNVYDHGCVRNCHEFWCTKRKPSKINLRAIVQEEHEVVQPQTSYANVPEDDAPHRPRAKVEDDLEMGLDILKTSRRRTDEVSDEELESGSNGVKYRTPDSDTDIPVTRTKTEIFGEVRDLDLSVNNAALPSSPQQKQHPDELC

SEQ ID NO: 82044 - protein, 113 aa, Setaria italica
  Transcript Sequence Number=SeqID_16070
  Gene Ontology: Mol. function=structural constituent of cell wall; Cellular component=cell wall
  Homolog annotation: Hit_ID=Q9LHF1; Match level="QueryCoverage=98%, HitCoverage=22%, E-value=2e-28, Identity=54%"; Hit description =Extensin-like protein
  Pfam annotation: Domain name=LRRNT_2; Domain location=44-83; Score =12.9; E_value=0.044; Accession=PF08263.4; Description=Leucine rich repeat N-terminal domain
RGLSASDAARIRRRQLLQYSSGGDHGHDDVAAVDPSYSFPNPRLRDAYVALQAWRRAILSDPHNVTGTWHGPDVCAYAGIFCAPSPTDPHLTVVASVDLNHADLAGHLPEELG

SEQ ID NO: 82045 - protein, 283 aa, Setaria italica
  Transcript Sequence Number=SeqID_16071
  Gene Ontology: Cellular component=cytoplasm; Biological process =regulation of DNA repair
  Homolog annotation: Hit_ID=B6TKG2; Match level="QueryCoverage=92%, HitCoverage=92%, E-value=1e-109, Identity=75%"; Hit description =Regulatory protein RecX
  Pfam annotation: Domain name=RecX; Domain location=142-279; Score =13.7; E_value=0.0016; Accession=PF02631.8; Description=RecX family
  Subcellular localization annotation: CTP_CleavageSite=44; ConfidenceScore=5.12e-01
MAALAASRRLLHLRPGLELCLRSRPQSCSSWAKGTARFRRDVPRRSLVSCRQGSFEEGNAAMDKAMRSPDEQLSHCKDGNGTTLDPIGKNFANEFAQHSLEEEATDDVMCGISESVVRDVGKAAIELLAARAFTVSELRKKLRSKNYPVDAIDAVVADFKSRGLLNDGFYAESFSRSRWMSSTWGPRRIKQALRQKGVPEAEVDQATRSVFQDGDGHGKEATYGISEASMDHLFAQALKQWQRGQSLTLENRRGRIVRWLQYRGFNWSVTNAIVKKLEAQHPS

SEQ ID NO: 82046 - protein, 84 aa, Setaria italica
  Transcript Sequence Number=SeqID_16072
RGFALALRVRVRASPRGSGRLGYFVSLRSCRAEELPGSSIPRGVFEAGAPICGCRHRGIGRLPKSPGVWSFDSAGSKAPPSARL

SEQ ID NO: 82047 - protein, 112 aa, Setaria italica
  Transcript Sequence Number=SeqID_16073
  Gene Ontology: Mol. function=receptor activity; Cellular component =integral to membrane
  Homolog annotation: Hit_ID=B6TSK1; Match level="QueryCoverage=59%, HitCoverage=17%, E-value=4e-18, Identity=68%"; Hit description =Hemolysin-III related family protein
  Pfam annotation: Domain name=HlyIII; Domain location=7-112; Score= -41.5; E_value=0.0055; Accession=PF03006.12; Description=Haemolysin -III related
  Subcellular localization annotation: CTP_CleavageSite=43; ConfidenceScore=5.33e-01
LVASTDFSSVLLGSVSSSGHGAAHHLVPRWPRTVFLGGAMTCLAVSAAAHLLACHSHRFNRLFWQLDYAGIAVMIVASFFPPVYYAFLGDAVTQLLYLSLITLLGLLVVGLM

SEQ ID NO: 82048 - protein, 144 aa, Setaria italica
  Transcript Sequence Number=SeqID_16074
  Gene Ontology: Mol. function=zinc ion binding; Cellular component =cytoplasm; Biological process=intracellular protein transport
  Homolog annotation: Hit_ID=P93231; Match level="QueryCoverage=86%, HitCoverage=13%, E-value=1e-52, Identity=76%"; Hit description =Vacuolar protein sorting-associated protein 41 homolog
  Pfam annotation: Domain name=WD40; Domain location=67-105; Score =34.6; E_value=3.9e-07; Accession=PF00400.24; Description=WD domain, G-beta repeat
EDGDEGEEELEDEAEEEEEEPRLKYQRLGGSVPAILSTDAAASIAVADRMVALGTHNGTLHILDFQGNQVKEIAAHTATVNDISFDADGEYIGSCSDDGTVAISSLFTDEKLKFEYHRPMKAIALDPNYSRNYRRFATGGLAGQ

SEQ ID NO: 82049 - protein, 27 aa, Setaria italica
  Transcript Sequence Number=SeqID_16075
AAARRKARQQEEELRTVMYLSNWGPNN

SEQ ID NO: 82050 - protein, 165 aa, Setaria italica
  Transcript Sequence Number=SeqID_16076
  Gene Ontology: Mol. function=ARF GTPase activator activity; Cellular component=plasma membrane; Biological process=regulation of ARF GTPase activity
  Homolog annotation: Hit_ID=B4FFK7; Match level="QueryCoverage=100%, HitCoverage=100%, E-value=3e-71, Identity=78%"; Hit description =GTPase activating protein
  Pfam annotation: Domain name=C2; Domain location=9-87; Score=104.4; E_ value=3.9e-28; Accession=PF00168.22; Description=C2 domain
MLDHLVGLVKVRVVRGVNLAIRDLRSSDPYVVVRIGKQKLKTRVIKKSTNPEWNEELTLSIENPADPVRLEVFDKDTFVDDSMGNAELDIRPLVDVVKMKLQDVPDKTIVKKVVPNRENCLAEESSIYVSEGKVKQDLVVRLKNVECGEIELQLQWVDLPGSKGV

SEQ ID NO: 82051 - protein, 527 aa, Setaria italica
  Transcript Sequence Number=SeqID_16077
  Homolog annotation: Hit_ID=Q10AX2; Match level="QueryCoverage=59%, HitCoverage=80%, E-value=1e-126, Identity=67%"; Hit description =Streptomyces cyclase/dehydrase family protein, expressed
  Pfam annotation: Domain name=Polyketide_cyc; Domain location=156-287; Score=69.1; E_value=1.6e-17; Accession=PF03364.12; Description =Streptomyces cyclasedehydrase
RSIRSGPRSSSAILLYEVNVIPRFNFPAIFLERIIRSDLPVNLRALACRAEKIYLENQRCGFSAVDSKPSSTSSQLKFHSSTIDTTSSKFKEAPPTSGVGSVLPSPSSELIGKWGVYGNTCRIDRPCVVDEIHLRRFDGLLEHEGAHRCVFASITVKAPVLEVWNVLTAYENLPEFVPNLAISRIVLRDNNKVRIMQEGCKGLLYMVLHARVVMDLRRKLEEEISFEQVEGDFYSFKGKWRFEQLGDQHTLLKYMVETKMHKDTFLSESILEEIIYEDLPSNLCAIRDYIEKAGAEGSNSTTHSAAPTHPDIDHAEDRQSEKESASCSFSSMKQRPKVPGLQKDIEVLKSELENFIAKYGQDGFMPKRKHLRSHGRVDIEKAITRMGGFRKIASTMNLSLSYKNRKPRGYWDNLENLQEEISRFQKSWGMDPSYMPSRKSFERAGRYDIARALEKWGGVQEVSRLLSLELRRPRRQADSDDERQSESPAGSGITKQHGMKPDKANTSLDAHKWLLKLKDLDVNWVEY

SEQ ID NO: 82052 - protein, 97 aa, Setaria italica
  Transcript Sequence Number=SeqID_16078
  Gene Ontology: Mol. function=hydrolase activity
  Homolog annotation: Hit_ID=B9SPW6; Match level="QueryCoverage=90%, HitCoverage=22%, E-value=2e-36, Identity=82%"; Hit description =Catalytic, putative
GHSFGGKVALSMVEQAAKPLARPVRVWVLDATPGKVRAGGDGEDHPAELIEFLRRMPTQVSSKQEVVNALVKEQFSVDVAQWVATNLRRSSPLGQRS

SEQ ID NO: 82053 - protein, 396 aa, Setaria italica
  Transcript Sequence Number=SeqID_16079
  Gene Ontology: Mol. function=hydrolase activity
  Homolog annotation: Hit_ID=B9SPW6; Match level="QueryCoverage=81%, HitCoverage=83%, E-value=1e-144, Identity=76%"; Hit description =Catalytic, putative
  Pfam annotation: Domain name=Abhydrolase_1; Domain location=142-383; Score=28.5; E_value=2.8e-05; Accession=PF00561.12; Description =alphabeta hydrolase fold
  Pfam annotation: Domain name=PGAP1; Domain location=109-274; Score= -86.0; E_value=0.048; Accession=PF07819.5; Description=PGAP1-like protein
  Pfam annotation: Domain name=Thioesterase; Domain location=113-369; Score=-36.6; E_value=0.016; Accession=PF00975.12; Description =Thioesterase domain
  Pfam module annotation: Pfam domain module=Abhydrolase_1::PGAP1::Thioe sterase; Domain location=142-383::109-274::113-369
  Subcellular localization annotation: CTP_CleavageSite=34; ConfidenceScore=5.33e-01
MAAAAPPRSLSAESRRTALGAVALPALRPGARVRAARPREENFHTHRLLMSSNMNSRSSVCPPCNCAQMALADTGIFYQPDVGKHAGVLAYELVQGSLVQWNSFMDKSIPDPPTAVLLHGILGSRKNWGSFAKRLAQEFPMWQFLLVDLRCHGDSASIKKRGPHTVASTALDVLKLVVQLRLAPRVLVGHSFGGKVALSMVEQAAKPLARPVRVWVLDATPGKVRAGGDGEDHPAELIEFLRRMPTQVSSKQEVVNALVKEQFSVDVAQWVATNLRRSSPLGQRSSSSFSWTFDLNGISEMYKSYEDTNLWRIVENVPRGVHINFLKAERSLHRWALEDLQRIHTAEELAADEGGGVEMHVLEDAGHWVHADNPDGLFRILSSTFRVETTIRGMQD

SEQ ID NO: 82054 - protein, 79 aa, Setaria italica
  Transcript Sequence Number=SeqID_16080
LDTMQGIRRDRPAAAAAAAGGGELGALELIPPQDRRLPRAAVCFLALGFCMLIHSTGLNYHSAANQELVFAGFFVFIVG

SEQ ID NO: 82055 - protein, 263 aa, Setaria italica
  Transcript Sequence Number=SeqID_16081
  Gene Ontology: Mol. function=DNA-directed RNA polymerase activity; Biological process=transcription
  Homolog annotation: Hit_ID=Q9LR06; Match level="QueryCoverage=67%, HitCoverage=93%, E-value=8e-31, Identity=43%"; Hit description =F10A5.14
MNCRAFHPRTVLLCAFLQFFIFPFLGCGKSRYSVIDFGSSSLQRRYEERFDGVLLAHETQLVEVEEREVEDETVVEGKKKTNIVKAKILNGLVPYFGLRVHANLLLFSPQPDMILEGKVEMLGKESIHAIVLGVFSVAIMSDDIHEKFKFKRRGDGGRFVSRSDREHMIKKGTMIRFSVKSVDTEMNCHITGSLIPPQTGSMRWLSAHDAEYASQINSGKRKSRDISIKIEQNEQEHRILQNENSMVKSERPHKSRKRSIEDR

SEQ ID NO: 82056 - protein, 43 aa, Setaria italica
  Transcript Sequence Number=SeqID_16082
  Gene Ontology: Mol. function=microtubule binding
  Homolog annotation: Hit_ID=B6T577; Match level="QueryCoverage=100%, HitCoverage=13%, E-value=1e-14, Identity=90%"; Hit description =Microtubule-associated protein RP/EB family member 3
QETANKRKSISDLEEFGMASSSRQRLSDISDVQLCGSPLTSFS

SEQ ID NO: 82057 - protein, 124 aa, Setaria italica
  Transcript Sequence Number=SeqID_16083
  Gene Ontology: Mol. function=transporter activity; Cellular component= integral to membrane; Biological process=transport
  Homolog annotation: Hit_ID=B6TB19; Match level="QueryCoverage=69%, HitCoverage=16%, E-value=8e-42, Identity=94%"; Hit description =Patellin-5
  Pfam annotation: Domain name=CRAL_TRIO_N; Domain location=30-93; Score=21.4; E_value=0.00046; Accession=PF03765.7; Description =CRALTRIO, N-terminus
AEEEEGKKEEAEKKEAGEGEKVAAAAAEEEKPAAAVVVDKDIALWGVPLLPSKGDEATDVVLLKFLRARDFKAGAAFEMLRRTLRWRRDWPGFSAGADADLPEELAGACYLDGADREGHPVCYN

SEQ ID NO: 82058 - protein, 130 aa, Setaria italica
  misc_feature (67)..(67): Xaa can be any naturally occurring amino acid
  Transcript Sequence Number=SeqID_16084
  Gene Ontology: Mol. function=microtubule motor activity; Cellular component=microtubule associated complex; Biological process =microtubule-based movement
  Homolog annotation: Hit_ID=Q2QMU6; Match level="QueryCoverage=100%, HitCoverage=3%, E-value=5e-35, Identity=63%"; Hit description =Kinesin motor domain containing protein, expressed
IDLLRARFDKNPEVTRFALENIRLSSQLKRSQQFFDEGERELLLNEISELRNQVSQILEVRIETEQXNIFPAKSKDSQQHCIDLEGDSESLRMELKRTSQELEACRGDLQVCLESNRKLTREIADLEKEL

SEQ ID NO: 82059 - protein, 217 aa, Setaria italica
  Transcript Sequence Number=SeqID_16085
  Homolog annotation: Hit_ID=B9SNU2; Match level="QueryCoverage=97%, HitCoverage=69%, E-value=8e-31, Identity=28%"; Hit description =Pentatricopeptide repeat-containing protein, putative
  Pfam annotation: Domain name=PPR; Domain location=134-168; Score =38.2; E_value=3.3e-08; Accession=PF01535.12; Description=PPR repeat
  Pfam annotation: Domain name=PPR; Domain location=169-203; Score =34.4; E_value=4.5e-07; Accession=PF01535.12; Description=PPR repeat
  Pfam annotation: Domain name=PPR; Domain location=29-63; Score=39.2; E_value=1.6e-08; Accession=PF01535.12; Description=PPR repeat
  Pfam annotation: Domain name=PPR; Domain location=64-98; Score=19.6; E_value=0.013; Accession=PF01535.12; Description=PPR repeat
  Pfam annotation: Domain name=PPR; Domain location=99-133; Score=35.4; E_value=2.3e-07; Accession=PF01535.12; Description=PPR repeat
  Pfam module annotation: Pfam domain module=PPR::PPR::PPR::PPR::PPR; Domain location=134-168::169-203::29-63::64-98::99-133
NGLCKINKSNDVWELFADMIKRGYVPDAILYSIIIDGFVKALELQEAFRLYHKMLDEGIKPTIFTYTSLLNGLCHDDGLPRFRKLMRDMIGEDLVLDKILCTSIIAHYCRRSNMKAAMEMYKKMESSGLSPDAFVYTCLISGFSKVRAMDGALLMMEEMEKRNIKPTVVTYTALIVGYLKTGDEKQANKMYRSMCEASIDPDDKLSCILGVGNDGGD

SEQ ID NO: 82060 - protein, 126 aa, Setaria italica
  Transcript Sequence Number=SeqID_16086
  Homolog annotation: Hit_ID=Q7XKU9; Match level="QueryCoverage=65%, HitCoverage=20%, E-value=3e-21, Identity=69%"; Hit description =OSJNBa0022H21.8 protein
  Pfam annotation: Domain name=DZC; Domain location=49-85; Score=65.5; E_value=2e-16; Accession=PF08381.3; Description=Disease resistancezinc fingerchromosome co
AASASSSASSSAKIAPAQQHEADGDREDPLHPHEEPEPGVLMTLVSRGDGTNHLRRIRFSEDYFGDAWAAQSWWADNCDRIVELYSVVVQPEHPSHGEDDDDDDPAAPVTPCQSEDDDHQPPDGIG

SEQ ID NO: 82061 - protein, 407 aa, Setaria italica
  misc_feature (261)..(261): Xaa can be any naturally occurring amino acid
  Transcript Sequence Number=SeqID_16087
  Gene Ontology: Mol. function=RNA binding
  Homolog annotation: Hit_ID=B9SPX7; Match level="QueryCoverage=99%, HitCoverage=65%, E-value=1e-150, Identity=65%"; Hit description=RNA binding protein, putative
  Pfam annotation: Domain name=Nol1_Nop2_Fmu; Domain location=8-401; Score=-32.8; E_value=1e-05; Accession=PF01189.9; Description =NOL1NOP2sun family
PVKDGGWAVGVTRGTVLQGLQTDAHYEERKGLYIGQGTAAMSRSGIFRVPHGIAVEMTERVYKLPSFNDVLEGEIFLQNLPSVVAACVLDPQPGERILDMCAAPGGKTTAIALLMRDKGEVVALDRSHNKVMDILKLASEMDLNCIKAYKLDALKSVRKTDEATVVGMADGHCEAIKTLAEDSDPCHATVDDRATNVVEDSSTTTVAQSETEQPFLIDGKNPESKRYVSKAELRKNLRRMKNGPGRNNCSGGRVEKSKGFXPNSFDRVLLDAPCSALGLRPRLFAGEETLESLKTHARYQRRMFDQAVKLVRPGGVIVYSTCTINPGENEALVRYALDTYKFLSLASQNPKVGGPGIVGSYELFNKTYTEEWLTEHEAELVQRFDPSSPVDTIGFFIAKFNVGEKED

SEQ ID NO: 82062 - protein, 91 aa, Setaria italica
  Transcript Sequence Number=SeqID_16088
  Gene Ontology: Mol. function=4 iron, 4 sulfur cluster binding; Cellular component=integral to membrane; Biological process=protein -chromophore linkage
  Homolog annotation: Hit_ID=P56767; Match level="QueryCoverage=100%, HitCoverage=12%, E-value=9e-37, Identity=84%"; Hit description =Photosystem I P700 chlorophyll a apoprotein A2
YTIGLRTNEDLYTGALFLLFLSTLSLIGGWLHLQPKWKPSLSWFKNAESRLNHHLSGLFGVSSLAWTGHLVHVAIPASRGEYVRWNNFLDV

SEQ ID NO: 82063 - protein, 135 aa, Setaria italica
  misc_feature (65)..(65): Xaa can be any naturally occurring amino acid
  Transcript Sequence Number=SeqID_16089
  Gene Ontology: Mol. function=hydrolase activity
  Homolog annotation: Hit_ID=Q7XVB5; Match level="QueryCoverage=88%, HitCoverage=34%, E-value=1e-56, Identity=91%"; Hit description =OSJNBa0072D21.5 protein
AQPPPAPGERPPLVFVHGSFHAAWCWAEHWLPFFSRAGFPCYALSLRAQGESSVPQEAVAGTLEXTHTGDIADFIQKEIPSPPVLIGHSFGGLIVQQYISCLQGSELHPKLAGAVLVCSVPPSGNSGLVWRLPSD

SEQ ID NO: 82064 - protein, 123 aa, Setaria italica
  Transcript Sequence Number=SeqID_16090
  Gene Ontology: Mol. function=transporter activity; Cellular component= membrane; Biological process=oligopeptide transport
  Homolog annotation: Hit_ID=Q7XUE5; Match level="QueryCoverage=87%, HitCoverage=18%, E-value=2e-46, Identity=82%"; Hit description =OSJNBa0076N16.17 protein
MAIRGFVDWRGNPINRGVHGGVRAAWFIYFLTVVANIVNVPNMLNMVTYLHGTMHMGVSSSATTVTNVLGATAGFALIGAFLSDSYITRSRTILLFGPLEFLVFNHLSPTGIFHVLLLLLNVN

SEQ ID NO: 82065 - protein, 343 aa, Setaria italica
  misc_feature (54)..(54): Xaa can be any naturally occurring amino acid
  Transcript Sequence Number=SeqID_16091
  Gene Ontology: Mol. function=transferase activity, transferring glycosyl groups
  Homolog annotation: Hit_ID=B9I7F7; Match level="QueryCoverage=98%, HitCoverage=63%, E-value=1e-132, Identity=63%"; Hit description =Glycosyltransferase, CAZy family GT8
  Pfam annotation: Domain name=Glyco_transf_8; Domain location=6-314; Score=345.4; E_value=1.1e-100; Accession=PF01501.12; Description =Glycosyl transferase family 8
QPPSSWLPRLSDNSYYHFVLASDNILAASVVVRSTVKSSLNPERIVFHVITDKXTYPAMHSWFALNSLYPAIVEVKGVHQFDWLTKENVPVLEAIETQRTVRDRFRGNHLARTSASDSPRVFAAKLQAGSPTYTSVLNHIRIYLPELFPSLNKVVFLDDDVVVQHDLSPLWDIDLAGNVNGAVETCRGGDSWVMSKRFRNYFNFSHPLIASNFDPSECAWAYGMNIFDLNAWRKTTIKDKYHHWVKENLKSNFTLWRLGTLPPGLIAFKGHVHPIDPSWHLLGLGYQEKTDISSVEQAAVIHYNGQSKPWLEIGFKHLQPFWTRHVNYSNEFIKNCHIMEPQL

SEQ ID NO: 82066 - protein, 916 aa, Setaria italica
  misc_feature (16)..(16): Xaa can be any naturally occurring amino acid
  misc_feature (21)..(21): Xaa can be any naturally occurring amino acid
  misc_feature (24)..(24): Xaa can be any naturally occurring amino acid
  misc_feature (33)..(33): Xaa can be any naturally occurring amino acid
  Transcript Sequence Number=SeqID_16092
  Gene Ontology: Mol. function=DNA-directed RNA polymerase activity; Cellular component=nucleus; Biological process=transcription
  Homolog annotation: Hit_ID=Q07DU9; Match level="QueryCoverage=100%, HitCoverage=78%, E-value=0.0, Identity=88%"; Hit description=DNA -directed RNA polymerase (Fragment)
  Pfam annotation: Domain name=RNA_pol_Rpb2_3; Domain location=215-280; Score=51.7; E_value=2.8e-12; Accession=PF04565.8; Description=RNA polymerase Rpb2, domain 3
  Pfam annotation: Domain name=RNA_pol_Rpb2_4; Domain location=313-375; Score=83.7; E_value=6.4e-22; Accession=PF04566.5; Description=RNA polymerase Rpb2, domain 4
  Pfam annotation: Domain name=RNA_pol_Rpb2_5; Domain location=389-435; Score=41.1; E_value=4.5e-09; Accession=PF04567.9; Description=RNA polymerase Rpb2, domain 5
  Pfam annotation: Domain name=RNA_pol_Rpb2_6; Domain location=440-813; Score=359.6; E_value=5.7e-105; Accession=PF00562.20; Description=RNA polymerase Rpb2, domain 6
  Pfam annotation: Domain name=RNA_pol_Rpb2_7; Domain location=815-914; Score=124.3; E_value=4e-34; Accession=PF04560.12; Description=RNA polymerase Rpb2, domain 7
  Pfam module annotation: Pfam domain module=RNA_pol_Rpb2_3::RNA_pol _Rpb2_4::RNA_pol_Rpb2_5::RNA_pol_Rpb2_6::RNA_pol_Rpb2_7; Domain location=215-280::313-375::389-435::440-813::815-914
FQWSKSFSISFLYATXPIWLXFFXLGISSDKEXFDVIDMQDGDASVINTISATIKESDELCEGFRKSDKARQYVDELVKNSRFPPAESFDDYVDRFLFPDISGHRNKALFLGYMVKCLLMAFTGKRKCDNKDDFRNKRLDLAGELLARELRAHIRLAERRMVKAIQRDLNSDRELQDLERYLDASIVTNGLNRAFSTGSWCHPYKKTERCSGIVATLRRTNPLQMISDLRKTRQRVAYAGKAGDARYPNPSYWGKLCFMSTPDGENCGLVKNLAVTAIVSSRVEQPLIESFISCGMSKLNEIPTENIQRMDKIFLNGNWVGCCTDSASFVLRLRCMRRSSLIHPQVEIKRDKHQKEVRVFSEAGRILRPLLVVENLNKIRKPKGRSYSFQELIQQEIIEFIGVEEEEDIQCAWGIRHLFGSEGEISSYTHCELDPSFLLGLSCGIIPFANHNFARRVLYQSEKHSQQAIGYSTTNPHIRVDTLSHQLYYPQRPLFKTVIADCLGRSDYTIGRRDDFARPEYFNGQNAIVAVNVHQGFNQEDSLVMNRASLERGMFRTEHLRSYKADVENKDVTKRLKMKEKIDFGKMESKRGRVDNLDDDGLPYIGASLQTNDIVIGKVSESGEDHSIKLKHTEKGMVQKVLLSANDEGKNFAVVTLRQVRTPCLGDKFSSMHGQKGVVGFLESQENFPFTRDGIVPDIVINPHAFPTRQTPGQLLEAALGKGIALGGTMRYATPFTTASVDVIAEQLHKAGFSKWGAESVINGRTGERMQSMVFMGPTFYQRLIHMSEDKVKFRNTGPVHPLTRQPVADRKRFGGVKFGEMERDCLLAHGAAANLHERLFMLSDFSQMHICQKCERVANVIMRCVPGGKKIRGPYCGFCKSSENIVRINVPYGAKLLYQELFSMGICLKFETEVC

SEQ ID NO: 82067 - protein, 413 aa, Setaria italica
  misc_feature (76)..(76): Xaa can be any naturally occurring amino acid
  misc_feature (266)..(266): Xaa can be any naturally occurring amino acid
  Transcript Sequence Number=SeqID_16093
ERNKKRLHSSDSEVDYSSGSEIDCIEDRGTLGDSEGGSPLSKHSWNCRRYEGPYSSSSLSKISHFSESSVIREAKXQLSERWAVVTCDEISQEQVQPLRRTCTLGEMLSIKEVKKEDVSTEILSASSNRSCSLDNESTTWSTYVTSRKNDENGERSPRKLPRSNSVPVISSTFGNMVVDAQASNPESRKLKMVVVSNKGKSSLKGRVSDFSLSRSKKPTRQKRTYHSSDCVVQRLEACNIRSRLAYNHKLDANAKSVDCEDRIDSXSTQISTSMSERSSIGVIVSLDCPRGSLDKLGVNKGLNSNRDQPSPTSVLDAPSEDSSCNEHNTSGRTSKNTISRSSAIETVARFISWDDSASESRLLSTPRTSLMSDVDDDESECHVLVQNIMSSAGLGSSQSNMVFTGWHLPDYPL

SEQ ID NO: 82068 - protein, 342 aa, Setaria italica
  Transcript Sequence Number=SeqID_16094
  Gene Ontology: Mol. function=ATPase activity, coupled to transmembrane movement of substances; Cellular component=integral to membrane; Biological process=transport
  Homolog annotation: Hit_ID=Q0WNH8; Match level="QueryCoverage=82%, HitCoverage=33%, E-value=1e-93, Identity=58%"; Hit description=Multi- drug resistance protein
YALLAQVAALSYEVAVAGSRVSAGALLLPAVQAVAWAALLVLALQARALGWARFPALVRVWWVVSFALCVGIAYDDSRRLIRDEPRTVDYAHMVANFASVPALGFLCLVGVMGSTGLEFEFTDENGVHEPLLLGRQRREAEEEPGCLRVTPYADAGILSLATLSWLSPLLSIGAQRPLELADIPLLAHKDRAKSCYKAMSAHYERQRLENPYREPSLTWAILKSFWREAAVNGAFAAVNTIVSYVGPYLISYFVDYLSGNIAFPHEGYILASIFFVAKLLETLTARQWYLGVDIMGIHVKSGLTAMVYRKGLRLSNASRQSHTSGEIVNYMAVDVSVVVGGT

SEQ ID NO: 82069 - protein, 553 aa, Setaria italica
  misc_feature (428)..(428): Xaa can be any naturally occurring amino acid
  Transcript Sequence Number=SeqID_16095
  Gene Ontology: Mol. function=ATPase activity, coupled to transmembrane movement of substances; Cellular component=integral to membrane; Biological process=transport
  Homolog annotation: Hit_ID=B9IBC8; Match level="QueryCoverage=100%, HitCoverage=36%, E-value=0.0, Identity=69%"; Hit description =Multidrug resistance protein ABC transporter family
  Pfam annotation: Domain name=ABC_membrane; Domain location=1-208; Score=-31.1; E_value=0.034; Accession=PF00664.15; Description=ABC transporter transmembrane region
  Pfam annotation: Domain name=ABC_tran; Domain location=282-453; Score= 137.0; E_value=6.1e-38; Accession=PF00005.19; Description=ABC transporter
  Pfam module annotation: Pfam domain module=ABC_membrane::ABC_tran; Domain location=1-208::282-453
GVDIMGIHVKSGLTAMVYRKGLRLSNASRQSHTSGEIVNYMAVDVQRVGDYAWYFHDIWMLPLQIILALAILYKNVGIAMVSTLIATVLSIAASVPVAKLQEHYQDKLMASKDERMRKTSECLKNMRILKLQAWEDRYRLQLETMRNVECRWLRWALYSQAAVTFVFWSSPIFVSVITFGTCILLGGQLTAGGVLSALATFRILQEPLRNFPDLISMMAQTRVSLDRLSHFLQQEELPDDATINVPQSSTDKAIDIKDGTFSWNPYSPTPTLSGIHLSVVRSMRVAVCGVIGSGKSSLLSSILGEIPKLCGHVRISGTAAYVPQTAWIQSGNIEENILFGSPMDRQRYKRVIAACSLKKDLELLQYGDQTIIGDRGINLSGGQKQRVQLARALYQDADIYLLDDPFSAVDAHTGSELFKEYILSALAXKTVIYVTHQVEFLPAADLILVLKDGHITQAGKYDDLLQAGTDFNALVSAHKEAIETMDIFEDSDGDTVSSSIPNKRLTPSISNIDNLKNKVHENGQPSKTRGIKGEKKNEERKKKRTVQEEERER

SEQ ID NO: 82070 - protein, 641 aa, Setaria italica
  misc_feature (637)..(637): Xaa can be any naturally occurring amino acid
  Transcript Sequence Number=SeqID_16096
  Gene Ontology: Mol. function=ATPase activity, coupled to transmembrane movement of substances; Cellular component=integral to membrane; Biological process=transport
  Homolog annotation: Hit_ID=B9IBC8; Match level="QueryCoverage=99%, HitCoverage=42%, E-value=0.0, Identity=74%"; Hit description =Multidrug resistance protein ABC transporter family
  Pfam annotation: Domain name=ABC_membrane; Domain location=140-410; Score=83.1; E_value=1e-21; Accession=PF00664.15; Description=ABC transporter transmembrane region
  Pfam annotation: Domain name=ABC_tran; Domain location=486-641; Score= 91.6; E_value=2.7e-24; Accession=PF00005.19; Description=ABC transporter
  Pfam annotation: Domain name=MMR_HSR1; Domain location=487-573; Score= -10.7; E_value=0.0098; Accession=PF01926.15; Description=GTPase of unknown function
  Pfam module annotation: Pfam domain module=ABC_membrane::ABC _tran::MMR_HSR1; Domain location=140-410::486-641::487-573
PNQVEFLPAADLILVLKDGHITQAGKYDDLLQAGTDFNALVSAHKEAIETMDIFEDSDGDTVSSSIPNKRLTPSISNIDNLKNKVHENGQPSKTRGIKEKKKNEERKKKRTVQEEERERGRVSLNVYLSYMGEAYKGTLIPLIILAQTMFQVLQIASNWWMAWANPQTEGDAPKTDSVVLLVVYMSLAFGSSLFVFVRSLLVATFGLAAAQKLFVKMLRCVFRAPMSFFDTTPAGRILNRVSVDQSVVDLDIAFRLGGFASTTIQLLGIVAVMSKVTWQVLILIVPMAIACMWMQRYYIASSRELTRILSVQKSPVIHLFSESIAGAATIRGFAQEKRFMKRNLYLLDCFARPLFSSLAAIEWLCLRMELLSTFVFAFCMAILVSFPPGTIEPSMAGLAVTYGLNLNARMSRWILSFCKLENRIISVERIYQYCKIPSEAPLVIENCRPQSSWPENGNIELIDLKVRYKDDLPLVLHGVSCMFPGGKKIGIVGRTGSGKSTLIQALFRLIEPTGGKIIIDNIDISAIGLHDLRSRLSIIPQDPTLFEGTIRMNLDPLEERADHEIWEALEKCQLGEVIRSKEEKLDSPVLENGDNWSVGQRQLIALGRALLKQAKILVLDEATASVDTATDNLIQKXIRMN

SEQ ID NO: 82071 - protein, 105 aa, Setaria italica
  misc_feature (47)..(47): Xaa can be any naturally occurring amino acid
  Transcript Sequence Number=SeqID_16097
  Gene Ontology: Mol. function=binding; Cellular component =intracellular; Biological process=RNA processing
  Homolog annotation: Hit_ID=O64496; Match level="QueryCoverage=96%, HitCoverage=8%, E-value=2e-17, Identity=44%"; Hit description =F20D22.14 protein
  Pfam annotation: Domain name=DUF946; Domain location=1-101; Score= -431.4; E_value=0.0063; Accession=PF06101.3; Description=Plant protein of unknown function (DUF946)
DSRLGVGIRNDTSRGSRLDTGGAGRCEVVSAEYLGVAEPAWLGFERXWGPRVEYDIGRVINRVARILPRSARERLAKLVEKVLVGDGPTGPKMHGNWRNDEREAR

SEQ ID NO: 82072 - protein, 150 aa, Setaria italica
  Transcript Sequence Number=SeqID_16098
MDAYHQQRRFAGSGDAPPPPHPSHPNAHWYPAPPPPYPPHPGHPYPPQHHHQWGPPPDLQHQRHPPPPQQQHYGYQQPPPPMPMQQQQPPPPGNPWPPHHAAGQPPPPSYPPPPPGQAWTNHSWAQNHGYPGQQRETNHLLGTSMLLSLR

SEQ ID NO: 82073 - protein, 120 aa, Setaria italica
  misc_feature (38)..(38): Xaa can be any naturally occurring amino acid
  Transcript Sequence Number=SeqID_16099
  Gene Ontology: Mol. function=galactosylgalactosylxylosylprotein 3 -beta-glucuronosyltransferase activity; Cellular component=membrane
  Homolog annotation: Hit_ID=Q50HU8; Match level="QueryCoverage=99%, HitCoverage=22%, E-value=8e-62, Identity=97%"; Hit description =Glycosyltransferase
  Pfam annotation: Domain name=Glyco_transf_43; Domain location=5-111; Score=-104.1; E_value=0.047; Accession=PF03360.8; Description =Glycosyltransferase family 43
  Subcellular localization annotation: CTP_CleavageSite=31; ConfidenceScore=5.29e-01
FQGPACNSSGHLAGWHTFNSLPFSGKTATVVGEAAPVXAPRGLEWAGFVLNSRMLWKEAEGKPDWVKDLDAVGENGEEIENPLTLLNDPSSVEPLGNCGKKVLLWWLRVEARADSKFPQG

SEQ ID NO: 82074 - protein, 80 aa, Setaria italica
  Transcript Sequence Number=SeqID_16100
  Gene Ontology: Mol. function=galactosylgalactosylxylosylprotein 3 -beta-glucuronosyltransferase activity; Cellular component=membrane
  Homolog annotation: Hit_ID=Q50HU8; Match level="QueryCoverage=93%, HitCoverage=14%, E-value=4e-31, Identity=86%"; Hit description =Glycosyltransferase
MCSLAARADSKFPQGWVIEPPLDIVVPAKRTPWPETTNELPSELLNDKKDQEDRRLSRANKSSRPRSTTKRKGDLQGQEN

SEQ ID NO: 82075 - protein, 108 aa, Setaria italica
  Transcript Sequence Number=SeqID_16101
  Gene Ontology: Mol. function=protein serine/threonine kinase activity; Biological process=protein amino acid phosphorylation
  Homolog annotation: Hit_ID=Q8RY70; Match level="QueryCoverage=79%, HitCoverage=43%, E-value=5e-18, Identity=62%"; Hit description=NPK1 -related protein kinase-like protein (Fragment)
DKCLRRDASERWTAAQLLEHPFLATAGCGVKAEDAKPMWVSPKSTLDAAFCESDADDEDDEMPESAADRIRALAGPCSALPEWESDDDWIEVCGGCSEVSDAAALPKK

SEQ ID NO: 82076 - protein, 91 aa, Setaria italica
  misc_feature (21)..(21): Xaa can be any naturally occurring amino acid
  Transcript Sequence Number=SeqID_16102
  Gene Ontology: Mol. function=protein serine/threonine kinase activity; Biological process=protein amino acid phosphorylation
  Homolog annotation: Hit_ID=Q10P10; Match level="QueryCoverage=71%, HitCoverage=9%, E-value=4e-10, Identity=53%"; Hit description =Protein kinase domain containing protein, expressed
LVYDLMPNGSLQDALLGRGRXRRPDLVAEWPRRLAVARDVAAALCYLHSVVKPPVVHGDVKASNVLLDADLRARLADFGLARFSSDPDPKP

SEQ ID NO: 82077 - protein, 253 aa, Setaria italica
  Transcript Sequence Number=SeqID_16103
  Gene Ontology: Mol. function=metal ion binding; Cellular component =nucleus; Biological process=regulation of transcription, DNA -dependent
  Homolog annotation: Hit_ID=Q7EXZ2; Match level="QueryCoverage=100%, HitCoverage=61%, E-value=6e-60, Identity=53%"; Hit description =Squamosa promoter-binding-like protein 14
KTQCRRRLTGHNERRRRPPAGPLASRYGRLATSFGEEPGRFRSFLLDFTYPRVPSSMRDGWPAARPGERVPASIQWQASLDPHQHSAITGYGAHSYGSHGSSSSGPPVFPGPELPPGGCLAGVPADSSCALSLLSTQQWDTTQSAGHSRAASMPATAGFDGNPVAPSLMASSYIAPSPWTGSRGHAGGRDVPPQLPPDVPLDEVHSGSSSHHGQFSGELELALQGNRPAPAPRIDHGSTSTFDQASNTTDWSL

SEQ ID NO: 82078 - protein, 51 aa, Setaria italica
  Transcript Sequence Number=SeqID_16104
DATICQKRSNEEVHFSFKKRIKDQVLLIQSFLISPLQLSNNRCLRCQAYPF

SEQ ID NO: 82079 - protein, 76 aa, Setaria italica
  Transcript Sequence Number=SeqID_16105
IYVEWIWSGRFLAKEENPKTGVKKLCRSNSISLYYYPSGVQMVQEKNLWNALTNIVSFLRHLTCFTYPHRLQLVCK

SEQ ID NO: 82080 - protein, 45 aa, Setaria italica
  Transcript Sequence Number=SeqID_16106
TDTATILPMPAPGEKRQEVGAATSVRAGLVPLLLGLIVMMASFGL

SEQ ID NO: 82081 - protein, 94 aa, Setaria italica
  Transcript Sequence Number=SeqID_16107
  Gene Ontology: Biological process=protein modification process
  Homolog annotation: Hit_ID=Q8VWY0; Match level="QueryCoverage=98%, HitCoverage=90%, E-value=8e-32, Identity=69%"; Hit description =Ubiquitin-like protein
  Pfam annotation: Domain name=ubiquitin; Domain location=4-75; Score =24.7; E_value=0.00037; Accession=PF00240.15; Description=Ubiquitin family
MYIRVKRNKSTYFIQCEPTETTLSIKQKLHLLIDQPPSNQQLVLLANNDVLEDSKTLADQKVENDSVVALALRKDDDDFEEVFIARPEDFMSSS

SEQ ID NO: 82082 - protein, 217 aa, Setaria italica
  Transcript Sequence Number=SeqID_16108
  Homolog annotation: Hit_ID=Q6H7H8; Match level="QueryCoverage=98%, HitCoverage=35%, E-value=2e-46, Identity=49%"; Hit description =Putative bZIP protein
AATAKHQRDYVHAVHGWLKLTLAPVSGGGTGAAVSSPVAAELAAFADRWGKVLDRAHCVDVLKAIKGFAAAAHAVHALQGEELRVAARMRRRSRELDRKSRMLRQVEKSYYDSYLPGGMSLWHWGRPMLREDHLQARDARNEVAQRRDEIEACRKMVEDEMRRHAKAIDATRTATVTCGQEKLPAVFQAMAAFSAALADSLEAVCRALLQQNTHTQQ

SEQ ID NO: 82083 - protein, 144 aa, Setaria italica
  Transcript Sequence Number=SeqID_16109
MSPDNEETMVVEREIHVNYEEPVNITAVPDTSEQSLHPANLDHELDAVGVLATSSAIPGSNRTPLSSTAQNQQMLKQTAAAALDECLLDPNLDEIKDEPIEYHQADDYPTIYDPMIESDSLVGIDHRQGDGNQTLCIPPNGSES

SEQ ID NO: 82084 - protein, 78 aa, Setaria italica
  Transcript Sequence Number=SeqID_16110
VHLTNFKWLWFGQSRFGHHITAGLSKVKVETFTVGASEDSVLCYKIRCTCRIFLAWARKIDKNLGSNAISPLLFFRND

SEQ ID NO: 82085 - protein, 133 aa, Setaria italica
  Transcript Sequence Number=SeqID_16111
  Gene Ontology: Mol. function=sequence-specific DNA binding; Cellular component=nucleus; Biological process=regulation of transcription, DNA-dependent
  Homolog annotation: Hit_ID=B6UHF4; Match level="QueryCoverage=68%, HitCoverage=31%, E-value=2e-21, Identity=65%"; Hit description=Heat shock factor protein 1
RADAPPCPGLVRRSSGGGGGKRKDDGCGGGGDAGAVDEDAVAMELVRLKREQRAIEDQVAAMWRRVQETERRPKQMLAFLVKVAGDPQVLRRLVSSSGASGAGGASGGVGFASGPEEDCAGGEVAKRARLLLD

SEQ ID NO: 82086 - protein, 90 aa, Setaria italica
  Transcript Sequence Number=SeqID_16112
RGIAIGQSQLASLLLLVAAGQSVEQIDGSQNKKKRMGFLSATRVAAAMIPLLGGRLLPLSFICFLFPSLPLPQLLDRRFFRSARSGKNRW

SEQ ID NO: 82087 - protein, 66 aa, Setaria italica
  Transcript Sequence Number=SeqID_16113
GRTRWRTTSCIHAYRGCKAKFPNHSTWTWIHNTEFKCASQSPLNSSNFHPNSPTQTRGTYSKMDYR

SEQ ID NO: 82088 - protein, 96 aa, Setaria italica
  Transcript Sequence Number=SeqID_16114
LDPANGTTRRRRAPTLYTMIYSSEQIERSGGKDGCGVRDQRRSIKNIEMTVPSIETQDSTFSSHALVANQRNRILRTTGACAGEKIKTIGEKGGRS

SEQ ID NO: 82089 - protein, 51 aa, Setaria italica
  Transcript Sequence Number=SeqID_16115
VPKRYEGDGLPRVALTPLEYCMLHCRIILEPHINVFFSPFLYSLHLSLSLH

SEQ ID NO: 82090 - protein, 72 aa, Setaria italica
  Transcript Sequence Number=SeqID_16116
TVVIAVSAMLHHRYQLLQCCCCWIAVARRRIYKYDEASTGQCGAPSQSRRERGVRGARAPLAQCGVDTHTDC

SEQ ID NO: 82091 - protein, 55 aa, Setaria italica
  Transcript Sequence Number=SeqID_16117
VMASMLLPCVFYLKIFGVARRGRAEVALIAAIIVLGSLVAATGTYSSLKKIVHEF

SEQ ID NO: 82092 - protein, 77 aa, Setaria italica
  Transcript Sequence Number=SeqID_16118
  Homolog annotation: Hit_ID=B9RZY6; Match level="QueryCoverage=94%, HitCoverage=4%, E-value=1e-11, Identity=49%"; Hit description =Neurobeachin, putative
YFGSFLECFESDGGPAGYQELLLWNQKSHSENELHANDVFSIGCMVAEMYLQRPLFDTALLAAYKESGIVPGAIQEL

SEQ ID NO: 82093 - protein, 193 aa, Setaria italica
  Transcript Sequence Number=SeqID_16119
  Gene Ontology: Cellular component=plasma membrane
  Homolog annotation: Hit_ID=Q9SLT5; Match level="QueryCoverage=89%, HitCoverage=33%, E-value=6e-17, Identity=37%"; Hit description=CW14 protein
AEVPASPSALAADHRTYSNPAFQAVSGSIEEAWYDSLAMSESDAEDDFHSVQDDACSLNGFENEAALSTRDGNSGSFKEAAQSGEHHHRKPKSSELSKGSSENGVRTSLSHDDVLSVSGEDSTHGGGRILDDCGLLPNNCLPCIASAVGVNEKKRALSSSPTHSMKMPSLKLSFKKKSGEAHPSSTLLSTKDF

SEQ ID NO: 82094 - protein, 400 aa, Setaria italica
  Transcript Sequence Number=SeqID_16120
  Gene Ontology: Cellular component=plasma membrane
  Homolog annotation: Hit_ID=Q9SLT5; Match level="QueryCoverage=88%, HitCoverage=71%, E-value=1e-123, Identity=62%"; Hit description=CW14 protein
  Pfam annotation: Domain name=DUF1336; Domain location=147-388; Score =464.7; E_value=1.4e-136; Accession=PF07059.4; Description=Protein of unknown function (DUF1336)
RDGNSGSFKEAAQSGEHHHRKPKSSELSKGSSENGVRTSLSHDDVLSVSGEDSTHGGGRILDDCGLLPNNCLPCIASAVGVNEKKRALSSSPTHSMKMPSLKLSFKKKSGEAHPSSTLLSTKDFLERPLAGKQVQLCLLDTKLLNSWSHIDPGTFRVRGANYFRDKKKELAPNYAAYYPFGVDVYLSPQKLNHISRFVQLPDIQLSSRLPPLLVVNVQVPLYPASLFQNETDGEGMSFVLYFRLSDGYSKELPPLFIESIRRLVDDHVEKIKAFPMETSIPFRERLKILGRVANLEDLPLSAAERKLMHAYNEKPVLSRPQHEFYLGDNYFEIDIDMHRFSYISRKGFETFLDRLKACVLDVGLTIQGNKAEELPEQILCCVRLNGIDYTKYQQLLTHGA

SEQ ID NO: 82095 - protein, 153 aa, Setaria italica
  Transcript Sequence Number=SeqID_16121
DQLLSSFVSNKHNCTCLPARGLSRKSLAMSESDAEDDFHSVQDDACSLNGFENEAALSTRDGNSGSFKEAAQSGEHHHRKPKSSELSKGSSENGVRTSLSHDDVLSVSGEDSTHGGGRITRNRIRRDLLPNNCLPCIASAVGVNERKELFLEP

SEQ ID NO: 82096 - protein, 135 aa, Setaria italica
  misc_feature (118)..(118): Xaa can be any naturally occurring amino acid
  Transcript Sequence Number=SeqID_16122
MAFTTPAAVLLDENMHIHGGKRADAPRAKPLKPSEKKPGLQERKALQDVSNFAKGTALKDRSVKERSQQRKALQNVTNTIQSKERPTLKEQRSTVKERSDLGKHEVVNPLNILTDEEXKKCHEWAKDGRRAAHFH

SEQ ID NO: 82097 - protein, 93 aa, Setaria italica
  Transcript Sequence Number=SeqID_16123
NSLNLLFTTEDGPTNGVTRAEHGDKRRVEDETFKLGSSSHPCIFPTVGSTVKAAGGVAHRPSVAAVDDVRVPAGRPHVAEHEEHEGDHHGQQE

SEQ ID NO: 82098 - protein, 67 aa, Setaria italica
  Transcript Sequence Number=SeqID_16124
  Subcellular localization annotation: CTP_CleavageSite=27; ConfidenceScore=5.02e-01
CCSVHSVLRITQFSTSDMLTCNSSTCRAISLRNGIILATAHWLSFVLFLFHFKNGNSWFLTPIPQSS

SEQ ID NO: 82099 - protein, 183 aa, Setaria italica
  misc_feature (153)..(153): Xaa can be any naturally occurring amino acid
  Transcript Sequence Number=SeqID_16125
  Gene Ontology: Mol. function=metal ion binding
  Homolog annotation: Hit_ID=B6SV09; Match level="QueryCoverage=97%, HitCoverage=32%, E-value=3e-62, Identity=65%"; Hit description=PHD -finger family protein
VASGPDQNQMSMVPHASNSQQGAYRMLARHWRSWRDTLEGLLQSPAVSQGSGGIQSCIRDALRHNSCQPLENGSLGEGQGREGPRWSEDAAANNGALVKLEDGTAASLEANKAICHNALFDILVSEKFALFCDLLLATFNVNKPDEDVIGLTXIDAKMKNGDYAQNPALLDHDIKQIWKVSLK

SEQ ID NO: 82100 - protein, 104 aa, Setaria italica
  misc_feature (58)..(58): Xaa can be any naturally occurring amino acid
  misc_feature (69)..(69): Xaa can be any naturally occurring amino acid
  Transcript Sequence Number=SeqID_16126
  Gene Ontology: Mol. function=pyridoxal phosphate binding; Biological process=metabolic process
  Homolog annotation: Hit_ID=B9RMS5; Match level="QueryCoverage=81%, HitCoverage=21%, E-value=1e-22, Identity=60%"; Hit description =Trytophan synthase alpha subunit, putative
PHHVARKGGGKGVQVGSSRFHVVRDDLLHPLANGNKARKLDALLPLLRRHGATDIVTXGGCQSAHVAAXRPHILLRGEQLDVPTGYNLISLMFGNVTYASRSVY

SEQ ID NO: 82101 - protein, 159 aa, Setaria italica
  misc_feature (122)..(122): Xaa can be any naturally occurring amino acid
  Transcript Sequence Number=SeqID_16127
  Gene Ontology: Mol. function=pyridoxal phosphate binding; Biological process=metabolic process
  Homolog annotation: Hit_ID=B9RMS5; Match level="QueryCoverage=93%, HitCoverage=33%, E-value=4e-24, Identity=43%"; Hit description =Trytophan synthase alpha subunit, putative
  Subcellular localization annotation: CTP_CleavageSite=59; ConfidenceScore=5.40e-01
MRPTPALAAGGRTVANLLSATEWMLPSPASQVHTISVFPSQSQSPTPRHEFAFSNLTTSLGKGGGKGVQVGSSRFHVVRDDLLHPLANGNKARKLDALLPLLRRHGATDIVTCGGCQSAHVXTAVAVHCAEWGIRPHILLRGEQLDVPTGYNLISLMFG

SEQ ID NO: 82102 - protein, 157 aa, Setaria italica
  Transcript Sequence Number=SeqID_16128
  Gene Ontology: Mol. function=oxidoreductase activity
  Homolog annotation: Hit_ID=B9RD96; Match level="QueryCoverage=100%, HitCoverage=24%, E-value=4e-70, Identity=75%"; Hit description =Oxidoreductase, putative
LVRNEEHFGALQRAMRQDFEWVRPEGCPDSLPLYRLMKGDCQRLAMQISCFQEIASHGCFSLGMVARFEPLLHDKGEWMYPRLFWETGVLGQVLYLEAHAFGISATGIGCYFDDAVHEVLGLRDLEFQSLYHFTVGSPVLDERIMSLPAYPGPGIDA

SEQ ID NO: 82103 - protein, 72 aa, Setaria italica
  Transcript Sequence Number=SeqID_16129
VPSRLRTKKDNESSGVPWSRNRCMIFASGLLSIHASTRELRNLTVWEFVYGIVACRAIPVYTGITLSYFCSG

SEQ ID NO: 82104 - protein, 188 aa, Setaria italica
  misc_feature (18)..(18): Xaa can be any naturally occurring amino acid
  Transcript Sequence Number=SeqID_16130
  Gene Ontology: Mol. function=oxidoreductase activity; Biological process=amino acid metabolic process
  Homolog annotation: Hit_ID=B9RQ63; Match level="QueryCoverage=59%, HitCoverage=17%, E-value=2e-47, Identity=80%"; Hit description =Glutamate dehydrogenase, putative
FSGADLVAVASGHHDTTXPADDHKSLLIPCSQPGAVDGHVQPPPPQPQLAQGEEHEGMLQLPSAHTKKKKKVVKKWREEWADTYKWAYVAVHDNTTRIFCSVCKEYGRKHRRNPYGNEGSRNMQMSALEEHNNSLLHKEALRLQMASKDKLQPPEIERPVYVKALSKTAASILESVLRRDPHEAEFIQ

SEQ ID NO: 82105 - protein, 154 aa, Setaria italica
  Transcript Sequence Number=SeqID_16131
  Gene Ontology: Mol. function=protein binding; Cellular component =intracellular; Biological process=reproduction
  Homolog annotation: Hit_ID=B9S411; Match level="QueryCoverage=90%, HitCoverage=43%, E-value=1e-59, Identity=74%"; Hit description=WD -repeat protein, putative
  Pfam annotation: Domain name=WD40; Domain location=111-151; Score =27.9; E_value=4.1e-05; Accession=PF00400.24; Description=WD domain, G-beta repeat
  Pfam annotation: Domain name=WD40; Domain location=24-62; Score=7.8; E_value=4.7; Accession=PF00400.24; Description=WD domain, G-beta repeat
  Pfam annotation: Domain name=WD40; Domain location=66-107; Score =41.9; E_value=2.5e-09; Accession=PF00400.24; Description=WD domain, G-beta repeat
  Pfam module annotation: Pfam domain module=WD40::WD40::WD40; Domain location=111-151::24-62::66-107
NLLVRVSPIVRVVLSRFWDAKTGACLKTVIDDKKPAVSFSMFSPNGKFILVAALDDSLKLCNFATGKFLKVYSGHVNRVYCIQSAFSVTNGKYIVSGSEDNCVYIWDLQGRNILQKLEGHTDTVISVSCHPTENKIASGGLDNDRTVRLWVQDS

SEQ ID NO: 82106 - protein, 94 aa, Setaria italica
  Transcript Sequence Number=SeqID_16132
  Homolog annotation: Hit_ID=Q259H7; Match level="QueryCoverage=100%, HitCoverage=8%, E-value=7e-31, Identity=71%"; Hit description =H0103C06.10 protein
  Subcellular localization annotation: CTP_CleavageSite=60; ConfidenceScore=5.36e-01
SLELWLKDVALSRFADTKDCLPSLANFFGAPKRILNTSKQKLGSPRSVLLSSQPSSSVSSCNRTSGEQTPRLSPNSHLGEAVKQLAPTNLGLHS

SEQ ID NO: 82107 - protein, 56 aa, Setaria italica
  Transcript Sequence Number=SeqID_16133
  Gene Ontology: Mol. function=zinc ion binding; Cellular component =nucleus
LRSNFQAASSMACAQRGWVNFDLDKIECESCGAHLIFNALMSWSPVEGMFFLGTLL

SEQ ID NO: 82108 - protein, 82 aa, Setaria italica
  Transcript Sequence Number=SeqID_16134
  Gene Ontology: Mol. function=zinc ion binding; Cellular component =nucleus
  Homolog annotation: Hit_ID=Q9SHI0; Match level="QueryCoverage=81%, HitCoverage=7%, E-value=5e-19, Identity=63%"; Hit description =F20D23.9 protein
  Pfam annotation: Domain name=zf-C3HC; Domain location=1-71; Score= -4.9; E_value=7.5e-05; Accession=PF07967.5; Description=C3HC zinc finger-like
NFSLYVLLVANAGEAFAEQLDAAHQNSCPWRGNSCADSLVQLPLTQSALIGGFKDRCDGLLQFTSLPVIASSAIENIEVLYL

SEQ ID NO: 82109 - protein, 911 aa, Setaria italica
  misc_feature (94)..(94): Xaa can be any naturally occurring amino acid
  Transcript Sequence Number=SeqID_16135
  Gene Ontology: Mol. function=zinc ion binding; Cellular component =nucleus
  Homolog annotation: Hit_ID=Q9SHI0; Match level="QueryCoverage=94%, HitCoverage=91%, E-value=0.0, Identity=47%"; Hit description =F20D23.9 protein
  Pfam annotation: Domain name=zf-C3HC; Domain location=53-180; Score =204.8; E_value=2.3e-58; Accession=PF07967.5; Description=C3HC zinc finger-like
  Subcellular localization annotation: CTP_CleavageSite=28; ConfidenceScore=5.03e-01
QFRWCSSPAMQTNIGRQASRVDSSSQVAAHAYHPSHSFDAAGTAMDSAPSCRPWERGDLLRRLATFKPSTWASKPKAASSMACAQRGWVNFDLXKIECESCGAHLIFNALMSWSPVEVANAGEAFAEQLDAAHQNSCPWRGNSCADSLVQLPLTQSALIGGFKDRCDGLLQFTSLPVIASSAIENMRMTRSTQIDRLLSQSITFLSGVLGCKAESTAGVDTHQDSSCSYSQAQKLIGLCGWEPRWLPNVQDCEENSTHSAKNAPSVGPDEPFYPHFVEHNKNSFSASAKKDKGKGKLPLRDSGCSMRSPLLDCSLCGATARMWDFRPVLRPSRLSPNNIDVPETGRKLTLTRGISAASGINEWVNDGVERGQDEGRDEAATNEGKSLSIVGVDLNLTMTGGLPSPRSATPAASERFNNGGMGRDLMIGQPTGSEVGDCETSYESRGPSSRKRNLEEGGSTADNPQDRLHHADSIEGNYIDRDGEEVDDAAQDSDVPSKKSRGFDLFDAYRPSSEAGPSRNLSFDPDVGAGMFSHSRAIDLAVIEHPAARDSTRASSVIAMDTVRTSEEDSMESVEYYPGDGNDIDMPSSSAHRNIEMNDALDLNYSNQAQQSANAHAAAGSDAREIGGSSTNEGEEVINAETAPAFGRDQLSLGISGGSVGMGASHEAEIHGNAASLHRADSVVGDAEPIAELTETMGQTGEFVPEEVNRVEPHGDSQDMVSRSVGQADSGSKIYGCTKADSVESGEKMGHATGIESNMRPSLSCNAGMCAGFDPSKDDVTQAGKILTTDDALMGLDYDPGNGLGATNGENDYESGLLEFDPVKHHNSYCPWVNGIVAAACCNNIGSSSSSSALSGWQLTIDALDTFHSLGQAQNQIMQSDSAASLYMDDQITHNRKLGRRPSVSRSYGKC

SEQ ID NO: 82110 - protein, 162 aa, Setaria italica
  Transcript Sequence Number=SeqID_16136
  Homolog annotation: Hit_ID=B6TSN4; Match level="QueryCoverage=90%, HitCoverage=76%, E-value=2e-71, Identity=91%"; Hit description =Pathogenicity protein PATH531-like protein
  Pfam annotation: Domain name=TB2_DP1_HVA22; Domain location=2-98; Score=61.5; E_value=3.1e-15; Accession=PF03134.11; Description =TB2DP1, HVA22 family
MSTELLTKFLTLLFGYAMPALECFKAIEQRPGRADQLRFWCEYWIILVLLVMFDEIAGVLISKIPMYYELKLAFLVYLWYPKTRGTDIVYETFLQPLVMQYQPNIEARLQYLRANAGDILVFYLKNFTERGYDLFLRALDYVRSQASRGSRTRSFFSFRGDR

SEQ ID NO: 82111 - protein, 74 aa, Setaria italica
  misc_feature (61)..(61): Xaa can be any naturally occurring amino acid
  Transcript Sequence Number=SeqID_16137
  Gene Ontology: Mol. function=aminoacyl-tRNA ligase activity
SEVKVKPKVQSKGPETSQNKVDKPTNATSVDKFVNDVFDIISPLLLSEALKKLDVKKEELXSIIDGIRGRAAPD

SEQ ID NO: 82112 - protein, 99 aa, Setaria italica
  Transcript Sequence Number=SeqID_16138
  Gene Ontology: Mol. function=aminoacyl-tRNA ligase activity
  Homolog annotation: Hit_ID=Q9M3Y5; Match level="QueryCoverage=58%, HitCoverage=24%, E-value=4e-18, Identity=67%"; Hit description=25.7 kDa protein
  Pfam annotation: Domain name=YbaK; Domain location=2-92; Score=0.6; E_ value=0.0084; Accession=PF04073.7; Description=YbaK  prolyl-tRNA synthetases associated domain
VSALAGTKVDMKILSQRLGLGKGGLRMAPEENLLQVLQVPLGCVTPFALINESASTVSLLLDQGFKSKQSCYFHPLTNDVTIGMVQNINASFAYGIPLL

SEQ ID NO: 82113 - protein, 215 aa, Setaria italica
  Transcript Sequence Number=SeqID_16139
  Gene Ontology: Mol. function=aminoacyl-tRNA ligase activity
  Homolog annotation: Hit_ID=Q9M3Y5; Match level="QueryCoverage=93%, HitCoverage=88%, E-value=6e-32, Identity=38%"; Hit description=25.7 kDa protein
ALINESASTVSLLLDQGFKSKQSCYFHPLTNDVTIALSSSNLDKFLISIGKQPAYVNLEDTPAVGKDSPPDLAHLVPSGIPNSSEQPVENTTPTNVPHQNNVPKETEVKVKPKVQSKGPETSQNKVDKPTNATSVDKFVNDVFDIISPLLLSEALKKLDVKKEELSSIIDGIRGRAAPDLESITTSLKNASYTSGFHAGSESMLNHVLNARPSRN

SEQ ID NO: 82114 - protein, 55 aa, Setaria italica
  Transcript Sequence Number=SeqID_16140
EVQQVHLKSTSSIFAFDSHLLLLKPSFRRLGVARLSALFVWCARERLYYPSFLDL

SEQ ID NO: 82115 - protein, 96 aa, Setaria italica
  Transcript Sequence Number=SeqID_16141
SRLMVSCVGCRLMDLELLSFFWFLPSIWARSYSIRKADLTADDEVDQPSGEDNATITNRSHRAASATGCRPPGCAARGALVLRGRLRHHDHGHARR

SEQ ID NO: 82116 - protein, 175 aa, Setaria italica
  misc_feature (91)..(91): Xaa can be any naturally occurring amino acid
  Transcript Sequence Number=SeqID_16142
  Gene Ontology: Mol. function=tRNA (guanine-N7-)-methyltransferase activity; Biological process=tRNA modification
  Homolog annotation: Hit_ID=B9SDA6; Match level="QueryCoverage=79%, HitCoverage=63%, E-value=5e-43, Identity=60%"; Hit description=tRNA (Guanine-n(7)-)-methyltransferase, putative
  Subcellular localization annotation: CTP_CleavageSite=28; ConfidenceScore=5.04e-01
MAWTATATLCCRLIRLPSARRPPPSRARCFATQSPDAVDKEYADLNLRPLYTNRGQHLRIRQHVNPLSSSFSEPTEPPDWKEVFEDPLLPXMVDIGCGSGRFLIWHAKNSGQRRNYLGLEIREKLLERTQFWVNELGLRNIYFMFANATVSFEKIISSYPGPLSLVSILCPDPHF

SEQ ID NO: 82117 - protein, 50 aa, Setaria italica
  Transcript Sequence Number=SeqID_16143
  Gene Ontology: Mol. function=nucleic acid binding; Cellular component= nucleus
  Homolog annotation: Hit_ID=Q2QT65; Match level="QueryCoverage=98%, HitCoverage=10%, E-value=1e-19, Identity=91%"; Hit description=Zinc finger CCCH domain-containing protein 66
  Pfam annotation: Domain name=zf-CCCH; Domain location=13-39; Score =45.4; E_value=2.2e-10; Accession=PF00642.16; Description=Zinc finger C-x8-C-x5-C-x3-H type (and similar)
RESMEHGPFPERIGEPDCSYYMRTGLCRFGATCKFNHPPNRKLAVAAARM

SEQ ID NO: 82118 - protein, 125 aa, Setaria italica
  Transcript Sequence Number=SeqID_16144
  Gene Ontology: Mol. function=nucleic acid binding; Cellular component= nucleus; Biological process=RNA metabolic process
  Homolog annotation: Hit_ID=Q2QT65; Match level="QueryCoverage=77%, HitCoverage=77%, E-value=1e-46, Identity=72%"; Hit description=Zinc finger CCCH domain-containing protein 66
  Pfam annotation: Domain name=zf-CCCH; Domain location=106-125; Score =5.1; E_value=0.32; Accession=PF00642.16; Description=Zinc finger C -x8-C-x5-C-x3-H type (and similar)
  Pfam annotation: Domain name=zf-CCCH; Domain location=61-87; Score =45.4; E_value=2.2e-10; Accession=PF00642.16; Description=Zinc finger C-x8-C-x5-C-x3-H type (and similar)
  Pfam module annotation: Pfam domain module=zf-CCCH::zf-CCCH; Domain location=106-125::61-87
MAAAGAGAGGGGGTGGGEGSSSSPAGVAIGPHHHGSAEEAMWQMTLGGGESMEHGPFPERIGEPDCSYYMRTGLCRFGATCKFNHPPNRKLAVAAARMKGEYPYRVGQPECQYYLKTGTCKFGAT

SEQ ID NO: 82119 - protein, 356 aa, Setaria italica
  Transcript Sequence Number=SeqID_16145
  Gene Ontology: Mol. function=nucleic acid binding; Cellular component= nucleus
  Homolog annotation: Hit_ID=Q2QT65; Match level="QueryCoverage=100%, HitCoverage=86%, E-value=0.0, Identity=81%"; Hit description=Zinc finger CCCH domain-containing protein 66
  Pfam annotation: Domain name=zf-CCCH; Domain location=15-41; Score =42.9; E_value=1.2e-09; Accession=PF00642.16; Description=Zinc finger C-x8-C-x5-C-x3-H type (and similar)
  Pfam annotation: Domain name=zf-CCCH; Domain location=221-247; Score =47.2; E_value=6.4e-11; Accession=PF00642.16; Description=Zinc finger C-x8-C-x5-C-x3-H type (and similar)
  Pfam annotation: Domain name=zf-CCCH; Domain location=267-293; Score =45.5; E_value=2e-10; Accession=PF00642.16; Description=Zinc finger C- x8-C-x5-C-x3-H type (and similar)
  Pfam annotation: Domain name=zf-CCCH; Domain location=61-87; Score =39.4; E_value=1.4e-08; Accession=PF00642.16; Description=Zinc finger C-x8-C-x5-C-x3-H type (and similar)
  Pfam module annotation: Pfam domain module=zf-CCCH::zf-CCCH::zf -CCCH::zf-CCCH; Domain location=15-41::221-247::267-293::61-87
AVAAARMKGEYPYRVGQPECQYYLKTGTCKFGATCKFHHPREKAAIATRVQLNVLGYPIRPNEKECAYYLRTGQCKFASTCKFHHPPPSNTMVAVRGSIYSPGQSATSPGAYPGALTNWTLSRSASFIASPRWPGHSGYAQVIVPQGLVQVPGWTPYAAQMGSSSPDDQQRTPGTNQYYTSSHQSETTGMGEHGMYPSYQAGSVPVGLYAVQGENIFPERPDQPECQFYMKTGDCKFGAVCKFNHPKERLIPAPNCALSPLGLPLRPGEPVCTFYSRYGICKFGPNCKFDHPMGTLMYGTSTSPTGDAPTMHYQLASSPGHSERLLDGGSGRSHRISQSDSQQIPSGNGSTEREAS

SEQ ID NO: 82120 - protein, 86 aa, Setaria italica
  Transcript Sequence Number=SeqID_16146
  Homolog annotation: Hit_ID=Q10H82; Match level="QueryCoverage=45%, HitCoverage=4%, E-value=2e-11, Identity=84%"; Hit description=Nop14 -like family protein, expressed
  Subcellular localization annotation: CTP_CleavageSite=33; ConfidenceScore=5.20e-01
MAKTKPMAAAAAAAGEKKKSKGKKKGKNGPAKVAMKARGAAAAAEERSNPFEAIWSRRKFDVLGKKRKGEEQRVSRSRSEAIRKRE

SEQ ID NO: 82121 - protein, 146 aa, Setaria italica
  Transcript Sequence Number=SeqID_16147
  Gene Ontology: Mol. function=spermidine synthase activity; Biological process=spermidine biosynthetic process
  Homolog annotation: Hit_ID=Q9SMB1; Match level="QueryCoverage=92%, HitCoverage=41%, E-value=5e-73, Identity=94%"; Hit description =Spermidine synthase 1
  Pfam annotation: Domain name=Spermine_synth; Domain location=1-119; Score=2.3; E_value=1.2e-08; Accession=PF01564.9; Description =Sperminespermidine synthase
DVQLLVSTLLRVAFLKNVPEGTYDAVIVDSSDPIGPAQELFEKPFFQSVARALRPGGVVCTQAESIWLHMHIIEDIVANCRQVFKGSVNYAWTTVPTYPSGVIGFMLCSTEGPTVDFQHPVFNIEEDEYSTKSKRPLKFYNSEIHT

SEQ ID NO: 82122 - protein, 335 aa, Setaria italica
  Transcript Sequence Number=SeqID_16148
  Gene Ontology: Mol. function=spermidine synthase activity; Biological process=spermidine biosynthetic process
  Homolog annotation: Hit_ID=Q9SMB1; Match level="QueryCoverage=88%, HitCoverage=91%, E-value=1e-164, Identity=94%"; Hit description =Spermidine synthase 1
  Pfam annotation: Domain name=DUF752; Domain location=149-260; Score= -48.1; E_value=0.076; Accession=PF05430.3; Description=Protein of unknown function (DUF752)
  Pfam annotation: Domain name=Methyltransf_11; Domain location=124 -232; Score=0.6; E_value=0.081; Accession=PF08241.4; Description =Methyltransferase domain
  Pfam annotation: Domain name=Methyltransf_12; Domain location=124 -230; Score=8.0; E_value=0.081; Accession=PF08242.4; Description =Methyltransferase domain
  Pfam annotation: Domain name=Spermine_synth; Domain location=45-290; Score=491.0; E_value=1.6e-144; Accession=PF01564.9; Description =Sperminespermidine synthase
  Pfam module annotation: Pfam domain module=DUF752::Methyltransf _11::Methyltransf_12::Spermine_synth; Domain location=149-260::124 -232::124-230::45-290
MEAEAAAKRARESAEDAVAAGAGAGAEVAGAGTGDQAGISAVIPGWFSEISPMWPGEAHSLKVEKVLFQGKSDYQNVMVFKSSTYGKVLVLDGVIQVTERDECAYQEMITHLSLCSIKDPKKVLVIGGGDGGVLREVSRHSSVEQIDICEIDKMVVDVSKQFFPHLAVGFEDPRVSLNIGDGVAFLKNVPEGTYDAVIVDSSDPIGPAQELFEKPFFQSVARALRPGGVVCTQAESIWLHMHIIEDIVANCRQVFKGSVNYAWTTVPTYPSGVIGFMLCSTEGPTVDFQHPVFNIEEDEYSTKSKGPLKFYNSEIHTASFCLPSFAKRVIEAKAN

SEQ ID NO: 82123 - protein, 74 aa, Setaria italica
  Transcript Sequence Number=SeqID_16149
  Subcellular localization annotation: CTP_CleavageSite=20; ConfidenceScore=5.07e-01
ALSPPPPPSPNHPSSRRLCLLALGPAPLVLLLLLSSQTNHTGEGKANQRLLDLIDPSPRPIWFHSSSVPMPSTL

SEQ ID NO: 82124 - protein, 267 aa, Setaria italica
  misc_feature (257)..(257): Xaa can be any naturally occurring amino acid
  Transcript Sequence Number=SeqID_16150
  Gene Ontology: Mol. function=endonuclease activity; Cellular component=integral to membrane
  Homolog annotation: Hit_ID=Q33A96; Match level="QueryCoverage=91%, HitCoverage=54%, E-value=1e-132, Identity=92%"; Hit description =Endonuclease/exonuclease/phosphatase family protein, putative, expressed
  Pfam annotation: Domain name=Exo_endo_phos; Domain location=30-264; Score=-2.6; E_value=0.0051; Accession=PF03372.15; Description =EndonucleaseExonucleasephosphatase family
MAKKQRREASARRRRDRHHDRWLPRDERCVSCTTFNILAPIYKRMDSENCRESQYRAYWFSRNEKIIDRLLADSSSIICLQEVWLGNDELVDMYQKRLGDANYTLFKLARTNNRGDGLLTAVHSSYFNVLNYRELLFNDFGDRVAQLLHVESAMPVLQNRSTRCVQQQSLIVNTHLLFPHDHSLSVVRLRQVYKILQYIEAYQEENKLGPMPIILCGDWNGSKRGQVYKFLRSQGFVSSYDTAHQYSDGEEDAHKHXWVSHRNHRGN

SEQ ID NO: 82125 - protein, 75 aa, Setaria italica
  Transcript Sequence Number=SeqID_16151
RLASGRPCCLASGRPCAWPPTAPALGLGGVLAVCCLASSCPCCLAPALGLSGVLAVSAGIYKPVLFPIWIFSVPV

SEQ ID NO: 82126 - protein, 73 aa, Setaria italica
  Transcript Sequence Number=SeqID_16152
  Subcellular localization annotation: CTP_CleavageSite=47; ConfidenceScore=5.81e-01
SYSGLPQSHVANTSSSSSSFALTCCRSAPPASCCCMLGALTRLIVVQAQRRASYRQRSRAVSMCRRRSGGHLL

SEQ ID NO: 82127 - protein, 171 aa, Setaria italica
  Transcript Sequence Number=SeqID_16153
  Gene Ontology: Mol. function=protein binding; Biological process =ubiquitin-dependent protein catabolic process
  Homolog annotation: Hit_ID=B9IC61; Match level="QueryCoverage=95%, HitCoverage=51%, E-value=3e-47, Identity=52%"; Hit description=F-box family protein
  Pfam annotation: Domain name=F-box; Domain location=17-64; Score =23.9; E_value=0.00064; Accession=PF00646.25; Description=F-box domain
MGAGSSILGADGEWGETSLGDMPESCVAAVLLYLDPPEICQVARLNRAFRGAASADCVWAVKLPANYRYLAALAAAADDEVRGDGDDNDKRFFLAATKKEIYARLCRPTLFDAGRKEFWILKNKGGLCISISSKAMTITGIDDRRYWSHLATEESRFHSVAYLQQIWWLEV

SEQ ID NO: 82128 - protein, 97 aa, Setaria italica
  Transcript Sequence Number=SeqID_16154
  Gene Ontology: Mol. function=protein heterodimerization activity; Cellular component=microtubule; Biological process=cell division
  Homolog annotation: Hit_ID=Q7XKB3; Match level="QueryCoverage=91%, HitCoverage=9%, E-value=2e-32, Identity=70%"; Hit description =OSJNBa0064G10.18 protein
  Pfam annotation: Domain name=WD40; Domain location=1-37; Score=5.1; E_ value=10; Accession=PF00400.24; Description=WD domain, G-beta repeat
  Pfam annotation: Domain name=WD40; Domain location=41-79; Score=25.2; E_value=0.00027; Accession=PF00400.24; Description=WD domain, G-beta repeat
  Pfam module annotation: Pfam domain module=WD40::WD40; Domain location=1-37::41-79
SEEFVAHASNVNCAKFGRRTSRILITGGEDLQVNLWAVGKPSALLSLSGLTSPVESVSFDSSELTIGAGAASGTIKIWDVEEAKVVRTFTLLIVVIC

SEQ ID NO: 82129 - protein, 237 aa, Setaria italica
  misc_feature (110)..(110): Xaa can be any naturally occurring amino acid
  misc_feature (169)..(169): Xaa can be any naturally occurring amino acid
  Transcript Sequence Number=SeqID_16155
  Gene Ontology: Mol. function=protein heterodimerization activity; Cellular component=microtubule; Biological process=cell division
  Homolog annotation: Hit_ID=Q7XKB3; Match level="QueryCoverage=91%, HitCoverage=25%, E-value=2e-72, Identity=57%"; Hit description =OSJNBa0064G10.18 protein
  Pfam annotation: Domain name=WD40; Domain location=2-40; Score=47.8; E_value=4.2e-11; Accession=PF00400.24; Description=WD domain, G-beta repeat
  Pfam annotation: Domain name=WD40; Domain location=44-82; Score=50.8; E_value=5.3e-12; Accession=PF00400.24; Description=WD domain, G-beta repeat
  Pfam module annotation: Pfam domain module=WD40::WD40; Domain location=2-40::44-82
KVVCIHTYKGHTRRIDVLKFTPDGRWIVSGGADNSVKIWDLTAGKLLHDFSLHEGPVNCLDFHPHEFLLATGSTDKTLKFWDLETFELIGSSGPENSREYFEPASIVRSXMKFNSDGKTLFCGLHQSLKVLSWEPIICHDVVDVGWSTLADLTVDEGKLLGCSYNQNCXLKHEPYADSCAGSHLNGTVDRLIESDNSIPSVFGRLSVSRSPANETSSDTLLERSMSVFLKSKFPCSS

SEQ ID NO: 82130 - protein, 141 aa, Setaria italica
  Transcript Sequence Number=SeqID_16156
LPSQLLKSQARKLQEQKYKTNMNSEHQNNPRPSHPEAGTNSITASEPKYTTQPKPSATPIETSRQELSDLENSDPEFLNRQFTGYVAYRLAWWPSATAAVINSMDTRCGGEKDADCLARSQDPPARGLFAGAKTSPQLLGG

SEQ ID NO: 82131 - protein, 482 aa, Setaria italica
  misc_feature (244)..(244): Xaa can be any naturally occurring amino acid
  Transcript Sequence Number=SeqID_16157
  Gene Ontology: Mol. function=protein heterodimerization activity; Cellular component=microtubule; Biological process=cell division
  Homolog annotation: Hit_ID=Q7XKB3; Match level="QueryCoverage=98%, HitCoverage=53%, E-value=1e-142, Identity=51%"; Hit description =OSJNBa0064G10.18 protein
  Pfam annotation: Domain name=WD40; Domain location=1-37; Score=5.1; E_ value=10; Accession=PF00400.24; Description=WD domain, G-beta repeat
  Pfam annotation: Domain name=WD40; Domain location=124-162; Score =50.0; E_value=9.3e-12; Accession=PF00400.24; Description=WD domain, G-beta repeat
  Pfam annotation: Domain name=WD40; Domain location=166-204; Score =50.8; E_value=5.3e-12; Accession=PF00400.24; Description=WD domain, G-beta repeat
  Pfam annotation: Domain name=WD40; Domain location=216-254; Score =3.2; E_value=17; Accession=PF00400.24; Description=WD domain, G-beta repeat
  Pfam annotation: Domain name=WD40; Domain location=40-78; Score=22.3; E_value=0.002; Accession=PF00400.24; Description=WD domain, G-beta repeat
  Pfam annotation: Domain name=WD40; Domain location=82-120; Score =46.6; E_value=9.7e-11; Accession=PF00400.24; Description=WD domain, G-beta repeat
  Pfam annotation: Domain name=eIF2A; Domain location=7-174; Score= -101.1; E_value=0.0068; Accession=PF08662.3; Description=Eukaryotic translation initiation factor eIF
  Pfam module annotation: Pfam domain module=WD40::WD40::WD40::WD40::WD4 0::WD40::eIF2A; Domain location=1-37::124-162::166-204::216-254::40 -78::82-120::7-174
SEEFVAHASNVNCAKFGRRTSRILITGGEDLQVNLWAVGKPSALLLSGLTSPVESVSFDSSELTIGAGAASGTIKIWDVEEAKVVRTFTGHRSNCASLDFHPFGEFLASGSSDTNMKIWDIRKKRCIHTYKGHTRRIDVLKFTPDGRWIVSGGADNSVKIWDLTAGKLLHDFSLHEGPVNCLDFHPHEFLLATGSTDKTLKFWDLETFELIGSSGPENSREYFEPASIVRSMKFNSDGKTLFCXGLHQSLKVLSWEPIICHDVVDVGWSTLADLTVDEGKLLGCSYNQNCVGVWVVDLMKHEPYADSCAGSHLNGTVDRLIESDNSIPSVFGRLSVSRSPANETSSDTLLERSMSASKEIPVSSSSVVRKRLAKPPGEKDLWLTRSDSAPLLSPRVRLNPNFVDDLKRQPATVVPAAPMYKSMSHISGYGGKESSFIPVLAPRHSSKGNADPILNEAATGELPVIEPQNIEKVGLSANHGKE

SEQ ID NO: 82132 - protein, 94 aa, Setaria italica
  Transcript Sequence Number=SeqID_16158
RFLVASPLEHAGDSRGFRRSSSRFFPINPVEPEPIVCGCCSSFSIVYGCCCSFFLAGFAGPFHLLLNSFRLRSTTVVPPPSFNLFGISVSSSPD

SEQ ID NO: 82133 - protein, 43 aa, Setaria italica
  Transcript Sequence Number=SeqID_16159
YVEKKIPAPSTVNSYTSIGIMDKQSFSLLAFYVVLALLSFEII

SEQ ID NO: 82134 - protein, 121 aa, Setaria italica
  Transcript Sequence Number=SeqID_16160
  Gene Ontology: Mol. function=methyltransferase activity; Cellular component=cytoplasm
  Homolog annotation: Hit_ID=B9S2X8; Match level="QueryCoverage=86%, HitCoverage=23%, E-value=4e-17, Identity=46%"; Hit description=S -adenosyl-methyltransferase mraw, putative
AAAFDADLYGRHGHAHHVPVLLGEVLAAFRRPRSLRSFVDCTVGAAGHSLAMMEAHPEMELYVGMDIDPTALEIGRGHIETFLAGREGNGAEDSSLQGTLRAYTHVKNFKYIKQVLGSVDE

SEQ ID NO: 82135 - protein, 90 aa, Setaria italica
  misc_feature (32)..(32): Xaa can be any naturally occurring amino acid
  Transcript Sequence Number=SeqID_16161
  Gene Ontology: Mol. function=nucleotide binding
  Homolog annotation: Hit_ID=Q7XA40; Match level="QueryCoverage=97%, HitCoverage=9%, E-value=2e-09, Identity=37%"; Hit description =Putative disease resistance protein RGA3
PTCHCDWPAELVREAGTKIADKCGGIPLLLDXLPAYIDYLPTDEFWHRLLDHSPELPHGNVVLECAAASYQHLPADLQSCFLYCSVFPSD

SEQ ID NO: 82136 - protein, 55 aa, Setaria italica
  Transcript Sequence Number=SeqID_16162
  Gene Ontology: Mol. function=DNA binding
  Homolog annotation: Hit_ID=B6T3L8; Match level="QueryCoverage=96%, HitCoverage=19%, E-value=4e-16, Identity=70%"; Hit description =Replication protein A 32 kDa subunit
  Pfam annotation: Domain name=RPA_C; Domain location=1-50; Score=-2.6; E_value=0.023; Accession=PF08784.3; Description=Replication protein A C terminal
IFNEPANIESEHGVHIDEIIKRFKLPESKIREAIVYNADVGHIYSTIDDFHYKAA

SEQ ID NO: 82137 - protein, 198 aa, Setaria italica
  Transcript Sequence Number=SeqID_16163
  Gene Ontology: Mol. function=nucleic acid binding; Cellular component= nucleus; Biological process=DNA replication
  Homolog annotation: Hit_ID=B6T3L8; Match level="QueryCoverage=97%, HitCoverage=70%, E-value=4e-87, Identity=78%"; Hit description =Replication protein A 32 kDa subunit
  Pfam annotation: Domain name=RPA_C; Domain location=81-190; Score =119.8; E_value=9e-33; Accession=PF08784.3; Description=Replication protein A C terminal
ERTTDVSFTLDDGTGRLDFIRWVNDASDSSETAAIQNGMYVSVIGSLKGLQERKRATAFSIRPITDFNEVTLHFIQCVRMHIENTKSKVGSPARTNSSMGLSVSNGFSESSTPTSLKSNPAPVTGGANGNDTDLNTQVLNIFREPANIESEHGVHIHEIVKRLKLPEEKIREAIVYNEDCGHIYSTIDDFHFKSALTD

SEQ ID NO: 82138 - protein, 441 aa, Setaria italica
  Transcript Sequence Number=SeqID_16164
  Gene Ontology: Mol. function=zinc ion binding; Cellular component =intracellular
  Homolog annotation: Hit_ID=B7QCH3; Match level="QueryCoverage=20%, HitCoverage=28%, E-value=1e-11, Identity=31%"; Hit description=Zinc finger protein, putative (Fragment)
  Subcellular localization annotation: CTP_CleavageSite=20; ConfidenceScore=5.02e-01
DHLIIADLPVAKSLGAVTTSAAAAARAIGRRSRRPLGERVHICSRCEFPIAIYGRLIPCEHAFCLTCARSDSSCYLCDERIQKIQSVKMMEGIFICAAPMCLKSFLKKADFESHVPEAHANLLQTNVEKEERNESDAPNISRASAGDTQRQSQMPEMSTARAPPRPGVSPTSTPHMQDREERSRYHQSREQTPLRPPMLSKPPSFHGRHSYPSGDTQAENNPPQGFDRYNWASQSRQESPGAATPLRQEPDHSTQDKQQLMANAPFMFPPIPPHQANFMMPMNMNQPMIPNAPFNYPLQQDGNPQYFAAPFQMQLQDTGSDQGSMSGVQPPGGPMSFPEGLQRPWAMGLMGGPFQSMALGQGMADGAGDPQGGGGMAFMQAGFGGIPDGSMNPGMSDRGDGRGVLAQMPMQMQMQMQMQMSLPPPPPTQPPSGSQQSFNRT

SEQ ID NO: 82139 - protein, 44 aa, Setaria italica
  Transcript Sequence Number=SeqID_16165
RLGLHALTTYPLGNHKQDNGKVLIKINVYALNDDEKSMRKILHN

SEQ ID NO: 82140 - protein, 100 aa, Setaria italica
  Transcript Sequence Number=SeqID_16166
  Gene Ontology: Mol. function=binding
WVKVPFLFIFLFFFLLGPKLCCKNPKHASEGIKFANKAMKSFRSCDMHFISIVNHFLGVCYGPFSRSSTSHLDKSRLQDDALRLLQDAAAMAEYNPEILY

SEQ ID NO: 82141 - protein, 90 aa, Setaria italica
  Transcript Sequence Number=SeqID_16167
  Homolog annotation: Hit_ID=B6SVR7; Match level="QueryCoverage=100%, HitCoverage=13%, E-value=2e-21, Identity=64%"; Hit description =Protein kinase PVPK-1
QHAKHHHPGTAPHTRFRSQVQVLEAPLDPGSDPEYQDFQFRFVPEVFELQMGGVGGGGCGGRNGDGKAAEKVLGFEFDKVRISIASSDDE

SEQ ID NO: 82142 - protein, 152 aa, Setaria italica
  Transcript Sequence Number=SeqID_16168
  Gene Ontology: Mol. function=molecular_function; Cellular component =plasma membrane; Biological process=biological_process
  Homolog annotation: Hit_ID=B6T3F0; Match level="QueryCoverage=100%, HitCoverage=85%, E-value=1e-39, Identity=61%"; Hit description=DC2 protein
  Pfam annotation: Domain name=DUF2055; Domain location=4-147; Score =269.5; E_value=7.6e-78; Accession=PF10219.1; Description=Predicted membrane protein (DUF2055)
  Subcellular localization annotation: CTP_CleavageSite=32; ConfidenceScore=5.22e-01
DPLFHLLRVLPFSFLRPPRTRLRLPSNLALPSPMTVFSLILLTYFAVVSGLVYDVIVEPPGIGSAQDPATGAVRPVVFLPGRVNGQYIIEGLSSGFMFLLGGIGIILLDLAADRTRPRSLRVSFGGSGAVAVVIAYAMAMLFLRIKIPGYLW

SEQ ID NO: 82143 - protein, 137 aa, Setaria italica
  Transcript Sequence Number=SeqID_16169
RSGAAGRWHGRRHRSGAPADGRGAGGGQERRRMSGMAECRGGGGAVDPLRDVKPRRGHVGADGLVLPHAMVGAPRHNAAVRESGLPPTILSTRSIRTQYSSNINQVKHGVDFPYLGEQGTRRWRMAGVAELGTGGTW

SEQ ID NO: 82144 - protein, 83 aa, Setaria italica
  Transcript Sequence Number=SeqID_16170
  Gene Ontology: Mol. function=metal ion binding; Cellular component =cellular_component
  Homolog annotation: Hit_ID=B9SMC2; Match level="QueryCoverage=100%, HitCoverage=31%, E-value=1e-31, Identity=71%"; Hit description =Protein binding protein, putative
AAKEYDLHLLPWASVAACISEAGLEDTVLRQGHAFCFLPLPVRTGLSVHVNGYFEVSSNRRDIWYGADMDRGGKLRSDWNRLL

SEQ ID NO: 82145 - protein, 153 aa, Setaria italica
  Transcript Sequence Number=SeqID_16171
  Homolog annotation: Hit_ID=B9RRB9; Match level="QueryCoverage=92%, HitCoverage=19%, E-value=5e-25, Identity=45%"; Hit description =Suppression of tumorigenicity, putative
MVDKNDGSEGLKFNTSHLIQTTEEVARAFIAAASAATTQSTRPSVVYSSKDESGSPMQKLQQQFSKIMKGFSSSPDLSGPYNPEVLTTQKRQWSRFQLKSLGNRCIREPSHLFESIVIVGLPPQADIHELENIALGRNDEDGKRSRNLFSNSH

SEQ ID NO: 82146 - protein, 83 aa, Setaria italica
  Transcript Sequence Number=SeqID_16172
SFSLRLYAGWNLSAVHVHAWFSTLGPDRRYIILFNVEKVTEKGEENRMLSGTSTIIGFPPDPDVWYLVQEQLGVCLVYLKVLI

SEQ ID NO: 82147 - protein, 338 aa, Setaria italica
  Transcript Sequence Number=SeqID_16173
  Gene Ontology: Mol. function=DNA binding
  Homolog annotation: Hit_ID=B4FK82; Match level="QueryCoverage=100%, HitCoverage=100%, E-value=1e-136, Identity=74%"; Hit description=Myb- like DNA-binding domain, SHAQKYF class family protein
  Pfam annotation: Domain name=Myb_DNA-binding; Domain location=101 -148; Score=51.3; E_value=3.7e-12; Accession=PF00249.23; Description =Myb-like DNA-binding domain
MPQDSRPAGMRLFGVTIAPAPPPAPEADPPDRDPSPNPPVAVREDVMRKCKSMGNLAALGAGADAVGAGADGVGAGDGYLSDGGLMQSSGKRRRAQERKKAVPWTEEEHRTFLAGLEKLGKGDWRGIAKNFVTTRTPTQVASHAQKYFLRQTNPNKKKRRSSLFDMMPSELSPVPNCPILPSSMAKVHDVVAMTRQLQNSNLEGGSSSNAANIAPQVGRDLPPVPSFRATNIDSSVSKLNHMEPLWRTPYPFRPIPRAPDGTSSSTSVAANIASPDAKANLTACTSTFLSPRSDTSSVPPKADPPAEMKDLELTVATPSQQNMTNMSSQNAVGVIQVI

SEQ ID NO: 82148 - protein, 62 aa, Setaria italica
  Transcript Sequence Number=SeqID_16174
  Subcellular localization annotation: CTP_CleavageSite=34; ConfidenceScore=5.68e-01
STPCSQLSPISTPPPRSPQAKRGRGCFTPRSSPRAPYKRHRATLPDHSPASISSNSGGGERR

SEQ ID NO: 82149 - protein, 165 aa, Setaria italica
  misc_feature (62)..(62): Xaa can be any naturally occurring amino acid
  Transcript Sequence Number=SeqID_16175
  Gene Ontology: Mol. function=dUTP diphosphatase activity; Cellular component=cytosol; Biological process=dUTP metabolic process
  Homolog annotation: Hit_ID=Q10FF9; Match level="QueryCoverage=92%, HitCoverage=88%, E-value=9e-74, Identity=92%"; Hit description =Deoxyuridine 5'-triphosphate nucleotidohydrolase, putative, expressed
  Pfam annotation: Domain name=dUTPase; Domain location=34-164; Score =193.4; E_value=6.4e-55; Accession=PF00692.11; Description=dUTPase
MAAPNGAAATDAVHEPPQKISKIAPLLKVKKLSDKAVLPSRGSALAAGYDLSSAAEMVVPAXRGKALVPTDLTIAIPEGTYARVAPRSGLALKHSIDVGAGVIDADYRGPVGVILFNHSDVDFAVKPGDRIAQMIIEVIATPEVAEVEDLDATVRGEGGFGSTGV

SEQ ID NO: 82150 - protein, 60 aa, Setaria italica
  Transcript Sequence Number=SeqID_16176
  Subcellular localization annotation: CTP_CleavageSite=31; ConfidenceScore=5.39e-01
HPPNPSMYIFVHACCNSVPLGLLAPFSTGVRSSSFFSLGFLSFTGCIDQSSIRGQVIIKW

SEQ ID NO: 82151 - protein, 85 aa, Setaria italica
  Transcript Sequence Number=SeqID_16177
  Gene Ontology: Mol. function=hydrolase activity, acting on ester bonds; Biological process=lipid metabolic process
MRVSVAALLVVVVVLHVADATVLRPQKLLFPAIFSFGDSYADTGNYIIEVDPRPFNFSPYGDTLGRPTGRASDGLLPVEFVANAV

SEQ ID NO: 82152 - protein, 38 aa, Setaria italica
  Transcript Sequence Number=SeqID_16178
DELMEPAIGILNIQPLLFMKMCVICRQIHGSCTQCYRC

SEQ ID NO: 82153 - protein, 838 aa, Setaria italica
  misc_feature (334)..(334): Xaa can be any naturally occurring amino acid
  Transcript Sequence Number=SeqID_16179
  Gene Ontology: Mol. function=histone-lysine N-methyltransferase activity; Cellular component=nucleus; Biological process=chromatin modification
  Homolog annotation: Hit_ID=B9I5A8; Match level="QueryCoverage=95%, HitCoverage=76%, E-value=0.0, Identity=56%"; Hit description=SET domain protein (Fragment)
  Pfam annotation: Domain name=PHD; Domain location=235-288; Score =24.3; E_value=5.7e-05; Accession=PF00628.21; Description=PHD-finger
  Pfam annotation: Domain name=PHD; Domain location=426-475; Score =37.0; E_value=7.7e-08; Accession=PF00628.21; Description=PHD-finger
  Pfam annotation: Domain name=PWWP; Domain location=45-132; Score=8.5; E_value=0.0022; Accession=PF00855.9; Description=PWWP domain
  Pfam annotation: Domain name=SET; Domain location=707-837; Score =173.2; E_value=7.5e-49; Accession=PF00856.20; Description=SET domain
  Pfam module annotation: Pfam domain module=PHD::PHD::PWWP::SET; Domain location=235-288::426-475::45-132::707-837
MLRRYYEEDDEEDEDDEEDEEDEEEEDEEYEYEEEEKDALLCTEEFVYGDIVWAKLGKRQPMWPGVVVDPTQEAAAEALPPQPRGVSVLCVMLFGWCTEFSDEKKYVWVKQGLIFPFVDYMDRFQGQTELSSCKPADFQRAVEEAFLADQGFSEVPMDCSTKGQPVVCHTFPDDLREVTGSNELECQPQIKRYRRALQCESCGNCFPNKDANKMVYVMEQLACRPCSRILRSKQYCGICLKSLQHKYGVRWVCCHGCESWVHAECDEICSNLKDLRDTSYCCPYCRVKLNSSLPGKTAKFSDVKKDSSAQKGSKPDKVALVCFDMEGTYLPDLXELISCHCGPCKGQKFLFNEWERHAGCRSKNWRSSIKLKGSLTPFGKWIDRHQPGVCPTNPSKRSSQKMKKQKLIDLLNDPYDPVNVKWTTERCAVCRWVEDWDYNKIVICNRCQIAVHQECYGVRGKQDFTSWVCRACEKPEQKRECCLCPVRGGALKPTNVDNLWVHVTCAWFQPQVAFASDELMEPAIGILNIQPLLFMKMCVICRQIHGSCTQCYRCSTYYHAICASRAGYQMELHCLEKNGKQTTKKISYCAQHRNPNPDNVLIIQTSAGTFSSKKLVQSNGKVAASRLIRKDVPMESPSEVEISENLSAARCRVYVRKDLKRSREGAIAHRVRGPCQHRWDEIDNLNPPREERDPESFSTFKERLRYLQKTEHSRVCFGRSGIHRWGLFARRDIQEGEMVLEYRGEQVRRSVADLREEKYRVQGKDCYLFKISEEVVVDATDKGNVARLINHSCTPNCYARIMSVGHDESRIVLIAKKNVRAGDELTYDYLFDPDEADE

SEQ ID NO: 82154 - protein, 103 aa, Setaria italica
  Transcript Sequence Number=SeqID_16180
  Subcellular localization annotation: CTP_CleavageSite=49; ConfidenceScore=5.30e-01
GRMASSSSLSFLICVYTLVGLPSIGGPALSSDSSLSFLICVYTLVGLPSASRKPDQRAGRMASSSSLSFLICVYTLVGLPSIGGPALSYDCNCIDIYTWHKCR

SEQ ID NO: 82155 - protein, 80 aa, Setaria italica
  Transcript Sequence Number=SeqID_16181
LSDLCVYACWAAVHRRPCFILGTKCRCNYSHRIKQGRRWTAAQQAYTQLDQKAKRGRRGHPAGSLVRFPHADGRLELGCR

SEQ ID NO: 82156 - protein, 133 aa, Setaria italica
  Transcript Sequence Number=SeqID_16182
  Subcellular localization annotation: CTP_CleavageSite=49; ConfidenceScore=5.55e-01
SSPPSPPPPSPPPVSPPPPSPPPPSPPPSPPPHSPPPPAPVHRPPPPPPAPHYPPCPILPPPPPCTPTHPWPPPSYPGPLPPTDPVRYASPPPPPHYPGPLPPTYPVGYASPPPPHHQDPWPSVHPVQYGSPP

SEQ ID NO: 82157 - protein, 134 aa, Setaria italica
  Transcript Sequence Number=SeqID_16183
  Gene Ontology: Mol. function=ATPase activity, coupled to transmembrane movement of substances; Cellular component=integral to membrane; Biological process=transport
  Homolog annotation: Hit_ID=Q8GU57; Match level="QueryCoverage=100%, HitCoverage=10%, E-value=1e-30, Identity=57%"; Hit description =Peroxisomal membrane protein ABC transporter homologue
MPSLQLLQLTDRGRGLLASRRRTLAVVSGALIAGGALAYARSSQSQRSRRSEANYGSEASELATNGDGLSQNCRLAATKQKKSGLKSLHFLTAILLKKIGPNGTRYLLGLVLTAVLRTAVGHRLAKVQGLFVKA

SEQ ID NO: 82158 - protein, 83 aa, Setaria italica
  Transcript Sequence Number=SeqID_16184
  Gene Ontology: Mol. function=protein serine/threonine kinase activity; Cellular component=plasma membrane; Biological process =protein amino acid phosphorylation
  Homolog annotation: Hit_ID=A0PIF5; Match level="QueryCoverage=100%, HitCoverage=26%, E-value=5e-19, Identity=60%"; Hit description=MSP1 (Fragment)
  Pfam annotation: Domain name=LRR_1; Domain location=17-39; Score=9.4; E_value=4.8; Accession=PF00560.25; Description=Leucine Rich Repeat
  Pfam annotation: Domain name=LRR_1; Domain location=41-63; Score =15.1; E_value=0.3; Accession=PF00560.25; Description=Leucine Rich Repeat
  Pfam annotation: Domain name=LRR_1; Domain location=65-83; Score=3.7; E_value=61; Accession=PF00560.25; Description=Leucine Rich Repeat
  Pfam module annotation: Pfam domain module=LRR_1::LRR_1::LRR_1; Domain location=17-39::41-63::65-83
SNSLVGPIPNEITHLKMLERLALGFNHFTGGIPKEIGNMKHLKELSLTECSLSGTIPWSIGGLRSLVELDISGNDFNSELPAS

SEQ ID NO: 82159 - protein, 805 aa, Setaria italica
  misc_feature (692)..(692): Xaa can be any naturally occurring amino acid
  Transcript Sequence Number=SeqID_16185
  Gene Ontology: Mol. function=protein binding; Cellular component =nucleus
  Homolog annotation: Hit_ID=Q5ZAW5; Match level="QueryCoverage=81%, HitCoverage=87%, E-value=0.0, Identity=72%"; Hit description=Breast carcinoma amplified sequence 3-like protein
  Pfam annotation: Domain name=WD40; Domain location=218-252; Score =2.3; E_value=21; Accession=PF00400.24; Description=WD domain, G-beta repeat
  Pfam annotation: Domain name=WD40; Domain location=395-434; Score =14.9; E_value=0.34; Accession=PF00400.24; Description=WD domain, G -beta repeat
  Pfam annotation: Domain name=WD40; Domain location=453-491; Score =3.9; E_value=14; Accession=PF00400.24; Description=WD domain, G-beta repeat
  Pfam module annotation: Pfam domain module=WD40::WD40::WD40; Domain location=218-252::395-434::453-491
AWGLLCSVLHLRRRGGRCVGSVHGWFFWSPGFMRDGAQAPGGGGGGFFSARSLSNYIRIVSSGASTAASTLRSAGASLVNSIASHDEDGSRDQVQWAGFDKLECGGGVVRQVLLLAYKSGFQVWDVENADDVRQLESRHDGAVSFIQLLKDPIFTTKSQDRFADARPLLALACEGNYTGSGNNHDTNVPVFDGTNGAFHNTGSENLPTVIRFYSLRTHEYVHTLRFRSAVYSIRCSPRVVAVSQATQIHCFDAATMEREYTVLTSPTVAQISGYGPLGLGHRWIAYSGIPVPVPDTGRVSPQLLSPSPFVPPPGSNGSVVAYYAKESSKQLAAGIVTLGDVGYKKLSKYCADFIPNGNGMVKQRSSIYKANGAINGHLIDSEYAGMVIVRDIVSKLLIVQFRAHTSPISALCFDPSGTLLVTASVHGQNINVFRIIPPPHGTSEAGQIGTYVHLYKLQRGITNAVIKDISFSDDSEWIMISSSRGTSHLFSISPYSGSTRFRYSDNNPAENDYVVDSSSVNHTAHWSQKSTPSLSLSQKTLFVSGPPLTLSVVSRIRNGSNLFKGAVHGAAAFATGASSPISGAIASTFHNCKDADLNSDSSRTKYYLLVFSPSGSIIQYVLHLSTEQDSGFDFPTGPISYGSERETDTKFVIEALQKWDVCHKRNRRDSAESFAYNDFENGENNKLFQKVXKKGTSIYPFDSAAAERPKLSADENRNFYISQSELQTHVVQTPLWSRSGIHFQVMEGETLEADNLDITSGEVEVEKIQTHNIESRSKNLVPVFDSLHTSRFQQTRMNTPDNNRY

SEQ ID NO: 82160 - protein, 170 aa, Setaria italica
  Transcript Sequence Number=SeqID_16186
  Homolog annotation: Hit_ID=Q5ZAW5; Match level="QueryCoverage=100%, HitCoverage=22%, E-value=1e-57, Identity=65%"; Hit description =Breast carcinoma amplified sequence 3-like protein
VCNSLWSRSGIHFQVMEGETLEADNLDITSGEVEVEKIQTHNIESRSKNLVPVFDSLHTSRFQQTRMNTPDNNRYELLQRQKSGISEDGRLSRRSSCSSLDCMSEGPKSSDDGGFSKYVVDDSSAAVNNNPSVKLHTELVNNTGSLKSEAQLGFVHSKGDGEDEEQLPDL

SEQ ID NO: 82161 - protein, 126 aa, Setaria italica
  Transcript Sequence Number=SeqID_16187
  Subcellular localization annotation: CTP_CleavageSite=80; ConfidenceScore=5.67e-01
SGHPSSTPHGFRRDPGEVGKKRKRNRLISSSFTASLSSSPPQKFPHFLRSRSAPSSPESPAPGFAGPLAASLGGTGRSVRARIRGGAVVRAGNALPQAAGRRGFRVPAGGCCCGGAVICPHRRMRD

SEQ ID NO: 82162 - protein, 84 aa, Setaria italica
  Transcript Sequence Number=SeqID_16188
  Gene Ontology: Cellular component=integral to membrane
  Homolog annotation: Hit_ID=O04091; Match level="QueryCoverage=57%, HitCoverage=8%, E-value=8e-18, Identity=79%"; Hit description =Endomembrane protein EMP70 precusor isolog; 68664-64364
MLPSSRAARGRGLGLGCLLLGLALTLASLLALAAASEADHKYKAEEPVKLWVNKVGPYNNPQETYNYYSLPFCQLSENPIHKWG

SEQ ID NO: 82163 - protein, 159 aa, Setaria italica
  misc_feature (61)..(61): Xaa can be any naturally occurring amino acid
  misc_feature (102)..(102): Xaa can be any naturally occurring amino acid
  Transcript Sequence Number=SeqID_16189
  Gene Ontology: Mol. function=binding; Cellular component=integral to membrane
  Homolog annotation: Hit_ID=B9SXF5; Match level="QueryCoverage=84%, HitCoverage=22%, E-value=1e-61, Identity=85%"; Hit description =Endomembrane protein emp70, putative
  Pfam annotation: Domain name=EMP70; Domain location=2-159; Score= -294.6; E_value=0.00011; Accession=PF02990.8; Description =Endomembrane protein 70
LFQLVPNCALFVRRGAIITTFIVCYALTSFISGYVSGGLYSRNGGKNWIKAMILTASLFHXLCFSIGFALNTIAIFYRSLAAIPFGTMVVMFVLWAFISFPXVLLGTVVGRNWSGAPNNPCRVKTIPRPIPEKKWYLTPSVILRLYWVGTCLSLLVLSS

SEQ ID NO: 82164 - protein, 50 aa, Setaria italica
  Transcript Sequence Number=SeqID_16190
LTLNHTGGRSPSVYSFLAYLFPPWNCPDKCIPISWGISLEDWKVHVGSFL

SEQ ID NO: 82165 - protein, 180 aa, Setaria italica
  Transcript Sequence Number=SeqID_16191
  Gene Ontology: Mol. function=binding; Cellular component=integral to membrane
  Homolog annotation: Hit_ID=B9SXF5; Match level="QueryCoverage=99%, HitCoverage=29%, E-value=7e-69, Identity=73%"; Hit description =Endomembrane protein emp70, putative
  Pfam annotation: Domain name=EMP70; Domain location=1-138; Score= -233.0; E_value=7.1e-07; Accession=PF02990.8; Description =Endomembrane protein 70
LLMGTVVGRNWSGAPNNPCRVKTIPRPIPEKKWYLTPSVISLMGGLLPFGSIFIEMYFVFTSFWNYKVYYVYGFMLLVFVILIIVTICVTIVGTYFLLNAENYHWQWTSFFSAASTALYVYLYSIYYYHVKTKMSGFFQTSFYFGYTLMFCLGLGILCGAIGYVGSTLFVRRIYRNIKCD

SEQ ID NO: 82166 - protein, 586 aa, Setaria italica
  Transcript Sequence Number=SeqID_16192
  Gene Ontology: Mol. function=binding; Cellular component=integral to membrane
  Homolog annotation: Hit_ID=B9SXF5; Match level="QueryCoverage=96%, HitCoverage=94%, E-value=0.0, Identity=74%"; Hit description =Endomembrane protein emp70, putative
  Pfam annotation: Domain name=EMP70; Domain location=52-544; Score =976.8; E_value=9.2e-291; Accession=PF02990.8; Description =Endomembrane protein 70
MLRRGVLLLVAVLLAVARLPHAYASEADHKYKAEEPVKLWVNKVGPYNNPQETYNYYSLPFCQPSENPTHKWGGLGEVLGGNELIDSQIDIKFLRNVDKGFICTIELDAQKVQQFADAIENSYWFELFIDDLPLWGFVGETDKNSENKHYLYTHKNILVKYNENRIIHVNLTQESPKLLEAGKKLDMTYSVKWVATDVSFARRFEVYLDYPFFEHQIHWFSIFNSFMMVIFLTGLVSMILMRTLRNDYAKYAREDDDLESLERDVNEESGWKLVHGDVFRPPRGLMFLSALVGIGTQLAALILLVIVLAIVGMLYVGRGAIITTFIVCYALTSFISGYVSGGLYSRNGGKNWIKAMVLTASLFPFLCFSIGFALNTIAIFYRSLAAIPFGTMVVMFVLWAFISFPLVLLGTVVGRNWSGAPNNPCRVKTIPRPIPEKKWYLTPSVISLMGGLLPFGSIFIEMYFVFTSFWNYKVYYVYGFMLLVFVILLIVTICVTIVGTYFLLNAENYHWQWTSFFSAASTALYVYLYSIYYYHVKTKMSGFFQTSFYFGYTLMFCLGLGILCGAVGYLGSTLFVRRIYRNIKCD

SEQ ID NO: 82167 - protein, 91 aa, Setaria italica
  Transcript Sequence Number=SeqID_16193
SLPAAFLEENYYCHPVATEALVKAPRRVTRRADCRTNPLPGRFRSGRLSLVEEEVVAPFASSSSLVELGLFPSGKKVLKKRSKNNNRNTYN

SEQ ID NO: 82168 - protein, 66 aa, Setaria italica
  Transcript Sequence Number=SeqID_16194
MEDRAPLLLPQYTLREEKCGGAGTGDERWRRDLAREAGKVGYVALPMAAVSVSQYAVQVASNMMVG

SEQ ID NO: 82169 - protein, 211 aa, Setaria italica
  Transcript Sequence Number=SeqID_16195
  Gene Ontology: Mol. function=nucleoside-triphosphatase activity
  Homolog annotation: Hit_ID=Q8H6B2; Match level="QueryCoverage=83%, HitCoverage=14%, E-value=5e-86, Identity=86%"; Hit description =Bromodomain protein 103
DGDDDEVDGGDEAEADGDDEDGEEEQEGRRRYDLRDRSEVRRPSPRKEGKHRPQSPRRVLVHGIGPKNNKYLKKGGSRMHKRPRFSLPDDSDDSLLVDEPDEGPSMPWMRSGRGGMPWLMGGLDMHSPAAWGLNVGASGWGHQGDSSTSLMPGVQTAGPSSKGGADIQPLQVDESVSFKDIGGLSEYIDALKEMVFFPLLYPDFSETRKRG

SEQ ID NO: 82170 - protein, 286 aa, Setaria italica
  misc_feature (158)..(158): Xaa can be any naturally occurring amino acid
  Transcript Sequence Number=SeqID_16196
  Gene Ontology: Mol. function=DNA binding; Cellular component=nucleus; Biological process=regulation of transcription
  Homolog annotation: Hit_ID=B6SVM7; Match level="QueryCoverage=99%, HitCoverage=62%, E-value=8e-38, Identity=71%"; Hit description =Transcription factor ZmGLK1
  Pfam annotation: Domain name=Myb_DNA-binding; Domain location=183 -233; Score=44.8; E_value=3.4e-10; Accession=PF00249.23; Description =Myb-like DNA-binding domain
MLEVSSLRSPSKAADQRGFVGDHVGFPTSAGTDDFMVDDNLLDYIDFSSCCDMPFFDADGDILPDLEVDPTESLLAEFSSPETSPAAADGGGGAEAKPPDEKQEQVAAKTAAAEETKADDDEKAAAGGVVVTRKRNGDEVTTTEEDSAGAGAGSGHQXSAAAGGHSKKKASAGKDSNGKRKVKVDWTPELHRRFVQAVEQLGIDKAVPSRILEIMGIEGLTRHNIASHLQKYRSHRKHLMAREAEAATWAQKRQLYAAAPVARKVEAAAAAGPPWVVPTIGFPPPP

SEQ ID NO: 82171 - protein, 46 aa, Setaria italica
  Transcript Sequence Number=SeqID_16197
LLHTKHNVKQASYSLETNSIIACILFTSHQHIFSSLLFSPDIPNPQ

SEQ ID NO: 82172 - protein, 98 aa, Setaria italica
  Transcript Sequence Number=SeqID_16198
  Gene Ontology: Cellular component=endoplasmic reticulum
  Homolog annotation: Hit_ID=B6T616; Match level="QueryCoverage=74%, HitCoverage=28%, E-value=3e-28, Identity=83%"; Hit description=Seed maturation protein
  Pfam annotation: Domain name=Reticulon; Domain location=1-92; Score= -23.7; E_value=0.0043; Accession=PF02453.9; Description=Reticulon
VVLLIVRSPPNIPEVKISEDVAVNVALSLRYEINRGFATLREIGHGRDLKKFLIVIAGFWLLSVLGSCCNFLTLFYIGNDCVPYAPQIFLNSFDANYE

SEQ ID NO: 82173 - protein, 73 aa, Setaria italica
  misc_feature (64)..(64): Xaa can be any naturally occurring amino acid
  Transcript Sequence Number=SeqID_16199
  Gene Ontology: Cellular component=endoplasmic reticulum
  Homolog annotation: Hit_ID=B3TLV6; Match level="QueryCoverage=83%, HitCoverage=24%, E-value=2e-12, Identity=59%"; Hit description=24 kDa seed maturation protein
  Pfam annotation: Domain name=Reticulon; Domain location=13-73; Score=- 42.2; E_value=0.084; Accession=PF02453.9; Description=Reticulon
WTDAIFVKNAIAAADLVLWRNKKISGGVLASATAIWLLFEVMEYHLLTLVCHCLILSLAILFLXSNASTFINK

SEQ ID NO: 82174 - protein, 131 aa, Setaria italica
  Transcript Sequence Number=SeqID_16200
  Gene Ontology: Mol. function=protein serine/threonine kinase activity; Cellular component=plasma membrane; Biological process =protein amino acid phosphorylation
  Homolog annotation: Hit_ID=Q00RM8; Match level="QueryCoverage=75%, HitCoverage=10%, E-value=1e-43, Identity=84%"; Hit description =H0814G11.12 protein
QMHLSSGVISPEMVDPRIKSGVDMDQLHLVIGIVQWCTQREGRQRPSIRQVLRMLSERLDPGNGSFGEGMEDAEGGFYPRSSKSGAQHRNELIPHSGDMRSLHSSSSTTRSYCSRSMLLESGQTQSPPETL

SEQ ID NO: 82175 - protein, 111 aa, Setaria italica
  Transcript Sequence Number=SeqID_16201
  Gene Ontology: Mol. function=nucleic acid binding
  Homolog annotation: Hit_ID=A0SPK3; Match level="QueryCoverage=78%, HitCoverage=14%, E-value=5e-41, Identity=88%"; Hit description =Marker Xucw84
  Pfam annotation: Domain name=RRM_1; Domain location=26-89; Score =20.9; E_value=0.0023; Accession=PF00076.14; Description=RNA recognition motif. (a.k.a. RRM, RBD, o
MAVAAASTGGEGGAVEGSGTGALLRIFVGGLAESVGAADLEAVFASAGRVAGVEFVRTNGRSFAYVDFHCPSDKALAKLFSTYNGCKWKGGKLRLEKAKEHYLTRLKREWE

SEQ ID NO: 82176 - protein, 111 aa, Setaria italica
  Transcript Sequence Number=SeqID_16202
  Gene Ontology: Cellular component=plasma membrane
NAGHTSKPSSSIPLRVPTFHASLQGPWYSVLAYDACVRLCLHAWARGCMEAPVFLENECTLLRNTFSLQNVLLQSEEELMSKRASELVSEGAASKPKKTIGKMKVRHKLLF

SEQ ID NO: 82177 - protein, 298 aa, Setaria italica
  misc_feature (7)..(7): Xaa can be any naturally occurring amino acid
  misc_feature (26)..(26): Xaa can be any naturally occurring amino acid
  misc_feature (44)..(44): Xaa can be any naturally occurring amino acid
  misc_feature (75)..(75): Xaa can be any naturally occurring amino acid
  Transcript Sequence Number=SeqID_16203
  Gene Ontology: Mol. function=methyltransferase activity
  Homolog annotation: Hit_ID=B9R7U0; Match level="QueryCoverage=100%, HitCoverage=40%, E-value=1e-118, Identity=65%"; Hit description=ATP binding protein, putative
  Pfam annotation: Domain name=DUF248; Domain location=1-293; Score =187.7; E_value=3.2e-53; Accession=PF03141.8; Description=Putative methyltransferase
KINRILXPGGYFIISSKSADLESEEXISASMTALCWNAIAYNSXDDVSEVGVKIFQRPATNEEYDLRAKKDPPFXCKEEQNKANAWYTHIKHCLHKAPVGIEERGSDWPQEWPKRLDSYPEWLGDLQTRVAADHNHWKAVVEKSYLDGLGIDWSNIRNVMDMRAVYGGFAAALASKKVWVMNVVPVHASDTLPIIYERGLIGVYHDWCEPFSTYPRSYDLLHADHLFSRLKIRCRQPVAIVVEMDRILRPGAWAIIRDKLEILDPLETILKSLHWEIVMTFRKDKEGIMSVKKTTWRP

SEQ ID NO: 82178 - protein, 594 aa, Setaria italica
  misc_feature (46)..(46): Xaa can be any naturally occurring amino acid
  misc_feature (82)..(82): Xaa can be any naturally occurring amino acid
  Transcript Sequence Number=SeqID_16204
  Gene Ontology: Mol. function=methyltransferase activity
  Homolog annotation: Hit_ID=B9R7U0; Match level="QueryCoverage=85%, HitCoverage=69%, E-value=0.0, Identity=63%"; Hit description=ATP binding protein, putative
  Pfam annotation: Domain name=DUF248; Domain location=104-589; Score =780.7; E_value=1e-231; Accession=PF03141.8; Description=Putative methyltransferase
  Pfam annotation: Domain name=Methyltransf_11; Domain location=216 -311; Score=19.2; E_value=0.0015; Accession=PF08241.4; Description =Methyltransferase domain
  Pfam module annotation: Pfam domain module=DUF248::Methyltransf_11; Domain location=104-589::216-311
DPEPKEKEPEQEQEQEPDMEMEPEKEAELPMPEESGDNSGKAPAEXEEKPPQLELEEEPGEGDGDEDFEVAKKAAPSKKRKXPPLFSSSAHYHWKHCGAKSGYHYIPCVDFDGDGSQRHHERSCPRSPVTCLVSLPKDYKQPAPWPERKDKVWYANVAHPRLSNYVKGHNWLNHSGEYLMFPLDEWEFKGGARHYVESIDEMAPDIDWGKNIRIVLDIKCKSAGFGIALLEKDVITLSLGLTNDQTDLAQVALERGIPATVGSLGSQRLPFPSGAFDAIHCGECNIPWHSNGGKLLLEINRILRPGGYFIISSKSADLESEEGISASMTALCWNAIAYNSDDVSEVGVKIFQRPATNEEYDLRAKKDPPFCKEEQNKANAWYTHIKHCLHKAPVGIEERGSDWPQEWPKRLDSYPEWLGDLQTRVAADHNHWKAVVEKSYLDGLGIDWSNIRNVMDMRAVYGGFAAALASKKVWVMNVVPVHASDTLPIIYERGLIGVYHDWCEPFSTTYPRSYDLLHADHLFSRLKIRCRQPVAIVVEMDRILRPGAWAIIRDKLEILDPLETILKSLHWEIVMTFRKDKEGIMSVKKTTWRP

SEQ ID NO: 82179 - protein, 105 aa, Setaria italica
  Transcript Sequence Number=SeqID_16205
SGGLDELLAPDQLLASGIGDLAVKEDVSEGAVAMDMAAAPADVEMNTAVSGGKVEQESSEEESESSEEEESSEASSSSEDEEQVDKKDEESSEASSSSDELELGA

SEQ ID NO: 82180 - protein, 124 aa, Setaria italica
  Transcript Sequence Number=SeqID_16206
  Gene Ontology: Mol. function=prephenate dehydratase activity; Biological process=L-phenylalanine biosynthetic process
  Homolog annotation: Hit_ID=B5LAT0; Match level="QueryCoverage=87%, HitCoverage=25%, E-value=4e-52, Identity=90%"; Hit description =Putative arogenate dehydratase
PRTDRPFKTSIVFAHDKEGTSVLFKVLSAFAFRDISLTKIESRPHRHRPIRLVDDANVGTAKHFEYMFYVDFQASLAEPRAQNALAEVQEYTSFLRVLGSYPMDMTPMTAGSSTISSSDSSPSS

SEQ ID NO: 82181 - protein, 406 aa, Setaria italica
  Transcript Sequence Number=SeqID_16207
  Gene Ontology: Mol. function=prephenate dehydratase activity; Biological process=L-phenylalanine biosynthetic process
  Homolog annotation: Hit_ID=B5LAT0; Match level="QueryCoverage=78%, HitCoverage=74%, E-value=1e-163, Identity=89%"; Hit description =Putative arogenate dehydratase
  Pfam annotation: Domain name=PDT; Domain location=99-278; Score =304.7; E_value=2e-88; Accession=PF00800.10; Description=Prephenate dehydratase
  Subcellular localization annotation: CTP_CleavageSite=67; ConfidenceScore=5.74e-01
HRGIHLNISRGASKTNNNRSSGGTNGGSTSSADASNSNSSSKQPAPRVNGQEPPRPPALEATPAPVPAELDLVPVSNLPRPLSISDLSPAPMHGSQLRVAYQGVPGAYSEAAAAKAYPGCDAIPCDQFEVAFQAVELWIADRAVLPVENSLGGSIHRNYDLLLRHRLHIVGEVQLPVHHCLLALPGVRKERLTRVISHPQALAQCEHTLTAMGLNVVREAFDDTAGAAEYVAANGLRDTAAIASSRAAELYGMEVLADGIQDDSGNVTRFVMLAREPIVPRTDRPFKTSIVFAHDKEGTSVLFKVLSAFAFRDISLTKIESRPHRHRPIRLVDDANVGTAKHFEYMFYIDFQASMADVRAQNALAEIQEFTSFLRVLGSYPMDMTPWDAAPSSWSSRVDNSSSQHL

SEQ ID NO: 82182 - protein, 195 aa, Setaria italica
  misc_feature (19)..(19): Xaa can be any naturally occurring amino acid
  Transcript Sequence Number=SeqID_16208
  Gene Ontology: Mol. function=heat shock protein binding; Cellular component=cytoplasm; Biological process=response to stress
  Homolog annotation: Hit_ID=B6U659; Match level="QueryCoverage=97%, HitCoverage=38%, E-value=1e-71, Identity=73%"; Hit description =Chaperone protein dnaJ
  Pfam annotation: Domain name=DnaJ_C; Domain location=4-127; Score =179.3; E_value=1.1e-50; Accession=PF01556.10; Description=DnaJ C terminal region
VRVGTLRVRGEGDAGPKRXGPPGDLYVCLDIEEPSDIKRDGINLYSTVSVSYIEAILGTTKKVRTVDGTSELRIPPGTQPGDVIVLAKQGVPSLNKPSIRGDHLFTVTVTIPKRISGREKELLEELASLSGGGFARTAAKPKPAKPKPVHEEKEVGTSQEDAGKSNEGEGGWLKKLTDFAGSIANGAAKWLNDNL

SEQ ID NO: 82183 - protein, 197 aa, Setaria italica
  misc_feature (73)..(73): Xaa can be any naturally occurring amino acid
  Transcript Sequence Number=SeqID_16209
  Gene Ontology: Cellular component=mitochondrion
  Homolog annotation: Hit_ID=B9T1G4; Match level="QueryCoverage=95%, HitCoverage=22%, E-value=1e-87, Identity=81%"; Hit description =Pentatricopeptide repeat-containing protein, putative
RKQPVLSFVREFFQGIDYDNEESAARYFVNVLLNYLVLMGQMNRARCVWKVSYENKLFAKAIVFDQHIAWSLXDVRSLSVGAALVATVHTLHRFRKRMLYYGVVPRRIKLVTGPTLKMVVAQVLASLESPFEVSKVVLRAPGDSVLEWFKKPIVQQFLLNEIPSKADVLMHRLNVMFPSSAPEVRSLSIPRSLGMSR

SEQ ID NO: 82184 - protein, 101 aa, Setaria italica
  misc_feature (77)..(77): Xaa can be any naturally occurring amino acid
  misc_feature (96)..(96): Xaa can be any naturally occurring amino acid
  misc_feature (100)..(100): Xaa can be any naturally occurring amino acid
  Transcript Sequence Number=SeqID_16210
  Gene Ontology: Mol. function=mannose-6-phosphate isomerase activity; Biological process=carbohydrate metabolic process
  Homolog annotation: Hit_ID=B6SUP8; Match level="QueryCoverage=100%, HitCoverage=22%, E-value=2e-31, Identity=73%"; Hit description =Mannose-6-phosphate isomerase
KLLSVKEQDGGIGVRSYLKSAFTKLMIASEEAVSEAIAKLKSRLNVESKVRTLTKKEKLVLSLEKQYPGDVGVLAAXFFLNYVKLSPGEATFMVGXNEPXA

SEQ ID NO: 82185 - protein, 167 aa, Setaria italica
  misc_feature (62)..(62): Xaa can be any naturally occurring amino acid
  Transcript Sequence Number=SeqID_16211
  Gene Ontology: Mol. function=ATPase activity, coupled to transmembrane movement of substances; Cellular component=integral to membrane; Biological process=transport
  Homolog annotation: Hit_ID=Q84ZW6; Match level="QueryCoverage=86%, HitCoverage=10%, E-value=8e-61, Identity=77%"; Hit description =Putative ABC transporter
GNASSKLKKQSYSTEVIASSPSMEIEHTVQAPIVTQLKCSPRPLPVRVAAMSQILVPKLLDXQGGQLLAVAVLVFSRTWISDRIASLNGTTVKFVLEQDKVAFIRLIGVSILQSAANSFVAPSLRTLTAKLALGWRIRMTNHLLRIINLEKENRQLLTKVITNNSTR

SEQ ID NO: 82186 - protein, 55 aa, Setaria italica
  Transcript Sequence Number=SeqID_16212
  Gene Ontology: Mol. function=nucleoside-triphosphatase activity; Cellular component=membrane; Biological process=transport
  Homolog annotation: Hit_ID=Q8GU57; Match level="QueryCoverage=76%, HitCoverage=3%, E-value=4e-14, Identity=85%"; Hit description =Peroxisomal membrane protein ABC transporter homologue
FFIFFCFTLGFFVLNLTMGITVITSSQRPALIPFHALELKLIDGEGNWELCSIRQ

SEQ ID NO: 82187 - protein, 775 aa, Setaria italica
  misc_feature (73)..(73): Xaa can be any naturally occurring amino acid
  Transcript Sequence Number=SeqID_16213
  Gene Ontology: Mol. function=nucleoside-triphosphatase activity; Cellular component=membrane; Biological process=transport
  Homolog annotation: Hit_ID=Q65X28; Match level="QueryCoverage=98%, HitCoverage=99%, E-value=0.0, Identity=81%"; Hit description =Putative ABC transporter
  Pfam annotation: Domain name=ABC_membrane_2; Domain location=184-468; Score=357.3; E_value=2.8e-104; Accession=PF06472.7; Description=ABC transporter transmembrane region
  Pfam annotation: Domain name=ABC_tran; Domain location=576-760; Score= 77.3; E_value=5.4e-20; Accession=PF00005.19; Description=ABC transporter
  Pfam module annotation: Pfam domain module=ABC_membrane_2::ABC_tran; Domain location=184-468::576-760
CSTIVAWWTSNVDLEYLERYPLDKEVNWGDELSLGEQQRLGMARLFYHKPKFAILDECTSAVTIDMEERFCKXVRAMGTSCITISHRPALVAFHEIVLSLDGEGGWNVQDNRNGSSFSPEVEVDVLKSSETDRKSDALTVQRAFVTSTKGNASSKLKNHSYSTEVIATSPKVEIEHAVRTSRVPHLRCHPRPLPLRVAAMLKILVPKLLDKQGGQLLAVAVLVFSRTWISDRIASLNGTTVKFVLEQDKVAFIRLIGVSILQSAANSFVAPSLRTLTAKLALGWRIRMTNHLLRYYLKRNAFYKVFNMSGKSIDADQRLTLDVDKLTTDLAGLVTGMVKPVVDILWFTWRMKLLSGRRGVAILYAYMLLGLGFLRAVSPDFGRLSGQEQELEGTFRFMHSRLRTHAESIAFFGGGSREKAMVDAKFVKLLNHSKILLRKQWLYGIVDDFVTKQLPHNVTWGLSLLYALEHKGDRALTSTQGELAHALRFLASVVSQSFIAFGDILELHKKFLELSGGINRIFELEEIICAAQRNTVVSSNAISASSEDIISFHEVDIVTPSQKLLASKLSCNVVQGKSLLLTGPNGSGKSSIFRVLRDLWPTFSGRVIKPSEGMFHVPQRPYTSLGTLRDQIIYPLSREEAEMKVLSLHQAGNRSSASILLDDHLKTILENVRLVYLLEREGWDSTPNWEDVLSLGEQQRLGMARLFFHHPKYGILDECTNATSVDVEEHLYRLATNMGITVITSSQRPALIPFHALELKLIDGEGNWELCSIRQ

SEQ ID NO: 82188 - protein, 667 aa, Setaria italica
  Transcript Sequence Number=SeqID_16214
  Gene Ontology: Mol. function=ATPase activity, coupled to transmembrane movement of substances; Cellular component=integral to membrane; Biological process=transport
  Homolog annotation: Hit_ID=Q84ZW6; Match level="QueryCoverage=99%, HitCoverage=81%, E-value=0.0, Identity=63%"; Hit description =Putative ABC transporter
  Pfam annotation: Domain name=ABC_membrane_2; Domain location=1-213; Score=205.8; E_value=1.1e-58; Accession=PF06472.7; Description=ABC transporter transmembrane region
  Pfam annotation: Domain name=ABC_tran; Domain location=327-506; Score= 105.5; E_value=1.8e-28; Accession=PF00005.19; Description=ABC transporter
  Pfam module annotation: Pfam domain module=ABC_membrane_2::ABC_tran; Domain location=1-213::327-506
IIENLILCFLQSTLYQTSKYLTGSLSLRFKKILTDIAHADYFENMVYYKMSHVDHRVSNPEQRIASDIPKFSSELSELVQDDLAAVAEGLIYTWRLCSYASPKYVFWIMAYVLVAGGAIRKFSPAFGKLKSTEQQLEGDYRQLHSRLRTHAESVAFYGGENREASHIMQRFDALVGHLNLVRHENWWFGMIQDFFLKYFGATVAVVLIIEPFFSGNLRPDSSTLGRAEMLSNLRYHTSVIISLFQSLGILSISSRRLNILSGYADRIRELLDVSRELSGIRDKSLNHNSSSGNYISEANHIEFSDVKVVTPAGNILVNDLTLRVETGSNLLITGPNGSGKSSLFRVLGGLWPLVSGHIVKPGVGSDLNKEIFYVPQRPYTAVGTLREQLIYPLTEDQEIERLTYDGMVDLLKNVDLEYLLERYPLDKEINWGDELSLGEQQRLGMARLFYHKPKFAILDECTSAVTTDMEERFCKKVRAMGTSCITISHRPALVAFHDIVLSLDGEGGWNVQHRREDSSFSTEESDFSSLETDRKSDALTVQRAFMSRAKSNASLGSKDHSYSTEVIATSPKVEIEHAVRTSRVPHLRCHPRPLPLRVAAMLKILVPKLLDKQGGQLLAVAVLVFSRTWISDRIASLNGTTVKFVLEQDKVAFIRLIGVSILLIYLT

SEQ ID NO: 82189 - protein, 66 aa, Setaria italica
  Transcript Sequence Number=SeqID_16215
  Subcellular localization annotation: CTP_CleavageSite=52; ConfidenceScore=5.45e-01
VAPVVGLGPPTRGSCSDHQPNGSWLAQVTVQPYRVKPGTRVFSASLVRFLLSCMQRGRCFPGQSSF

SEQ ID NO: 82190 - protein, 186 aa, Setaria italica
  Transcript Sequence Number=SeqID_16216
  Gene Ontology: Cellular component=integral to membrane; Biological process=response to stress
  Homolog annotation: Hit_ID=B6UCA0; Match level="QueryCoverage=100%, HitCoverage=100%, E-value=1e-88, Identity=86%"; Hit description =HVA22-like protein a
  Pfam annotation: Domain name=TB2_DP1_HVA22; Domain location=7-104; Score=175.8; E_value=1.2e-49; Accession=PF03134.11; Description =TB2DP1, HVA22 family
MGSGSFLKVLAKNFDVLAGPIISLAYPLYASVRAIETKNPIDDQQWLTYWVLYSFITLFELTFAPIIEWLPFWSYAKLFFNCWLVLPWFSGAAYVYDHFVRPMFVNRQIVNIWYVPRNDKPSKPDDVLSAAERYIEQNGPEAFEKLISKSTKSSKSRTTRRSILEDAEAERESWGENPFYDKNYRH

SEQ ID NO: 82191 - protein, 177 aa, Setaria italica
  misc_feature (148)..(148): Xaa can be any naturally occurring amino acid
  Transcript Sequence Number=SeqID_16217
GGKGRKRRSIIQEVAVFVPTVRIPVASDIVHPLRGIVSKDLVDRLSTLRAHVVELAEEIYCADVSAVSELQHALEEYLPVVLGLTVKESRLEPSVQFRWKTLDDDQECCLASAWYEVLSVVHMMAMLALFEANLTLIPKNAQAGSERXVSEDAKKDVVNALLRASGCLDYSVRRILV

SEQ ID NO: 82192 - protein, 121 aa, Setaria italica
  Transcript Sequence Number=SeqID_16218
  Gene Ontology: Cellular component=plasma membrane
  Homolog annotation: Hit_ID=Q2R047; Match level="QueryCoverage=100%, HitCoverage=12%, E-value=6e-43, Identity=66%"; Hit description=Salt -inducible protein, putative
  Pfam annotation: Domain name=PPR; Domain location=33-67; Score=24.7; E_value=0.00038; Accession=PF01535.12; Description=PPR repeat
NFLLKFVSQSGESDMVVTTYDQMKCFQLTLDAHSLNIVTRSLFQANKANEAFQVWVGMIEMGVKPDVHGYSSFIIGLCDCGKYDLAYNMISRYTVLQEITQERVPIEAMAYNMVIDGLCKE

SEQ ID NO: 82193 - protein, 236 aa, Setaria italica
  Transcript Sequence Number=SeqID_16219
  Gene Ontology: Mol. function=nucleoside-triphosphatase activity; Cellular component=chloroplast; Biological process=proteolysis
  Homolog annotation: Hit_ID=B9S0Q0; Match level="QueryCoverage=73%, HitCoverage=23%, E-value=9e-47, Identity=54%"; Hit description=Stage III sporulation protein AA, putative
DGNSLRNARRSLDSAFNLDSAEGHIEKSDEAESSLNLYAYGISESTALQAIKQLELEDVVALTYNISEADAVIALHSKLKKNSQIQAVVKSQDIPVFFVKTNSLSQITRALRALVDDHMDELIDYEDKEEARSSEETDALEEARLAIEQVVIPKGESVQLLPRPPSIIASQVDLVESFSLEWEVVGQDLNSHLRILPHFTAKEATGAEQGTAAGLADSGSTDDDTDDHTHQNGITR

SEQ ID NO: 82194 - protein, 75 aa, Setaria italica
  misc_feature (48)..(48): Xaa can be any naturally occurring amino acid
  Transcript Sequence Number=SeqID_16220
TENLVLWQDFNYGVEFMLLISFLETASREAMEDASSSLQSLISQCSSXIVQATCGCCLNPENGYNHAAVIRFPSC

SEQ ID NO: 82195 - protein, 139 aa, Setaria italica
  misc_feature (51)..(51): Xaa can be any naturally occurring amino acid
  Transcript Sequence Number=SeqID_16221
GRQGRIEDPNSENFTHAVFMRFQQKEDIAKFQSSAYYSKILDEHVKPVSYXASAYFESEVEDDIIPLFRRGEDFNYGVEFMLLISFLETASREAMEDASSSLQSLISQCSSFIVQATCGCCLNPENGYNHAAVIRFPSC

SEQ ID NO: 82196 - protein, 239 aa, Setaria italica
  misc_feature (86)..(86): Xaa can be any naturally occurring amino acid
  misc_feature (140)..(140): Xaa can be any naturally occurring amino acid
  misc_feature (153)..(153): Xaa can be any naturally occurring amino acid
  misc_feature (180)..(180): Xaa can be any naturally occurring amino acid
  Transcript Sequence Number=SeqID_16222
  Pfam annotation: Domain name=Dabb; Domain location=69-165; Score =72.8; E_value=1.3e-18; Accession=PF07876.4; Description=Stress responsive AB Barrel Domain
  Subcellular localization annotation: CTP_CleavageSite=48; ConfidenceScore=5.03e-01
MLAPASAQVHHTIRSVASCFGLHQRSVLNLDRYCRWPGTGKKTILSTRGVLESSNGAPSGGLVRKRKVVEHIILLRAKPNISDAEXKDMLDYLYTSQYQMRGILAVSLGRIEDPNSENFTHAVFMRFQQKEDIAKFQSSXYYSKILDEHVKPXVSYGSVSVDFESEVEDDIIPLFRRGEXFNYGVEFMLLISFLETASREAMEDASSSLQSLISQCSSFIVQATCGKTTYASFALPLQP

SEQ ID NO: 82197 - protein, 57 aa, Setaria italica
  Transcript Sequence Number=SeqID_16223
ENGYNHAAVIRFPSSDDLKLFRESIEYKDMWASKFHPVVEKSLELHFSVDPVGNQLM

SEQ ID NO: 82198 - protein, 47 aa, Setaria italica
  Transcript Sequence Number=SeqID_16224
SKNNIAFSEHDCYGLLWPQISASQEPQDGSFVFSLSLFRLLHINSVG

SEQ ID NO: 82199 - protein, 189 aa, Setaria italica
  Transcript Sequence Number=SeqID_16225
  Gene Ontology: Mol. function=protein transporter activity; Cellular component=membrane coat; Biological process=intracellular protein transport
  Homolog annotation: Hit_ID=B6U245; Match level="QueryCoverage=100%, HitCoverage=22%, E-value=1e-107, Identity=98%"; Hit description =Adaptin N terminal region family protein
LNKIKEFSEWAQCLVLELASKFLPSDNNEIFDIMNLLEDRLQHANGAVVLSTIKVFLHLTMSMTDVHQQVYERIKAPLLTLVGAGSPEQSYSVLCHLHLLVMRAPMLFSSDYKSFYCQYSDPSYVKKLKLEMLTAIANESNTYEIVTELCEYAGNVDVPIARESIRAVGKIALQQYDVNAIVDRLLQFL

SEQ ID NO: 82200 - protein, 445 aa, Setaria italica
  Transcript Sequence Number=SeqID_16226
  Gene Ontology: Mol. function=protein transporter activity; Cellular component=membrane coat; Biological process=intracellular protein transport
  Homolog annotation: Hit_ID=Q5ZEA1; Match level="QueryCoverage=99%, HitCoverage=50%, E-value=0.0, Identity=90%"; Hit description=Beta adaptin-like
  Pfam annotation: Domain name=B2-adapt-app_C; Domain location=323-440; Score=133.2; E_value=8.4e-37; Accession=PF09066.2; Description=Beta2 -adaptin appendage, C-terminal su
WKIALQQYDVNAIVDRLLQFLEMDKDYVTAETLVLVKDLLRKYPQWSHDCIAVVGNISSKNIQEPKGKAALIWMLGEYSQDMHDAPYVLESLVENWDEEHSPEVRLHLLTAVMKCFFKRPPETQKALGATLAAGLSDTHQDVHDRALFYYRLLQYDPAVAERVVNPPKQAVSVFADTQSSEMKDRIFDEFNSLSVVYQKPSYMFTDKEHRGPFEYSEDLTNLAVGAEAQENVISAQRYQENDNDLLLSTSDKEDNGTRASNGSSTSTYNAPSDLIGLSSQTPAETSLISTGGPAYSSQSNFSLDDLLGLGVTEAPAPAPPPALTLNSKPVLDPGTFQRKWGQLALALTQECSLSPQGAASLMNPQSLIRHMQSNHIQCIASGGQPPNYKFFFIAQKDGATAFFLVECIVNTASAKAQLKIKADDGTAAEAFSTLFQSALSKFGLS

SEQ ID NO: 82201 - protein, 218 aa, Setaria italica
  misc_feature (30)..(30): Xaa can be any naturally occurring amino acid
  misc_feature (33)..(33): Xaa can be any naturally occurring amino acid
  misc_feature (211)..(211): Xaa can be any naturally occurring amino acid
  Transcript Sequence Number=SeqID_16227
  Gene Ontology: Mol. function=ATPase activity, coupled to transmembrane movement of ions, phosphorylative mechanism; Cellular component=integral to membrane; Biological process=phospholipid transport
  Homolog annotation: Hit_ID=Q10LU3; Match level="QueryCoverage=92%, HitCoverage=15%, E-value=9e-93, Identity=84%"; Hit description =Phospholipid-translocating P-type ATPase, flippase family protein, expressed
SQQAPARPSVASLGCLCTTDSFSSSLYEHXDLXSVSLADEREVEPGHHQEVSDVSRVAEHFQSADSHFFHRLSVECSQKERQRKVSWGGAMEMQRSPSSLDIGMVSTSHEKPNRSQRVRNKSSQFEDPFSSEHEPRLIYINDPNRTNDRYEFTGNEIRTSKYTLITFLPKNLFIQFHRLAYVYFLVIAALNQLPPLAVFGRTASLFPLLFXVLFVTAY

SEQ ID NO: 82202 - protein, 49 aa, Setaria italica
  Transcript Sequence Number=SeqID_16228
  Gene Ontology: Mol. function=deoxyhypusine monooxygenase activity
  Homolog annotation: Hit_ID=B6UH29; Match level="QueryCoverage=100%, HitCoverage=15%, E-value=1e-11, Identity=76%"; Hit description=HEAT -like
MAASSAFEPSPEMERFLCERLLDAEQPIAERFRALFSLATSAGRPRSAL

SEQ ID NO: 82203 - protein, 38 aa, Setaria italica
  Transcript Sequence Number=SeqID_16229
VVLYPCYVYMLGLHARMLVIYPCYHSIGLYALMYAFRP

SEQ ID NO: 82204 - protein, 206 aa, Setaria italica
  Transcript Sequence Number=SeqID_16230
  Gene Ontology: Mol. function=nucleotide binding; Cellular component =plasma membrane; Biological process=small GTPase mediated signal transduction
  Homolog annotation: Hit_ID=Q43463; Match level="QueryCoverage=98%, HitCoverage=98%, E-value=1e-96, Identity=82%"; Hit description=Ras -related protein Rab7
  Pfam annotation: Domain name=Arf; Domain location=1-177; Score=-57.4; E_value=4.2e-05; Accession=PF00025.13; Description=ADP-ribosylation factor family
  Pfam annotation: Domain name=GTP_EFTU; Domain location=7-180; Score= -95.1; E_value=0.072; Accession=PF00009.19; Description=Elongation factor Tu GTP binding domain
  Pfam annotation: Domain name=MMR_HSR1; Domain location=10-129; Score =13.9; E_value=5.2e-05; Accession=PF01926.15; Description=GTPase of unknown function
  Pfam annotation: Domain name=Miro; Domain location=11-129; Score =72.5; E_value=1.5e-18; Accession=PF08477.5; Description=Miro-like protein
  Pfam annotation: Domain name=Ras; Domain location=11-179; Score =281.6; E_value=1.8e-81; Accession=PF00071.14; Description=Ras family
  Pfam module annotation: Pfam domain module=Arf::GTP_EFTU::MMR _HSR1::Miro::Ras; Domain location=1-177::7-180::10-129::11-129::11-179
MSTSRRRTLLKVIVLGDSGVGKTSLMNQYVHKKFSQQYKATIGADFVTKEVLIEDRLVTLQIWDTAGQERFQSLGVAFYRGADCCVLVYDVNSNRSFDTLNTWHDEFLNQASPSDPKTFPFILLGNKIDVDGGKSRVVSEKKAMEWCASKGNIPYFETSAKEDYNVDNAFLSVAKLALEHERDQDIYFQAVADPVPETEPRSGCAC

SEQ ID NO: 82205 - protein, 137 aa, Setaria italica
  Transcript Sequence Number=SeqID_16231
  Gene Ontology: Mol. function=dolichyl-diphosphooligosaccharide -protein glycotransferase activity; Cellular component=oligosaccharylt ransferase complex; Biological process=protein amino acid N-linked glycosylation via asparagine
  Homolog annotation: Hit_ID=B9SV32; Match level="QueryCoverage=75%, HitCoverage=14%, E-value=4e-36, Identity=68%"; Hit description =Ribophorin II, putative
LYGRFGSSIFYFCCGTTYLNAGTIKLLFRLDLLKDTKVSLSANHLQKLRLSFQLTTPLGHTFKPHQVFLKLKHESNVEHLFVVPGSARQFKLVLDFLGLVEKFYYLSGRYDLELAVGDAAMENSFLRPLGQLRKLGT

SEQ ID NO: 82206 - protein, 99 aa, Setaria italica
  misc_feature (9)..(9): Xaa can be any naturally occurring amino acid
  Transcript Sequence Number=SeqID_16232
  Gene Ontology: Mol. function=dolichyl-diphosphooligosaccharide -protein glycotransferase activity; Cellular component=oligosaccharylt ransferase complex; Biological process=protein amino acid N-linked glycosylation via asparagine
  Homolog annotation: Hit_ID=B9SV32; Match level="QueryCoverage=100%, HitCoverage=14%, E-value=2e-26, Identity=63%"; Hit description =Ribophorin II, putative
DFLGLVEKXFYYLSGRYDLELAVGDAAMENSFLRPLGHLELDLPEAPEKAPKPPAQAVDPFSKFGPKAEISHIFRAPEKRPPKELSLAFTGLTLLPFIG

SEQ ID NO: 82207 - protein, 347 aa, Setaria italica
  Transcript Sequence Number=SeqID_16233
  Gene Ontology: Mol. function=dolichyl-diphosphooligosaccharide -protein glycotransferase activity; Cellular component=oligosaccharylt ransferase complex; Biological process=protein amino acid N-linked glycosylation via asparagine
  Homolog annotation: Hit_ID=B9SV32; Match level="QueryCoverage=91%, HitCoverage=45%, E-value=4e-94, Identity=56%"; Hit description =Ribophorin II, putative
  Pfam annotation: Domain name=Ribophorin_II; Domain location=6-347; Score=-119.4; E_value=4.2e-08; Accession=PF05817.6; Description =Ribophorin II (RPN2)
MAGRRPSPAALLILLVAAAFAPISTAVRPVSDAHRSAAAELFAPSADGSFGDLERTYEAVRTFQILGLEKYKSETGKACKFAAEKLASPTSSAAKDLFHAARISGALGCSVDAGVYDGVVARLKAVIKDTNSLLEFYYSVGGLLSIKEQGHNVVLSDAESTFHAIKALSQSDGRWRYDTDSAESSTFAAGIALEALAGVVSLADAEVDPSMVGVVKNDIVKLFDTIKSYDDGTFYFDEKHVDATEYKGPITTSASVVRGVTSFATVASGKLNIPGEKILGLAKFFLGIGLPGSAKDCFNQIESLSFLENNRVFIPLILSLPSKVFSLTSKDQLKVEVTTVFRSAAPP

SEQ ID NO: 82208 - protein, 469 aa, Setaria italica
  Transcript Sequence Number=SeqID_16234
  Gene Ontology: Mol. function=dolichyl-diphosphooligosaccharide -protein glycotransferase activity; Cellular component=oligosaccharylt ransferase complex; Biological process=protein amino acid N-linked glycosylation via asparagine
  Homolog annotation: Hit_ID=B9SV32; Match level="QueryCoverage=97%, HitCoverage=66%, E-value=1e-144, Identity=58%"; Hit description =Ribophorin II, putative
  Pfam annotation: Domain name=Ribophorin_II; Domain location=1-463; Score=381.2; E_value=1.9e-111; Accession=PF05817.6; Description =Ribophorin II (RPN2)
RDSLYAFNSPKDEKHVDATEYKGPITTSASVVRGVTSFATVASGKLNIPGEKILGLAKFFLGIGLPGSAKDCFNQIESLSFLENNRVFIPLILSLPSKVFSLTSKDQLKVEVTTVFRSAAPPLKVNLVQVLGSDSKVITSENKELQFDLDNNVHYLDIAPLKIDVGKYSLVFEISLQEPEHETVYSTGGRNTENVFITGLIKVDKAEIGISDNDAGTMESVQKLDLLKDTKVSLSANHLQKLRLSFQLTTPLGHTFKPHQVFLKLKHESNVEHLFVVPGSARQFKLVLDFLGLVEKFYYLSGRYDLELAVGDAAMENSFLRPLGHLELDLPEAPEKAPKPPAQAVDPFSKFGPKAEISHIFRAPEKRPPKELSLAFTGLTLLPFIGFLIGLMRLGVNLKNFPSLPGPAAFASLFHSGIGAVLLLYVLFWLKLDLFTTLKYLGFLGIFLVFVGHRTLSYLSSVSTKQKTA

SEQ ID NO: 82209 - protein, 46 aa, Setaria italica
  Transcript Sequence Number=SeqID_16235
PPTVLLSDRFRSIDSRALQATRTVISVRCCLRTLDQMQSCDSFVLF

SEQ ID NO: 82210 - protein, 115 aa, Setaria italica
  Transcript Sequence Number=SeqID_16236
  Gene Ontology: Mol. function=histone-lysine N-methyltransferase activity; Cellular component=nucleus; Biological process=chromatin modification
  Homolog annotation: Hit_ID=Q9ZUM9; Match level="QueryCoverage=41%, HitCoverage=11%, E-value=3e-10, Identity=58%"; Hit description =Histone-lysine N-methyltransferase ASHR2
RCQVESRWKDDDDNNGDEGSEDDTMEEEEGEDGGDDDGDDGMEDGEGGPDGDDDFPHAYFFVRYLCDSEGCWGMLAPLPPSPNGELSHVFECNLCGKLRKEEDAMPDEGTSGMVH

SEQ ID NO: 82211 - protein, 231 aa, Setaria italica
  misc_feature (43)..(43): Xaa can be any naturally occurring amino acid
  Transcript Sequence Number=SeqID_16237
  Homolog annotation: Hit_ID=B9SEJ5; Match level="QueryCoverage=66%, HitCoverage=18%, E-value=4e-48, Identity=61%"; Hit description =Nucleotide binding protein, putative
MSAMAPHYQAATLIASPSYPNAIAWSSDNLVAVASGHIVTILXAALEGPRGLVGLRRSDPFPIGVVNREDLFEPCLVPTCLARDTEPCARSISWSQQGFAPNYGCLLAVCTVDGRVKLYRSPIWEFCDEWVEVADISQLLFNHYKVINFEEDNGPHLTSPKNTNTEETEVLGSTCELQDPLSRRGPGQRKRKPPRVDGYVYDGNEDLDASKDADFSLKPCSKSKKKSSKKT

SEQ ID NO: 82212 - protein, 107 aa, Setaria italica
  Transcript Sequence Number=SeqID_16238
  Gene Ontology: Mol. function=DNA topoisomerase (ATP-hydrolyzing) activity; Cellular component=chromosome; Biological process=DNA topological change
  Homolog annotation: Hit_ID=Q8GZY4; Match level="QueryCoverage=100%, HitCoverage=12%, E-value=2e-55, Identity=98%"; Hit description=DNA topoisomerase VIA, putative, expressed
  Pfam annotation: Domain name=TP6A_N; Domain location=1-58; Score =80.6; E_value=5.7e-21; Accession=PF04406.6; Description=Type IIB DNA topoisomerase
TARVLSLVHAVLRRGIHVTKRDLFYTDVKLFGDQSQSDAVLDDVSCMLGCTRSSLHVVASEKGVVVGRLVFADDGDRIDCTRMGVGGKAIPPNIDRVSGIESDALFI

SEQ ID NO: 82213 - protein, 113 aa, Setaria italica
  Transcript Sequence Number=SeqID_16239
RERNRWGRQAIGPPPPSTIGCSSVADPGGHRASLPWFSEPGGILALQAKEPVCQWARKAVPFGCLRAPSEFRRAPSASGFVGAIDSSRRSQRKSSGLLRSRLATSFVDGKREQ

SEQ ID NO: 82214 - protein, 521 aa, Setaria italica
  misc_feature (509)..(509): Xaa can be any naturally occurring amino acid
  Transcript Sequence Number=SeqID_16240
  Gene Ontology: Mol. function=ubiquitin-protein ligase activity; Cellular component=ubiquitin ligase complex; Biological process =ubiquitin-dependent protein catabolic process
  Homolog annotation: Hit_ID=B6SV52; Match level="QueryCoverage=100%, HitCoverage=67%, E-value=0.0, Identity=85%"; Hit description =Ubiquitin-protein ligase
  Pfam annotation: Domain name=U-box; Domain location=270-342; Score =64.7; E_value=3.5e-16; Accession=PF04564.7; Description=U-box domain
MANGNNERMGISQRKSCPKVHSSMCSELTMMLDKVSSILPSIEAARPGCKAGIQELCNLYNVVEKGNLITLHCIECSKLYLAITGEAIVARCERIRDSLRRSLFLIQNMVPPALANQIAEVHNDLRDIKFILDPVEKEAGKAILQMLRQSDASEELELETFLQAASKLDLTSPKALLIERRAIKKLLDKVNGNDPKKEGVLKFFLYLIKKYGKSIRSDSGERNENSQPESQSSTPSTTSSDASPPEKCYTPTDFQTYEDHSSMSGGATPPVEFCCPISTKLMHDPVIISSGQTYEREYIERWFNEGYDTCPRTHMKLENFSMIPNTCMRDLICNWCKEHGFTVSHFIPPSENSYSYLPEQLHGYSVSSLHNVSVPLIAGKDNSFVIDHSNTSFALSDASYVSNASNARDMEDPKDISQFSWNADYQKYLSFHNFNQEMFLRFFHELSMLPLELQEKSIKDLKNVLDYENEVSYAMVLNGFVEAFLEFLRNDTGSYSVQAQKAGFQFFLXFLSNSRAKIPSM

SEQ ID NO: 82215 - protein, 65 aa, Setaria italica
  Transcript Sequence Number=SeqID_16241
DSFLCRDDYAGLRCCRLIRIESAAESCGFKTCFHTNVCYCAVLKKFSQRRWPLVQLVMLGLATPD

SEQ ID NO: 82216 - protein, 125 aa, Setaria italica
  Transcript Sequence Number=SeqID_16242
NMLSYKCVLLCCFEEIQSEEMATSAAGHVGSSHSRLASMMLHMDAWFGCCCCLAGMMGWILLPMPILTDRLVATSRQQIMYRESPNLCWLLHEHNLRSTLCTGVSARVIFLRNFHALELGSCLQL

SEQ ID NO: 82217 - protein, 148 aa, Setaria italica
  Transcript Sequence Number=SeqID_16243
  Gene Ontology: Cellular component=extracellular region; Biological process=sexual reproduction
  Homolog annotation: Hit_ID=Q94KS6; Match level="QueryCoverage=83%, HitCoverage=43%, E-value=8e-67, Identity=95%"; Hit description=Beta -expansin 1a
  Pfam annotation: Domain name=DPBB_1; Domain location=54-133; Score =114.8; E_value=2.8e-31; Accession=PF03330.10; Description=Rare lipoprotein A (RlpA)-like double
MGVPSSLPSAAVYWGPWQKARATWYGQPNGAGPDDNGGACGFKHTNQYPFMSMGSCGNQPLFKDGKGCGSCYKIRCTKDKSCSGKAETVIITDMNYYPVSKYHFDLSGTAFGRLAKPGLNDKLRHSGIIDIEVQPRVDRRRSYPGPTK

SEQ ID NO: 82218 - protein, 92 aa, Setaria italica
  Transcript Sequence Number=SeqID_16244
  Gene Ontology: Cellular component=extracellular region; Biological process=sexual reproduction
  Homolog annotation: Hit_ID=Q94LR4; Match level="QueryCoverage=96%, HitCoverage=31%, E-value=5e-44, Identity=89%"; Hit description =Expansin-B4
  Pfam annotation: Domain name=Pollen_allerg_1; Domain location=20-92; Score=64.4; E_value=4.3e-16; Accession=PF01357.13; Description =Pollen allergen
KNAVDVCLCRVPCEFPGLKIGFHVEEYSNPVYFAVLVEYEDGDGDVVQVDLMESKTAHGPPTGRWTPMRESWGNVWRMDTNHRMQAPFSIRI

SEQ ID NO: 82219 - protein, 287 aa, Setaria italica
  Transcript Sequence Number=SeqID_16245
  Gene Ontology: Cellular component=extracellular region; Biological process=sexual reproduction
  Homolog annotation: Hit_ID=Q94KS6; Match level="QueryCoverage=92%, HitCoverage=92%, E-value=1e-147, Identity=93%"; Hit description=Beta- expansin 1a
  Pfam annotation: Domain name=DPBB_1; Domain location=93-172; Score =115.6; E_value=1.7e-31; Accession=PF03330.10; Description=Rare lipoprotein A (RlpA)-like double
  Pfam annotation: Domain name=Pollen_allerg_1; Domain location=184 -271; Score=126.1; E_value=1.1e-34; Accession=PF01357.13; Description= Pollen allergen
  Pfam module annotation: Pfam domain module=DPBB_1::Pollen_allerg_1; Domain location=93-172::184-271
MGVPSSLPSAAAAALVLLALLAGGHCREAQLDTGDLDAAGTENYNASDAAVYWGPWQKARATWYGQPNGAGPDDNGGACGFKHTNQYPFMSMGSCGNQPLFKDGKGCGSCYKIRCTKDKSCSGKAETVIITDMNYYPVSKYHFDLSGTAFGRLAKPGLNDKLRHSGIIDIEFTRVPCEFPGLKIGFHVEEYSNPVYFAVLVEYEDGDGDVVQVDLMESKTAHGPPTGRWTPMRESWGNVWRMDTNHRMQAPFSIRIRNESGKTLVAHNVIPANWRPNTFYRSFVQYS

SEQ ID NO: 82220 - protein, 168 aa, Setaria italica
  misc_feature (160)..(160): Xaa can be any naturally occurring amino acid
  Transcript Sequence Number=SeqID_16246
  Homolog annotation: Hit_ID=B9SVM2; Match level="QueryCoverage=98%, HitCoverage=27%, E-value=1e-39, Identity=45%"; Hit description =Protein phosphatase 2c, putative
  Pfam annotation: Domain name=DUF868; Domain location=1-167; Score =85.9; E_value=1.4e-22; Accession=PF05910.4; Description=Plant protein of unknown function (DUF868)
LTYAVGTTGRRKVVLLLGNLKKEAFRRTGSRPSLQDAVLVCKKEHVFSKKRFLTKARFHEKGKLHDISIECSSGNLNGGVDVDMVIKIDGSVNVLVRHLQWKFRGNECISIDQLKVQVYWDAHDWLFGTGMRNALFIFKPELPSTSADFHTDECSDFCLXFLYAWKVE

SEQ ID NO: 82221 - protein, 184 aa, Setaria italica
  misc_feature (161)..(161): Xaa can be any naturally occurring amino acid
  Transcript Sequence Number=SeqID_16247
  Gene Ontology: Mol. function=lactoylglutathione lyase activity
  Homolog annotation: Hit_ID=B6TNF3; Match level="QueryCoverage=83%, HitCoverage=82%, E-value=3e-75, Identity=88%"; Hit description =Glyoxalase/bleomycin resistance protein/dioxygenase
  Pfam annotation: Domain name=Glyoxalase; Domain location=64-181; Score=49.2; E_value=1.6e-11; Accession=PF00903.17; Description =GlyoxalaseBleomycin resistance proteinDioxygenase superfamily
  Subcellular localization annotation: CTP_CleavageSite=50; ConfidenceScore=5.61e-01
MATRCVASLPLQSASSSAAARAQPASYAAATRRVRTRLSVATGGEQQLITAQEPAQEPDYGVVSLHHVGILCENLERSMAFYKDLLGLKVNPARPTDKLPYRGAWLWVGSEMIHLMELPNPDPLTGRPEHGGRDRHTCLAIKDVTKLKEIFDKAGISYTLXSKSGRPAIFARDPDGNALEFTQV

SEQ ID NO: 82222 - protein, 100 aa, Setaria italica
  Transcript Sequence Number=SeqID_16248
  Gene Ontology: Cellular component=phagocytic vesicle; Biological process=steroid metabolic process
  Homolog annotation: Hit_ID=B6U9K5; Match level="QueryCoverage=100%, HitCoverage=22%, E-value=6e-49, Identity=93%"; Hit description =Oxysterol-binding protein
YIGSDVTSLVTLPVIIFEPMTMLQKIAELMEYCELLDKADESEDPCMRMAYASAWAVSVYFAYQRTWKPFNPILGETYEMVNHQGITFLAEQVSHHPPMG

SEQ ID NO: 82223 - protein, 174 aa, Setaria italica
  misc_feature (14)..(14): Xaa can be any naturally occurring amino acid
  Transcript Sequence Number=SeqID_16249
  Gene Ontology: Mol. function=phospholipid binding; Cellular component= phagocytic vesicle; Biological process=steroid metabolic process
  Homolog annotation: Hit_ID=B6U9K5; Match level="QueryCoverage=100%, HitCoverage=39%, E-value=2e-90, Identity=89%"; Hit description =Oxysterol-binding protein
NSLEVYPVGRTRVXLKKSGVVLDLVPPPTKVNNLIFGRTWVDSPGEMVMTNLTTGDKAVLYFQPCGWFGAGRYEVDGYVYSAEEEPKIMITGKWNTFMSCQPCDQEGEPIPGTELKEIWRIAPTPQNDKYQYTHFAHKINSFGTTPKKLLPSDSRLRPDRYALEKGDMSKSGAE

SEQ ID NO: 82224 - protein, 216 aa, Setaria italica
  Transcript Sequence Number=SeqID_16250
  Gene Ontology: Cellular component=cell wall
  Homolog annotation: Hit_ID=O65250; Match level="QueryCoverage=59%, HitCoverage=30%, E-value=6e-41, Identity=57%"; Hit description =F21E10.11 protein
  Pfam annotation: Domain name=PAE; Domain location=74-215; Score=21.5; E_value=3.7e-17; Accession=PF03283.5; Description=Pectinacetylesterase
SVHPSQQRHEEEEDPWGKAGVVANNKFCRRPLLLVLVVVVVLVGSCCAEAAATAAADELISSKDGAGGGSSRTTRRRTRRRAAVAAPLMVPITVLKSAVDAGAVCMDGTPPAYHLDPGSGAGNNSWIVNLEGGGWCNNVRACQFRKTSRRGSSDLMEKEIPFGGIMSNSPVDNPDFYSWNRVKIRYCDGASFAGEGFDKENGFYFRGQRIWDATIR

SEQ ID NO: 82225 - protein, 285 aa, Setaria italica
  Transcript Sequence Number=SeqID_16251
  Homolog annotation: Hit_ID=O65250; Match level="QueryCoverage=98%, HitCoverage=67%, E-value=9e-79, Identity=51%"; Hit description =F21E10.11 protein
  Pfam annotation: Domain name=PAE; Domain location=1-271; Score=457.0; E_value=2.8e-134; Accession=PF03283.5; Description=Pectinacetylesteras e
SPFDNPDFYSWNRVKIRYCDGASFAGEGFDKENGFYFRGQRIWDATIRHLLSIGMASADKVLLTGCSAGGLAAILHCDEFRAFFPPTTTVKCLADAGLFLDAADVSGGRSLRSYYSDIVAMQGVAPNLPPACTARLDTTSCFFPQNVIDGINTPIFLLNAAYDVWQIQESLAPDGADPSGAWRTCKSNRSACDASQLTFLQDFRDQMVASVKGFSGSRSNGLFINSCFAHCQSELPTTWSNAAGGSPAIQNKGIAKSVGDWYFGRAQVKAIDCRYPCDGTCRNII

SEQ ID NO: 82226 - protein, 298 aa, Setaria italica
  misc_feature (258)..(258): Xaa can be any naturally occurring amino acid
  Transcript Sequence Number=SeqID_16252
  Gene Ontology: Mol. function=endodeoxyribonuclease activity, producing 5'-phosphomonoesters; Cellular component=mitochondrion
  Homolog annotation: Hit_ID=O65576; Match level="QueryCoverage=100%, HitCoverage=47%, E-value=1e-133, Identity=73%"; Hit description=ABC1 protein
  Pfam annotation: Domain name=ABC1; Domain location=2-78; Score=39.4; E_value=9.9e-09; Accession=PF03109.8; Description=ABC1 family
MKIQYPGVADSIESDIENVRLLLTYTNLIPKGLFLDRAMKVAKQELARECDYVLEASNQKRYKELLSDSDGYYVPKVIDQLSSKKVLTSEFVPGVPIDKVAQLSQETRNYVGCKLLELTVKELFVFRFMQTDPNWSNFLYDDATRKFNLIDFGAARDFPKRFVDDYLRMVVACANKDRAGVLEMSRRLGFLTGEEPEVMLDAHVQAAFIVGVPFSKPGGHDFRANNITHSVSNLGATMLKHRLTPPPDEVYSLHRKLXSGAFLACIKIGAVVPCREMLFQVYEQYNFSNDYTDVAAST

SEQ ID NO: 82227 - protein, 74 aa, Setaria italica
  Transcript Sequence Number=SeqID_16253
  Homolog annotation: Hit_ID=B4FZ70; Match level="QueryCoverage=86%, HitCoverage=13%, E-value=5e-14, Identity=68%"; Hit description =KANADI3
QIFQTKLLFRDQWLPPGACNAETHNSVGISSTIEDMEPCGSVGLQQVANHEVSCPSPSLEFTLGRPNWNRMEHD

SEQ ID NO: 82228 - protein, 155 aa, Setaria italica
  Transcript Sequence Number=SeqID_16254
  Homolog annotation: Hit_ID=B5M492; Match level="QueryCoverage=96%, HitCoverage=34%, E-value=5e-24, Identity=48%"; Hit description =Kanadi1
PLQECNRTVKSTDKPATSSGPVDGGGSGDDDLPVPDAGQAPSAGGDTSPQTITGHRSASSEGAASHAGGDVECSSADDSDGGQPRSGASSRDQWLPPGACNAETHNSVGISSTIEDMEPCGSVGLQQVANHEVSCPSPSLEFTLGRPNWNRMEHD

SEQ ID NO: 82229 - protein, 333 aa, Setaria italica
  Transcript Sequence Number=SeqID_16255
  Gene Ontology: Cellular component=plasma membrane
  Homolog annotation: Hit_ID=Q00RR3; Match level="QueryCoverage=100%, HitCoverage=100%, E-value=1e-91, Identity=57%"; Hit description =H0525G02.7 protein
MARHEASASAAGVDFHLPDEILAVIPTDPYEQLDVARKITSMAIASRVSRLEADAGRLRRDLADRDRTEAELRARLADSDARLAAALEENAKLAKERDSLAVTAKKLARNLAKLEAFKKQSMKSLSEDNLLQLSETGQDHDAEDNLTARVPSWKDEVSSSHSSSDTSSRSTKTESTHGGGYQFSITPHIPQKLAPGSTPMISSSAGSPRAYSTGPSSPKFLSGPTSPTRSRSESQSTFSSWQGSSSHQYSAPTSPPQRRSLTGRPRIDGKEFFRQARTRLSYEQFGAFLANIKEFNAQKQSREDTLSKAEEIFGAEHKDLYISFQNMLNRNQS

SEQ ID NO: 82230 - protein, 187 aa, Setaria italica
  Transcript Sequence Number=SeqID_16256
  Gene Ontology: Mol. function=protein binding; Biological process =protein metabolic process
  Homolog annotation: Hit_ID=Q6Z517; Match level="QueryCoverage=80%, HitCoverage=13%, E-value=1e-10, Identity=33%"; Hit description=101 kDa heat shock protein; HSP101-like protein
DRRTRARKDHSAREPLPLDLNLSMSDDHIDAIDDSGGEGSRNSSSDLTVDHEQDYGQPAPARCSAPSNVTELIKAVDGVVVFKPVNSEPLKRSFSDLVPAKLGDITGGGGWPSVHVDDGLLDRLAAGAVRTTATPALDAWAGEVLCPSLRQFKRSLSTNDVDGATVEGSGRRKGGEVFPMPVTVDGN

SEQ ID NO: 82231 - protein, 149 aa, Setaria italica
  Transcript Sequence Number=SeqID_16257
NIYLIHQYSANHEMISPHVNTTLMSIQLSHSQKQKSPPHLQLHKWRIKKQNKKNPLMSLHLQDWRALFLAPNHNQQLPLLPHATTADGFVRSSAAGRRRRRRRRPRPRRRRRRAPSGPGGTCAAAPRGAPRHPPARGRPPPLATRQPLL

SEQ ID NO: 82232 - protein, 83 aa, Setaria italica
  Transcript Sequence Number=SeqID_16258
  Gene Ontology: Mol. function=serine-type endopeptidase activity; Cellular component=cytoplasm; Biological process=proteolysis
  Homolog annotation: Hit_ID=B4FA93; Match level="QueryCoverage=80%, HitCoverage=22%, E-value=2e-29, Identity=94%"; Hit description=ATP -dependent Clp protease proteolytic subunit
  Pfam annotation: Domain name=CLP_protease; Domain location=1-83; Score=-36.9; E_value=8.6e-06; Accession=PF00574.15; Description=Clp protease
MICDFFVYRNQIKPKVGTVAFGVVASQAAIILAGGEKGMRYAMPNTRVMIHQPQGGSEGNVEEVRRQVGETIYARDVSICNYE

SEQ ID NO: 82233 - protein, 260 aa, Setaria italica
  Transcript Sequence Number=SeqID_16259
  Gene Ontology: Mol. function=serine-type endopeptidase activity; Cellular component=cytoplasm; Biological process=proteolysis
  Homolog annotation: Hit_ID=B9F8Z4; Match level="QueryCoverage=100%, HitCoverage=100%, E-value=1e-124, Identity=81%"; Hit description=ATP- dependent Clp protease proteolytic subunit
  Pfam annotation: Domain name=CLP_protease; Domain location=80-259; Score=275.9; E_value=8.9e-80; Accession=PF00574.15; Description=Clp protease
  Subcellular localization annotation: CTP_CleavageSite=64; ConfidenceScore=5.63e-01
MAPMATISAPLAARSAPFGLLSHRQNGARARLALRGLQFASRGVASQQDKRKRCHSSLRLNTIVASENENPPLMPAIMTPAGPLDLATVLLGNRVIFIGQYINSQVAQRVISQLVTLAAVDEEADILIYLNCPGGSLYSILAIYDCMSWIKPKVGTVAFGVVASQAAIILAGGEKGMRYAMPNTRVMIHQPQGGSEGNVEEVRRQVGETIYARDKVDKMFAAFTGQPLDMVQQWTERDRFMSSSEAMDFGLVDALLETRY

SEQ ID NO: 82234 - protein, 57 aa, Setaria italica
  Transcript Sequence Number=SeqID_16260
  Homolog annotation: Hit_ID=B9RFY8; Match level="QueryCoverage=66%, HitCoverage=4%, E-value=8e-10, Identity=76%"; Hit description =Pentatricopeptide repeat-containing protein, putative
MAPEKEEPCAGYRHGPPWVFKGSALYQLHLVKASTARAFVPRGLRLVEAFGYTLGGM

SEQ ID NO: 82235 - protein, 108 aa, Setaria italica
  Transcript Sequence Number=SeqID_16261
QTTYNKDNSTPHRHRSCQPLHSTSTWHLPKLGAHKDPAAMAAITGGRALAVAALLCAMAAMAAAQSASNVRATYHLYNPAQNGWDLNRVSAYCATTAACWRPTWRSRR

SEQ ID NO: 82236 - protein, 196 aa, Setaria italica
  Transcript Sequence Number=SeqID_16262
  Gene Ontology: Mol. function=chitinase activity; Cellular component =cellular_component; Biological process=defense response to bacterium
  Homolog annotation: Hit_ID=B6SH12; Match level="QueryCoverage=57%, HitCoverage=74%, E-value=1e-57, Identity=91%"; Hit description=Win1
  Pfam annotation: Domain name=Barwin; Domain location=77-196; Score =307.3; E_value=3.1e-89; Accession=PF00967.9; Description=Barwin family
NVLRLVTLNLLVYFLLFVLPTPHRHRSCQPLHSTSTWHLPKLGAHKDPAAMAAITGGRALAVAALLCAMAAMAAAQSASNVRATYHLYNPAQNGWDLNRVSAYCATWDANKPLSWRQKYGWTAFCGPSGPRGQASCGKCIKVTNRATGASTVARIVDQCSNGGLDLDFETVFKKIDTNGQGYQMGHLNVDYQFVAC

SEQ ID NO: 82237 - protein, 117 aa, Setaria italica
  misc_feature (55)..(55): Xaa can be any naturally occurring amino acid
  Transcript Sequence Number=SeqID_16263
  Gene Ontology: Mol. function=binding; Biological process=cell redox homeostasis
  Subcellular localization annotation: CTP_CleavageSite=56; ConfidenceScore=5.82e-01
SPVSPLPYSSSKHPTPSSSSGSSGSVSRAPPAHASGLASRRSHSGEIPLPSDAPXRGAARPGHRRTGSGPLIFTSGASACSSSATSPLTNALPAGNICPSGRIAKPLPSCSAATPPA

SEQ ID NO: 82238 - protein, 54 aa, Setaria italica
  Transcript Sequence Number=SeqID_16264
  Gene Ontology: Mol. function=sodium:hydrogen antiporter activity; Cellular component=integral to membrane; Biological process=sodium ion transport
  Homolog annotation: Hit_ID=Q7XYX0; Match level="QueryCoverage=88%, HitCoverage=8%, E-value=4e-17, Identity=93%"; Hit description =Sodium/hydrogen exchanger
MGLGVVAQLVRLGVVGSTSDHASVVSINLFVALLCACIVLGHLLEENRGCAPAW

SEQ ID NO: 82239 - protein, 89 aa, Setaria italica
  Transcript Sequence Number=SeqID_16265
  Gene Ontology: Mol. function=sodium:hydrogen antiporter activity; Cellular component=integral to membrane; Biological process=sodium ion transport
  Homolog annotation: Hit_ID=Q7XYX0; Match level="QueryCoverage=100%, HitCoverage=16%, E-value=7e-42, Identity=96%"; Hit description =Sodium/hydrogen exchanger
MGLGVVAQLVRLGVVGSTSDHASVVSINLFVALLCACIVLGHLLEENRWVNESITALIIGLCTGVVILLTTKGKSSHILVFSEDLFFIY

SEQ ID NO: 82240 - protein, 71 aa, Setaria italica
  Transcript Sequence Number=SeqID_16266
  Gene Ontology: Mol. function=hydrogen ion transporting ATP synthase activity, rotational mechanism; Cellular component=proton -transporting ATP synthase complex, catalytic core F(1); Biological process=ATP synthesis coupled proton transport
  Homolog annotation: Hit_ID=Q01859; Match level="QueryCoverage=76%, HitCoverage=9%, E-value=2e-24, Identity=98%"; Hit description=ATP synthase subunit beta, mitochondrial
  Pfam annotation: Domain name=ATP-synt_ab_C; Domain location=1-67; Score=32.3; E_value=2e-06; Accession=PF00306.19; Description=ATP synthase alphabeta chain, C terminal domain
KIQRFLSQPFHVAEVFTGAPGKYVELKESVKSFQGVLDGKYDDLPEQSFYMVGGIEEVIAKAEKIAKESAS

SEQ ID NO: 82241 - protein, 64 aa, Setaria italica
  Transcript Sequence Number=SeqID_16267
DYGYDCLYWNLKACALLSIYYWPIAIQYRDISSHESFYALVHTFQRIPTTQLTCSKTEQLLDIS

SEQ ID NO: 82242 - protein, 352 aa, Setaria italica
  Transcript Sequence Number=SeqID_16268
  Gene Ontology: Cellular component=plasma membrane
RNLASWNICPIKAGVDAKELFHLYIVLWIEDKRRMLLENCRLDKVKWSGVRTQHMTTPFVDEMYDLLKNTLTEYEVIICRWPEYIFVLENAIADVEKAVIESLEKQYADVLAPLKDCIAPKKFGLKVVQKLTKRNSTVPYIVPEDLGILLNTLKRLLDVLRPRIESHLKSWSSCIPNGGNSAAIGEKLSEVTVTLRAKFRNYMQAVVEKLAENTRMQNTTKLKKIIQDSKELVIESDIRNRMQALKDQLIEAINHVHKVSEVHVFVAICRGFWDRMGQDVLSFLENRKENKSWYKGARVAVSVLDDTFASQLQQLLGNTIPQKDLEPPRSIMEVRSILCKDAPRQKSSSFYY

SEQ ID NO: 82243 - protein, 273 aa, Setaria italica
  Transcript Sequence Number=SeqID_16269
  Gene Ontology: Mol. function=transporter activity; Cellular component= intracellular; Biological process=transport
  Homolog annotation: Hit_ID=Q53K09; Match level="QueryCoverage=79%, HitCoverage=81%, E-value=1e-100, Identity=78%"; Hit description =CRAL/TRIO domain, putative
  Pfam annotation: Domain name=CRAL_TRIO; Domain location=67-240; Score= 97.7; E_value=4.1e-26; Accession=PF00650.12; Description=CRALTRIO domain
  Pfam annotation: Domain name=CRAL_TRIO_N; Domain location=1-54; Score= 12.5; E_value=0.0046; Accession=PF03765.7; Description=CRALTRIO, N -terminus
  Pfam module annotation: Pfam domain module=CRAL_TRIO::CRAL_TRIO_N; Domain location=67-240::1-54
PDVNSNDAEQREAKYCSKACLKRYLEARNWNVAKSRKMLEESLKWRAAYRPEDIRWPDVSAEGETGKMYRASFRDREGRTVVVMRPTKQNTSSHEGQIRFLVHTLENAILHLPETQEKMVWLIDFTGWTMAHASPIKTSRETANILQNHYPERLAIGFLFNPPKVFEAFFKVIKVFLDPKTIEKVNFVYQKDEESMKVMYKYIDPEVLPVEFGGNNNVAYNHEEYSESMMKDDIKTANFWADDAKTDHANSAINGTLVPEVTPQPSLLAAKAS

SEQ ID NO: 82244 - protein, 103 aa, Setaria italica
  Transcript Sequence Number=SeqID_16270
  Gene Ontology: Mol. function=protein phosphatase type 2A regulator activity; Cellular component=protein phosphatase type 2A complex; Biological process=signal transduction
  Homolog annotation: Hit_ID=B9RAZ6; Match level="QueryCoverage=68%, HitCoverage=13%, E-value=3e-16, Identity=59%"; Hit description =Protein phosphatase pp2a regulatory subunit B, putative
  Pfam annotation: Domain name=PP2A_B_N; Domain location=9-81; Score =104.2; E_value=4.4e-28; Accession=PF10586.1; Description=Serine -threonine phosphatase 2A subunit B al
RTDYAVAPPPRYSFAMEFQSHEPEFDVLHSLEIGEKIKKVRWCARPNHRSLCMLSANDRTVKLWKVSERKAPKKGDGERRRSTSALPLQEPHSEWAATKHRDR

SEQ ID NO: 82245 - protein, 114 aa, Setaria italica
  Transcript Sequence Number=SeqID_16271
  Gene Ontology: Mol. function=protein binding
  Homolog annotation: Hit_ID=B6TSC4; Match level="QueryCoverage=49%, HitCoverage=17%, E-value=4e-22, Identity=89%"; Hit description =Ubiquitin-protein ligase
  Pfam annotation: Domain name=F-box; Domain location=19-67; Score =23.1; E_value=0.0012; Accession=PF00646.25; Description=F-box domain
MSLLPPPASPMAEAEAEARDWAEMPSDALAAVFGKLDVAEILTGAGLVCRAWRRLAATDPTLWRRVDMCLQGDLLETEEAEATARGAEAMARAAVDRAAGTMEAFLGRRLRHRP

SEQ ID NO: 82246 - protein, 108 aa, Setaria italica
  Transcript Sequence Number=SeqID_16272
  Homolog annotation: Hit_ID=B6UAY8; Match level="QueryCoverage=98%, HitCoverage=27%, E-value=1e-18, Identity=45%"; Hit description=F-box protein
  Subcellular localization annotation: CTP_CleavageSite=38; ConfidenceScore=5.01e-01
IDNGFCKSLCRRICPEVANFTRAVVVTRSPPAAAAAARASSGSSRDAESRTRERDHAVYSCLGGALVSDKPSMDCILHCIGASSTDYFPDETIDNTLEPQERINHRPS

SEQ ID NO: 82247 - protein, 59 aa, Setaria italica
  Transcript Sequence Number=SeqID_16273
PSLFRYALVSCCHVPIDAVFALNQFIAPNPKLRCYMVSDVILSSDQDVVYLYLFLTFLC

SEQ ID NO: 82248 - protein, 52 aa, Setaria italica
  Transcript Sequence Number=SeqID_16274
  Gene Ontology: Mol. function=beta-amylase activity; Biological process=polysaccharide catabolic process
  Homolog annotation: Hit_ID=B6TYJ8; Match level="QueryCoverage=100%, HitCoverage=10%, E-value=7e-13, Identity=74%"; Hit description=Beta -amylase
GHWPLFVQFVRALECPEEAHEDDLPGGIAGGERLTVPSASAVQGDARAVQTV

SEQ ID NO: 82249 - protein, 249 aa, Setaria italica
  misc_feature (54)..(54): Xaa can be any naturally occurring amino acid
  Transcript Sequence Number=SeqID_16275
  Gene Ontology: Mol. function=phosphatase activator activity; Cellular component=protein phosphatase type 2A complex; Biological process =negative regulation of protein amino acid dephosphorylation
  Homolog annotation: Hit_ID=B6TQY2; Match level="QueryCoverage=99%, HitCoverage=64%, E-value=1e-134, Identity=91%"; Hit description =Serine/threonine-protein phosphatase 2A activator 2
  Pfam annotation: Domain name=PTPA; Domain location=2-249; Score =405.2; E_value=1.1e-118; Accession=PF03095.7; Description =Phosphotyrosyl phosphate activator (PTPA) protein
PLLGLISALAALVASTPPLPHNSRYGNPAFRLWHEKLTDSANDLIARITSTAAXPADLAGAEVELVPYLLDSFGNATRIDYGTGHETNFAAFLYCLARLGLITEPDYPAVVLRVFAEYLNLMRTLQDTYQLEPAGSHGVWGLDDFHFLPFIFGAAQLIDHKYMKPKSIHNPDILENFSKEYMYLACVAYVKKIKKGPFAEHSPMLDDISGVPNWKKVNSGLLKMYKAEVLEKVPIMQHFLFGSLIKWED

SEQ ID NO: 82250 - protein, 73 aa, Setaria italica
  Transcript Sequence Number=SeqID_16276
  Gene Ontology: Mol. function=transcription factor activity; Cellular component=nucleus; Biological process=regulation of transcription, DNA-dependent
  Homolog annotation: Hit_ID=B4FT20; Match level="QueryCoverage=76%, HitCoverage=13%, E-value=2e-14, Identity=69%"; Hit description=AP2 domain transcription factor
MELTLLHGKLHRTIAIAVYLGAYDDEEAAARAYDLAALKYWGAGTQINFPVSDYARDLEEMQMISKEDYLVSL

SEQ ID NO: 82251 - protein, 180 aa, Setaria italica
  Transcript Sequence Number=SeqID_16277
  Gene Ontology: Mol. function=protein dimerization activity; Cellular component=nucleus; Biological process=regulation of transcription, DNA-dependent
  Homolog annotation: Hit_ID=A2Q4V1; Match level="QueryCoverage=57%, HitCoverage=22%, E-value=9e-27, Identity=57%"; Hit description=CAMP response element binding (CREB) protein
  Pfam annotation: Domain name=bZIP_1; Domain location=76-140; Score =34.6; E_value=4.1e-07; Accession=PF00170.13; Description=bZIP transcription factor
  Pfam annotation: Domain name=bZIP_2; Domain location=76-126; Score =27.5; E_value=5.4e-05; Accession=PF07716.7; Description=Basic region leucine zipper
  Pfam module annotation: Pfam domain module=bZIP_1::bZIP_2; Domain location=76-140::76-126
  Subcellular localization annotation: CTP_CleavageSite=7; ConfidenceScore=5.47e-01
IAEPAPKGSMGTSNTAPIAGAGPSKQPPPPSNHPSRPTPAALKDGKPAGVKREGSSGAATGSGTPSTSNQQEGPRTPDAKTLRRLAQNREAARKSRLRKKAYIQNLETSRIRLSQLEQELHRSRNQGAVFGGGALSGSNGGLSPEAAWFDMEHARWQEEHGKMMRHLRAALEAADQQHPA

SEQ ID NO: 82252 - protein, 138 aa, Setaria italica
  Transcript Sequence Number=SeqID_16278
EIACRGALPRSKEAVPDIDGSLVGSGKSKAVLKEGSWASGKQSAIQIHAQLVIYGNCNEFFHKPLATSLNRIFLLQRLCAISVHGSEVIDAGLWRGFWLVDVACLREETLGAGKAVSFFRDDCTEATGLAQKTDTRWC

SEQ ID NO: 82253 - protein, 216 aa, Setaria italica
  Transcript Sequence Number=SeqID_16279
  Gene Ontology: Mol. function=nucleic acid binding; Cellular component= nucleus; Biological process=nuclear mRNA splicing, via spliceosome
  Homolog annotation: Hit_ID=Q6YXY3; Match level="QueryCoverage=99%, HitCoverage=17%, E-value=1e-119, Identity=96%"; Hit description =Putative splicing factor 3b, subunit 3, 130kDa
YEETPQLFTACGRGPRPTLRILRPGLAISEMARSMLPAEPIAVWTVKKNINDMFDAYIVVSFANVTLVLSIGETIEEVSDSQFLDTTHSLAVTLLGEDSLMQVHPSGIRHIREDGRVNEWRTPGKKTITKVGSNRLQVVIALSGGELIYFEMDMTGQLMEVEKQDMSGDVACLAIAPVPEGRQRSRFLAVGSYDNTIRILSLDPDDCLQPLSVQNV

SEQ ID NO: 82254 - protein, 111 aa, Setaria italica
  Transcript Sequence Number=SeqID_16280
  Gene Ontology: Mol. function=sialyltransferase activity; Cellular component=integral to Golgi membrane; Biological process=protein amino acid glycosylation
  Homolog annotation: Hit_ID=B6TUC0; Match level="QueryCoverage=96%, HitCoverage=28%, E-value=1e-28, Identity=68%"; Hit description =Sialyltransferase-like protein
RVVSRLRVPFDTLPSDESLLAAFRASLRSFHLAHRRRRGGDVAGVMGELAGQLGRPRRFPTCAVVGNSGILLGSGRGAQIDAHDLVIRLNNARVAGYAADVGTKTSILLRQ

SEQ ID NO: 82255 - protein, 272 aa, Setaria italica
  Transcript Sequence Number=SeqID_16281
  Gene Ontology: Mol. function=sialyltransferase activity; Cellular component=integral to Golgi membrane; Biological process=protein amino acid glycosylation
  Homolog annotation: Hit_ID=B6TUC0; Match level="QueryCoverage=86%, HitCoverage=58%, E-value=1e-120, Identity=87%"; Hit description =Sialyltransferase-like protein
  Pfam annotation: Domain name=Glyco_transf_29; Domain location=1-259; Score=-26.6; E_value=1.9e-05; Accession=PF00777.10; Description =Glycosyltransferase family 29 (sialyltransferase)
ARRQLRRRGGDDDDVVAGVAMGGIGDLLDRHPRRERFPTCAVRRELVGILLGSGRGAQIDAHDLVVRLNNARVAGYAADVGAKTSLSFVNSNILHYCAVRSAITTGGCSCHPYGRTVPMAMYVCQPAHLLDALICNATATPASPFPLLVTDARLDALCARIAKYYSMRRLVSTTGEPPGNWTRRHDERYFHYSSGLQAVVMALGACDEVSLFGFGKAVGAKHHYHTNQKKELDLHDYEAEYQFYRDLQARPEAVPFLDEAPGFKMPPVKLYW

SEQ ID NO: 82256 - protein, 220 aa, Setaria italica
  misc_feature (85)..(85): Xaa can be any naturally occurring amino acid
  Transcript Sequence Number=SeqID_16282
  Gene Ontology: Mol. function=catalytic activity; Cellular component =chloroplast; Biological process=lipoate biosynthetic process
  Homolog annotation: Hit_ID=B6U7E2; Match level="QueryCoverage=96%, HitCoverage=65%, E-value=8e-94, Identity=72%"; Hit description =Lipoyltransferase
  Pfam annotation: Domain name=BPL_LipA_LipB; Domain location=52-146; Score=39.5; E_value=1.4e-08; Accession=PF03099.11; Description =Biotinlipoate AB protein ligase family
CECFDLHQQLVPYAEAYAWQKAIIKRRIGLLDRGEDHSDTLIALQHPPVYTLGSVSKEEYLHFKKEDAPFEVHKINRGGEVTYHXWLDRSLEELIIRALKSAFSIKASRVEGLTGVWVGDQKVAALGIHGSRMIVYHGLALNVTTDLTPFQMIDPCGIKDRGVGSIKQIFQEASHGTEIDDTLLMDMAYNSMIKEFAELFQLDLDTRLDCSFQVISKLHR

SEQ ID NO: 82257 - protein, 119 aa, Setaria italica
  misc_feature (37)..(37): Xaa can be any naturally occurring amino acid
  misc_feature (48)..(48): Xaa can be any naturally occurring amino acid
  misc_feature (63)..(63): Xaa can be any naturally occurring amino acid
  Transcript Sequence Number=SeqID_16283
  Gene Ontology: Mol. function=catalytic activity; Cellular component =chloroplast; Biological process=lipoate biosynthetic process
  Homolog annotation: Hit_ID=B6U7E2; Match level="QueryCoverage=94%, HitCoverage=33%, E-value=1e-30, Identity=60%"; Hit description =Lipoyltransferase
LNKQLLHPIINVYHGRYLDWYLRSEVIIRALQSMFSXEGLTGVWIGIXQVAPLGIRGTRMIVXHGLALNVTTDLTPIKLIDPCGIKDRGVGSIKVMLQKESDGRGRETDDILLMDTATV

SEQ ID NO: 82258 - protein, 57 aa, Setaria italica
  Transcript Sequence Number=SeqID_16284
VKLLDFSYYLSLGLFGNFLPLLLINSYSHVEIALFVSCLGCLSVTFLFTIYPAFLFE

SEQ ID NO: 82259 - protein, 94 aa, Setaria italica
  Transcript Sequence Number=SeqID_16285
  Homolog annotation: Hit_ID=B6TQT0; Match level="QueryCoverage=38%, HitCoverage=27%, E-value=2e-11, Identity=83%"; Hit description=60S ribosomal protein L18A
MSGEEAADKGGGYGTFQGPPSYPPPRPPPLGFPQPVPPPALSAAHHRAAYHKAAAPPAQDYESGVRGHGHDRLPCCGIGFGWFLFVIGFFLGAI

SEQ ID NO: 82260 - protein, 60 aa, Setaria italica
  Transcript Sequence Number=SeqID_16286
QALGCSITIHNSLLNLLPSSIQTLLQSPDEKFSAETCYQRNQNYPIGSIPPRIQAHPIYL

SEQ ID NO: 82261 - protein, 353 aa, Setaria italica
  Transcript Sequence Number=SeqID_16287
  Gene Ontology: Mol. function=[ribulose-bisphosphate carboxylase] -lysine N-methyltransferase activity; Cellular component=chloroplast
  Homolog annotation: Hit_ID=B6U6Z1; Match level="QueryCoverage=99%, HitCoverage=69%, E-value=0.0, Identity=93%"; Hit description =Ribulose-1,5-bisphosphate carboxylase/oxygenase small subunit N -methyltransferase I
  Pfam annotation: Domain name=Rubis-subs-bind; Domain location=185 -320; Score=122.4; E_value=1.5e-33; Accession=PF09273.3; Description =Rubisco LSMT substrate-binding
  Pfam annotation: Domain name=SET; Domain location=1-160; Score=47.4; E_value=5.4e-11; Accession=PF00856.20; Description=SET domain
  Pfam module annotation: Pfam domain module=Rubis-subs-bind::SET; Domain location=185-320::1-160
PYLISEASLEGSSKWSNYIAALPRQPYSLLYWTRAELDAYLVASPIRERAIQRITDVIGTYNDLRDRIFSKHSDLFPEEVYNIETFLWSFGILFSRLVRLPSMDGRVALVPWADMLNHSPEVETFLDFDKSSQGIVFTTDRSYQPGEQVFISYGKKSSGELLLSYGFVPKEGTNPNDSVELLVSLDKSDKCYKEKLQALKRNGLSASESFPLRVTGWPVELMAYAFLVVSPPDMSQRFEEMAIAASNKNSSKPGFNYPELEEQALQFILDCCESNIAKYTKYLEGGNGSPQVSINAKQANRTLLLKQLANKLCISERRILYRTQYILRRRLRDMRGGELRALSLFNGLRKLFK

SEQ ID NO: 82262 - protein, 113 aa, Setaria italica
  Transcript Sequence Number=SeqID_16288
  Gene Ontology: Mol. function=ATP binding; Biological process=apoptosis
  Homolog annotation: Hit_ID=Q5JMA3; Match level="QueryCoverage=96%, HitCoverage=19%, E-value=2e-21, Identity=43%"; Hit description =Fusarium resistance protein I2C-5-like
IHNWFWNMILECQRNNIERNILIFGEHPQSLLWKSQIAYVWTLSNISVRVKVLHFQTRSPLNDVPKIMLHEVHTSAKAHGKLDVLVWKSGIPPYHSYIMKCEIEAPEDMMVKK

SEQ ID NO: 82263 - protein, 89 aa, Setaria italica
  misc_feature (11)..(11): Xaa can be any naturally occurring amino acid
  Transcript Sequence Number=SeqID_16289
LIQQLNRAAIXGGAPVTAAAGRHIGGSILLLLLGLAARRLQLMIHSRAVQAFATCLHARWMDGCRMHQQANKAVVVADADGELRSIQLA

SEQ ID NO: 82264 - protein, 97 aa, Setaria italica
  misc_feature (42)..(42): Xaa can be any naturally occurring amino acid
  Transcript Sequence Number=SeqID_16290
MGSLGPSVVTLRQQPQAGKLTAATAAGGGHHDQQQGGGGGGXFRMPLHYPRYKKADYEAMPEWHVDCLLREYGLPADGDLDSKRRFAMGAFLWPDQY

SEQ ID NO: 82265 - protein, 100 aa, Setaria italica
  Transcript Sequence Number=SeqID_16291
  Subcellular localization annotation: CTP_CleavageSite=27; ConfidenceScore=5.03e-01
MGSLGPTTISSMSMAKAAGVGTKNSAVAATDQQQAAGQKNCSSYAFQMPLHYPRYKKADYETMPEWRVDCLLREYGLPVAGDLDSKRKFAMGSFLWPDQY

SEQ ID NO: 82266 - protein, 99 aa, Setaria italica
  Transcript Sequence Number=SeqID_16292
MGSLGPTVTVSMAKPNGGVGGQPPEQERNEGGGRCGVFGSGVCGFRMPLHYPRYKKADYEAMPEWRVDCLLREYGLPADGDLDSKRRFAMGAFLWPDEY

SEQ ID NO: 82267 - protein, 166 aa, Setaria italica
  Transcript Sequence Number=SeqID_16293
MAALRIRTPAGPGDPRRRNLASSPAQLGPDLIGFSSSLVPVGVGYVGDHRRVGNAVVTCCGFFADNVRRKCHPRASLKNGLVCSLEGDGSRESTLCTSVPSETSSCSEVPSVLGQKIAQGKDGNPRASAETKKEGKLWRRLGGCKKLRRHRAPKHGPGKAGMFADL

SEQ ID NO: 82268 - protein, 67 aa, Setaria italica
  Transcript Sequence Number=SeqID_16294
VLPVLILLNYIAVTWQHKFSITALLAVPYSVINMRPDKAAVYFLFGLCSINLCSLVGGSCWVLGFQL

SEQ ID NO: 82269 - protein, 97 aa, Setaria italica
  Transcript Sequence Number=SeqID_16295
KHILKPTQHCHYKELKTSCKRSSENDLFKKTTCTVYMNEIIIEEKIANVQLCHAYTHLYTVGKVSILSPANKVFLSATSTITNINKRVYGCIVIILS

SEQ ID NO: 82270 - protein, 138 aa, Setaria italica
  misc_feature (1)..(22): Xaa can be any naturally occurring amino acid
  Transcript Sequence Number=SeqID_16296
XXXXXXXXXXXXXXXXXXXXXXFFFKFSGGHQEIDRRFNTKKLGQIHSNNQTSHAHNCTVTILHKYSTIQFQGKALEQTCVYVQGAQPHTHFSSSNKAQVAFQTHWYNFKPNTKGGKIIETSLSLSLSLFFYLLLTFL

SEQ ID NO: 82271 - protein, 66 aa, Setaria italica
  misc_feature (14)..(14): Xaa can be any naturally occurring amino acid
  Transcript Sequence Number=SeqID_16297
  Gene Ontology: Mol. function=protein serine/threonine kinase activity; Cellular component=cell surface; Biological process =protein amino acid phosphorylation
  Homolog annotation: Hit_ID=Q01J05; Match level="QueryCoverage=90%, HitCoverage=7%, E-value=3e-18, Identity=71%"; Hit description =OSIGBa0145C12.7 protein
MHDGINLEEVERAXCRVACWCIQDHESRRLTMGEVVRILEGLIKVDVPPMPKVLEAISGGTDSTIA

SEQ ID NO: 82272 - protein, 331 aa, Setaria italica
  misc_feature (14)..(14): Xaa can be any naturally occurring amino acid
  misc_feature (38)..(38): Xaa can be any naturally occurring amino acid
  misc_feature (216)..(216): Xaa can be any naturally occurring amino acid
  Transcript Sequence Number=SeqID_16298
  Gene Ontology: Biological process=protein localization
  Homolog annotation: Hit_ID=B9RXC4; Match level="QueryCoverage=87%, HitCoverage=8%, E-value=6e-66, Identity=46%"; Hit description =Vacuolar protein sorting-associated protein, putative
VLILLLMTRLGFVXPYRIDNFSMEKLRIYQQRCESIEXIVYPYTSCEYAWDEPCYSHRLTVEIPGERSLGTFNLDILNDDVHVLLPSTSEKPERKFCMSVHAEGAIKVLSVIDSNCHNTETKEPKEPKVADQKLELEMNFAEVINIHIPFIAISLISSSPQELLFVSAKDMTIVAMQSLDQQRFTVEIQSMQIDNQFPDSPHPVMLSFEGSQKGNXEFFKSKDTKLRSASDNLSNTTEPVLRFAAAKWRTRDVSFVSYQCINISVAPVRLELEERLVLSMIEFFRSVSSRINLGHLEENLELSILGGATDLLREYEKISKHLSDKPLVQDS

SEQ ID NO: 82273 - protein, 567 aa, Setaria italica
  Transcript Sequence Number=SeqID_16299
  Gene Ontology: Biological process=protein localization
  Homolog annotation: Hit_ID=B9RXC4; Match level="QueryCoverage=95%, HitCoverage=16%, E-value=1e-142, Identity=47%"; Hit description =Vacuolar protein sorting-associated protein, putative
CCLVGFVLSSLKIGSNLEYCSSILFSYQCINISVAPVRLELEERLVLSMIEFFRSVSSRINLGHLEENLELSILGGATDLLREYEKISKHLSDKPLVQDSELLPSVVPVGAPWQQIHLLARKQKKVHIELFQLTPVKLTFSFTSTPWLSRNECGSDPSTGFNNTTAIQRGLMALLDVEGVPVHLGEIMVENLMASWQSVQDILVRHYSRQILHELYKVLGSAGVIGNPMGFARNVGFGLKDFISASRKGKLQSPVELLNGLAQGSKTLIGSTVYAVSSATSHFSKTAYKGLVAFTYDEQATSKMEERERQLGLHGEGVLNGFLEGLTGLLQSPIRGAEKHGLPGVISGLAMGTAGLVARPMASILEATGRTAQSIRNRSNPHESNRLRVRFPRPVARDRPLFPYSWEEAIGISLLARADGGRLKEETFVMCKTLKEPGKFLVLTEKLLLLVSSPYLVDLGSPQFVGVPPDPQWSIDTEMHLKSVVHLDRSLEVVNIVGSNGETSPRDKRGGVRNRVMNSAFVPLFHLSIEVPNVEDAEGTLQVLEALIDKGRARRWDKNILHRSNIS

SEQ ID NO: 82274 - protein, 122 aa, Setaria italica
  misc_feature (4)..(4): Xaa can be any naturally occurring amino acid
  Transcript Sequence Number=SeqID_16300
FFFXFFFFFLSSLIICSFLPVFFSTGLQNCHLLTLLYRIHVHTWIGVVSTTRSYLHYTKRSNIHKNKTKKLKEKKGRRRRTPTTRVHSVRGTWTPKVSGQGRSFQLRRGAPEHLGEHGGLLR

SEQ ID NO: 82275 - protein, 103 aa, Setaria italica
  Transcript Sequence Number=SeqID_16301
  Gene Ontology: Mol. function=kinase activity; Biological process =protein amino acid phosphorylation
  Homolog annotation: Hit_ID=Q6EQG8; Match level="QueryCoverage=94%, HitCoverage=13%, E-value=1e-37, Identity=76%"; Hit description =Leucine-rich repeat family protein /protein kinase family protein -like
KQIKIVVQPCLKRNFPCVALNGEYQTSLHINCGDKEVIINQTKYEADTTPKGASLLYVSPGSNWAFSSTGNFMDDNITDDNFIATSTSKLAMPNSELYTKARL

SEQ ID NO: 82276 - protein, 250 aa, Setaria italica
  Transcript Sequence Number=SeqID_16302
  Gene Ontology: Mol. function=catalytic activity; Biological process =cellular metabolic process
  Homolog annotation: Hit_ID=B6TPA7; Match level="QueryCoverage=100%, HitCoverage=75%, E-value=1e-101, Identity=68%"; Hit description =Dihydroflavonol-4-reductase
  Pfam annotation: Domain name=3Beta_HSD; Domain location=1-200; Score=- 131.5; E_value=0.042; Accession=PF01073.11; Description=3-beta hydroxysteroid dehydrogenaseisomerase family
  Pfam annotation: Domain name=Epimerase; Domain location=1-176; Score=- 49.7; E_value=0.002; Accession=PF01370.13; Description=NAD dependent epimerasedehydratase family
  Pfam module annotation: Pfam domain module=3Beta_HSD::Epimerase; Domain location=1-200::1-176
VEGCDCVFHTASPFYNNPKDPQVELIDPAVKGTLNVLGSCKKAASVKRVILTSSMAAVVFTEKPLSPDVVVDETSYSIPELCEKAKEWYVLSKTLAEQAAWKFSKDNGIDLVTINPAVVIGPLLQPTLNTSAQIILYLISGSPVYLNYSFGWVNVKDVALAHVLAFETPSASGRYGMVDKVIHFSEVVKIIKDMYPSLPVPEKCVDDELFAPTYQVSRERITSLGVELTPFETSLKETIECLKEKGFVSF

SEQ ID NO: 82277 - protein, 82 aa, Setaria italica
  Transcript Sequence Number=SeqID_16303
  Gene Ontology: Mol. function=cytochrome-b5 reductase activity; Cellular component=mitochondrial intermembrane space; Biological process=oxidation reduction
  Homolog annotation: Hit_ID=B6TCK3; Match level="QueryCoverage=96%, HitCoverage=25%, E-value=4e-37, Identity=93%"; Hit description=NADH -cytochrome b5 reductase-like protein
  Pfam annotation: Domain name=FAD_binding_6; Domain location=2-70; Score=45.6; E_value=1.9e-10; Accession=PF00970.16; Description =Oxidoreductase FAD-binding domain
NHCRAPIGEEVEGRRKFVIRPYTPISDPDSKGYFDLLIKVYPDGKMSQYFASLKPGDVVEVKGPIEKLRYSPNMKKQIGMVR

SEQ ID NO: 82278 - protein, 81 aa, Setaria italica
  Transcript Sequence Number=SeqID_16304
  Gene Ontology: Mol. function=electron carrier activity; Cellular component=mitochondrial intermembrane space; Biological process =oxidation reduction
  Homolog annotation: Hit_ID=B6TCK3; Match level="QueryCoverage=75%, HitCoverage=19%, E-value=8e-22, Identity=83%"; Hit description=NADH -cytochrome b5 reductase-like protein
  Pfam annotation: Domain name=NAD_binding_1; Domain location=1-78; Score=-12.4; E_value=0.057; Accession=PF00175.13; Description =Oxidoreductase NAD-binding domain
LRAILKNPDDNTQVSLIYANVSPDDILLKRELDRLASSYPNFKVFYTVDKPSKVCQQNLLFSQNLYTISAVYPRSFRRPES

SEQ ID NO: 82279 - protein, 68 aa, Setaria italica
  Transcript Sequence Number=SeqID_16305
  Gene Ontology: Mol. function=electron carrier activity; Cellular component=mitochondrial intermembrane space; Biological process =oxidation reduction
  Homolog annotation: Hit_ID=B6TCK3; Match level="QueryCoverage=70%, HitCoverage=15%, E-value=8e-15, Identity=83%"; Hit description=NADH -cytochrome b5 reductase-like protein
VSLIYANVSPDDILLKRELDRLASSYPNFKVFYTVDKPSKVCQQNLLFSQNLYTISAVYPRSFRRPES

SEQ ID NO: 82280 - protein, 224 aa, Setaria italica
  Transcript Sequence Number=SeqID_16306
  Gene Ontology: Mol. function=cytochrome-b5 reductase activity; Cellular component=mitochondrial intermembrane space; Biological process=oxidation reduction
  Homolog annotation: Hit_ID=B6TCK3; Match level="QueryCoverage=99%, HitCoverage=71%, E-value=1e-113, Identity=89%"; Hit description=NADH- cytochrome b5 reductase-like protein
  Pfam annotation: Domain name=FAD_binding_6; Domain location=27-130; Score=104.0; E_value=5.2e-28; Accession=PF00970.16; Description =Oxidoreductase FAD-binding domain
  Pfam annotation: Domain name=NAD_binding_1; Domain location=140-224; Score=74.1; E_value=5e-19; Accession=PF00175.13; Description =Oxidoreductase NAD-binding domain
  Pfam module annotation: Pfam domain module=FAD_binding_6::NAD_binding_ 1; Domain location=27-130::140-224
PPAVAHMEEKGEEAAEKAALNPDKWLEFKLQEKANVSHNSQLFRFSFDPNTKLGLDVASCLITRAPIGEEVEGRRKFVIRPYTPISDPDSKGYFDLLIKVYPDGKMSQYFASLKPGDVVEVKGPIEKLRYSPNMKKQIGMIAGGTGITPMLQVVRAILKNPDDNTQVSLIYANVSPDDILLKRELDRLASSYPNFKVFYTVDKPSNDWRGGVGFISKDMVLKGL

SEQ ID NO: 82281 - protein, 205 aa, Setaria italica
  Transcript Sequence Number=SeqID_16307
  Gene Ontology: Mol. function=cytochrome-b5 reductase activity; Cellular component=mitochondrial intermembrane space; Biological process=oxidation reduction
  Homolog annotation: Hit_ID=B6TCK3; Match level="QueryCoverage=100%, HitCoverage=65%, E-value=1e-112, Identity=95%"; Hit description=NADH- cytochrome b5 reductase-like protein
  Pfam annotation: Domain name=FAD_binding_6; Domain location=1-60; Score=34.4; E_value=4.4e-07; Accession=PF00970.16; Description =Oxidoreductase FAD-binding domain
  Pfam annotation: Domain name=NAD_binding_1; Domain location=70-177; Score=138.3; E_value=2.5e-38; Accession=PF00175.13; Description =Oxidoreductase NAD-binding domain
  Pfam annotation: Domain name=NAD_binding_6; Domain location=65-180; Score=-32.5; E_value=0.043; Accession=PF08030.4; Description=Ferric reductase NAD binding domain
  Pfam module annotation: Pfam domain module=FAD_binding_6::NAD_binding_ 1::NAD_binding_6; Domain location=1-60::70-177::65-180
VEGRRKFVIRPYTPISDPDSKGYFDLLIKVYPDGKMSQYFASLKPGDVVEVKGPIEKLRYSPNMKKQIGMIAGGTGITPMLQVVRAILKNPDDNTQVSLIYANVSPDDILLKRELDRLASSYPNFKVFYTVDKPSNDWRGGVGFISKDMVLKGLPGPGEDSLILVCGPPGMMNHISGDKAKDRSQGELSGLLKDLGYTAEMVYKF

SEQ ID NO: 82282 - protein, 93 aa, Setaria italica
  misc_feature (15)..(15): Xaa can be any naturally occurring amino acid
  Transcript Sequence Number=SeqID_16308
  Gene Ontology: Mol. function=CTP synthase activity; Cellular component=cellular_component; Biological process=pyrimidine nucleotide biosynthetic process
  Homolog annotation: Hit_ID=A2Q3J8; Match level="QueryCoverage=100%, HitCoverage=15%, E-value=1e-30, Identity=72%"; Hit description =Glutamine amidotransferase, class I, active site
  Pfam annotation: Domain name=CTP_synth_N; Domain location=1-93; Score= -39.2; E_value=2.1e-13; Accession=PF06418.6; Description=CTP synthase N-terminus
GTMSPFEHGEVVGFXDGGEVDLDLGNYERFLDIKLTRDNNITTGKIYQSVIDKERRGDYLGKTVQVVPHITDEIQEWIERVAMNPVDGTEEPA

SEQ ID NO: 82283 - protein, 66 aa, Setaria italica
  misc_feature (10)..(10): Xaa can be any naturally occurring amino acid
  Transcript Sequence Number=SeqID_16309
GPCCCRRLQXGRCGFSCWPRRRRCCCCCDTGGGHAGNVIVGRWPAAARRGQAEAQVDEPAARPLRA

SEQ ID NO: 82284 - protein, 517 aa, Setaria italica
  Transcript Sequence Number=SeqID_16310
  Gene Ontology: Mol. function=binding
  Homolog annotation: Hit_ID=A4Q7K5; Match level="QueryCoverage=99%, HitCoverage=61%, E-value=1e-126, Identity=47%"; Hit description =Immunoglobulin/major histocompatibility complex; Tetratricopeptide -like helical
  Pfam annotation: Domain name=TPR_2; Domain location=123-156; Score =0.5; E_value=29; Accession=PF07719.9; Description=Tetratricopeptide repeat
  Pfam annotation: Domain name=TPR_2; Domain location=362-395; Score =0.7; E_value=27; Accession=PF07719.9; Description=Tetratricopeptide repeat
  Pfam annotation: Domain name=TPR_2; Domain location=444-477; Score =12.3; E_value=1; Accession=PF07719.9; Description=Tetratricopeptide repeat
  Pfam annotation: Domain name=TPR_2; Domain location=73-106; Score =4.6; E_value=9.1; Accession=PF07719.9; Description=Tetratricopeptide repeat
  Pfam module annotation: Pfam domain module=TPR_2::TPR_2::TPR_2::TPR _2; Domain location=123-156::362-395::444-477::73-106
VRLQIYKVRLLLLTRNLKVAKRVLKVLMNMARGRDSSTELLLKSQLEYARGNYRKAVKLLSTPNNRTEPAMLAMFYNNLGCILHQQRSNHTSIWCFSKALKYSLSLRSEKPLKLTALSQDKSCLISYNCGIQHLMCGKPLLAAQCFREAMPLFYKRPLFWLRFSECSLLAVEKGLLCAAGASSCNDEIEVNVVGSGQWRQLIVNPVHSRSNSASARVTSDEHKNLVSLGFARQYLLNAQLLLDASEQENPVTASDAEDGNQGVVQGHKSSGQKNTVSTDFKAPSGPTLAFVNGEQKGTSLNATLQSSLALYDEICRKENLKIRQAILGSLAFVELCLENPLKALSYAKLLQQLTDCSRMYVFLSHVYAAEALCALNRPKDAAEQLSVYIKDGNDIELPYNVENCEKALDEKDSDGEDTVAPAVTKLTSEESQHSESLKPEEARGVLYIDLGMTAAMQGEFEQADYMVSRGLAMLPNNPRAVLASVYMDLLQGKSQGAVAKLRHCRHVRFRPSVLATS

SEQ ID NO: 82285 - protein, 429 aa, Setaria italica
  Transcript Sequence Number=SeqID_16311
  Gene Ontology: Mol. function=binding
  Homolog annotation: Hit_ID=A4Q7K5; Match level="QueryCoverage=96%, HitCoverage=49%, E-value=3e-88, Identity=41%"; Hit description =Immunoglobulin/major histocompatibility complex; Tetratricopeptide -like helical
FQGRRYSECVLVLKKLLEMKEGDPKVHHNMAITQSFLDGCPDPERLLKILGDVKKRCEELACASREQADSANGVGSNASSGSRGSGIVLPYSAAHNASTYGDEFDTTIITFNMAVILYHLHDYESALSVLDPLYRNIEPIDETTALHVCFLLLDITLALQDATKAADVIQYLERSFGVANTTNQNENASIAQQQLAQPKPPAKSNTPPDSDSNAYGGGCENLSTGSFPDEPIEFESLYSSFDGHQNLGRPILNDFPRASADLAATAADLKVRLQIYKVRLLLLTRNLKVAKRELKVLMNMARGRDSSTELLLKSQLEYARGNYRKAVKLLSTPNNRTEPAMLAMFYNNLGCILHQQRSNHTSIWCFSKALKYSLSLRSEKPLKLTALSQDKSCLISYNCGIQHLMCGKPLLATRLQIVLRRRTNRPTTY

SEQ ID NO: 82286 - protein, 196 aa, Setaria italica
  misc_feature (84)..(84): Xaa can be any naturally occurring amino acid
  misc_feature (117)..(117): Xaa can be any naturally occurring amino acid
  Transcript Sequence Number=SeqID_16312
  Gene Ontology: Mol. function=catalytic activity; Biological process =metabolic process
  Homolog annotation: Hit_ID=B9RZ93; Match level="QueryCoverage=79%, HitCoverage=57%, E-value=6e-54, Identity=59%"; Hit description =Phosphoglycerate mutase, putative
  Pfam annotation: Domain name=PGAM; Domain location=65-192; Score =62.6; E_value=1.5e-15; Accession=PF00300.14; Description =Phosphoglycerate mutase family
  Subcellular localization annotation: CTP_CleavageSite=14; ConfidenceScore=5.12e-01
PSALLRSRATGRLRAFSIKATHSGLSDVSVQSLAENELPAVTGAAYSFTGATTSLTSKTLTSSKKITLVRHGLSSWNAESRVQXTGAKQAEKCRDALSNMKFDVCFSSPISRAKSTXEIIWQGKEEPLVFLDSLKEAHLFFLEGMTNADAKKQYPELYTKWREDPANFHVNGMYPIRELWGTARQAWEQILLTPVS

SEQ ID NO: 82287 - protein, 126 aa, Setaria italica
  Transcript Sequence Number=SeqID_16313
  Subcellular localization annotation: CTP_CleavageSite=63; ConfidenceScore=5.24e-01
GFSIKATHSGLSDVSVQSLAENELPAVTGAAYSFTGATTSLTSKTLTSSKKITLVRHGLSSWNAESRVQVSVTFQSLAFSATFNLRWRWMYGCKRVAIQSFYSFVRGTFLSVLVSRKKDSAFWIRS

SEQ ID NO: 82288 - protein, 297 aa, Setaria italica
  Transcript Sequence Number=SeqID_16314
  Gene Ontology: Mol. function=catalytic activity; Biological process =metabolic process
  Homolog annotation: Hit_ID=B9RZ93; Match level="QueryCoverage=78%, HitCoverage=80%, E-value=1e-98, Identity=70%"; Hit description =Phosphoglycerate mutase, putative
  Pfam annotation: Domain name=PGAM; Domain location=91-245; Score =134.2; E_value=4.2e-37; Accession=PF00300.14; Description =Phosphoglycerate mutase family
  Subcellular localization annotation: CTP_CleavageSite=40; ConfidenceScore=5.66e-01
MVSGSLPTRPSPTAFSPPLPVPGRAPPPRLLRSRATGRLRAFSIKATHSGLSDVSVQSLAENELPAVTGAAYSFTGATTSLTSKTLTSSKKITLVRHGLSSWNAESRVQGSSNLSVLTETGAKQAEKCRDALSNMKFDVCFSSPISRAKSTAEIIWQGKEEPLVFLDSLKEAHLFFLEGMTNADAKKQYPELYTKWREDPANFHVNGMYPIRELWGTARQAWEQILLTPGENFLVVTHKSILRALVCTALGLPPERFRATDVNNGGMCVFTVNKHGEAMLQALNMTAHMYSDHTYQY

SEQ ID NO: 82289 - protein, 314 aa, Setaria italica
  misc_feature (15)..(15): Xaa can be any naturally occurring amino acid
  misc_feature (253)..(253): Xaa can be any naturally occurring amino acid
  misc_feature (275)..(275): Xaa can be any naturally occurring amino acid
  Transcript Sequence Number=SeqID_16315
  Gene Ontology: Mol. function=DNA-directed DNA polymerase activity; Cellular component=nucleus; Biological process=DNA replication
  Homolog annotation: Hit_ID=Q9LRE5; Match level="QueryCoverage=99%, HitCoverage=72%, E-value=1e-153, Identity=84%"; Hit description=DNA polymerase delta small subunit
  Pfam annotation: Domain name=DNA_pol_E_B; Domain location=57-269; Score=252.5; E_value=9.8e-73; Accession=PF04042.8; Description=DNA polymerase epsilon subunit B
FTSLQEPLPPAAFVXTGVVVALHGKETSAGNFLVEDVLEAGLPPQTALSSADEDKYVVFVSGLSVGSGTFNPLQFQLLIDHITGHLGDENEQTIASNIVRVVVAGNSVHIAPRFVNGQTVASKDQSRIAEPIKELDIMLTQLVASLPVDVMPGCQDPANFSLPQQPLHRCLFSGASTYNTFSSCSNPHQFELDSVQFLGTSGQNIDDLYKYSDAKDKLEFMERTLRWRHLAPTAPNSLGCYPYTDKDPFLIEXSCPHVYFVGNQDKYETRLLEGXKTKVRLICIPRFSESGVAVMLNLRNLECSTLSFSTSFDA

SEQ ID NO: 82290 - protein, 84 aa, Setaria italica
  Transcript Sequence Number=SeqID_16316
ICSYFGNSKTLGACGLAQELQLSWKDPPQKDVVVPGQFFIRYMMALDFCRLDLLINCRMQFVVGEAETDAGRYVVVHLYQSNRS

SEQ ID NO: 82291 - protein, 75 aa, Setaria italica
  Transcript Sequence Number=SeqID_16317
CAFFQRLQRVMIRECNMVADELANFAKHMVHHVVWREPRTTCVRELLGCGCNHATSLPQALFQNPKRKKNILAKQ

SEQ ID NO: 82292 - protein, 66 aa, Setaria italica
  misc_feature (63)..(63): Xaa can be any naturally occurring amino acid
  Transcript Sequence Number=SeqID_16318
  Gene Ontology: Mol. function=metal ion binding; Biological process =metal ion transport
  Homolog annotation: Hit_ID=Q01II0; Match level="QueryCoverage=96%, HitCoverage=73%, E-value=5e-17, Identity=71%"; Hit description =OSIGBa0159I10.5 protein
  Pfam annotation: Domain name=HMA; Domain location=6-66; Score=19.5; E_ value=0.014; Accession=PF00403.18; Description=Heavy-metal-associated domain
MAQKVVLRVPAMTDDKTKQKAIEAVADIYGIDSIAADLKDNKMTVIGDMDAVAIAKKLKKMGXIDI

SEQ ID NO: 82293 - protein, 193 aa, Setaria italica
  misc_feature (163)..(163): Xaa can be any naturally occurring amino acid
  Transcript Sequence Number=SeqID_16319
MATPASVVSDVAEPQAEESPQVEAAATAEQEGPKSEAAAAAESAGASNPPAVAAAAPGDASSAPSPSPAPTTACDSVVVPPPASPATPAAPGPARPQFAGSPAYMAPPGPSPSPAFSYNVLPRAPPAQQVGSGAASVQPGSSPAPMAAPMPAAALQPPAPGQXYFGNRPSFSYNVVSHANARLPTGQLVSTWH

SEQ ID NO: 82294 - protein, 55 aa, Setaria italica
  Transcript Sequence Number=SeqID_16320
KRQTDSCFSLFNRLISYPTVFFSHNKSAVLAFQLAYACLYACPIPHVKRKVSCQI

SEQ ID NO: 82295 - protein, 131 aa, Setaria italica
  Transcript Sequence Number=SeqID_16321
  Gene Ontology: Mol. function=deoxyhypusine synthase activity; Cellular component=beta-galactosidase complex; Biological process =peptidyl-lysine modification to hypusine
  Homolog annotation: Hit_ID=Q69P66; Match level="QueryCoverage=96%, HitCoverage=33%, E-value=8e-68, Identity=94%"; Hit description =Putative Deoxyhypusine synthase
  Pfam annotation: Domain name=DS; Domain location=1-131; Score=17.8; E_ value=2.4e-10; Accession=PF01916.9; Description=Deoxyhypusine synthase
NLGCLQNIWTPSKVIARLGKEINDESSYLYWAYKNNIPVYCPALTDGSLGDMLFCHAVRNPGLIIDIVQDIRLMNGEAIHAAPRKTGIIVLGGGLPKHHICNANMFRNGADYAVYINTAQEFDGSDSGAQP

SEQ ID NO: 82296 - protein, 84 aa, Setaria italica
  Transcript Sequence Number=SeqID_16322
  Gene Ontology: Biological process=biosynthetic process
  Homolog annotation: Hit_ID=B6UFC8; Match level="QueryCoverage=55%, HitCoverage=5%, E-value=6e-17, Identity=97%"; Hit description =Digalactosyldiacylglycerol synthase 1
MEARASPPPSVSVGGGFGGARGDDSAFSFLSKGWREVRDSATADLRLMRARADSLRTLADRELEQLLASASTALRRTEPNRNRN

SEQ ID NO: 82297 - protein, 50 aa, Setaria italica
  Transcript Sequence Number=SeqID_16323
  Gene Ontology: Mol. function=unfolded protein binding; Cellular component=chloroplast; Biological process=response to stress
  Homolog annotation: Hit_ID=B1A009; Match level="QueryCoverage=70%, HitCoverage=4%, E-value=1e-10, Identity=97%"; Hit description =Chloroplast heat shock protein 70-1
NCFIFFFSKPYANDAGRIAGLEVLRIINEPTAASLAYGFRERKNNETIRQ

SEQ ID NO: 82298 - protein, 181 aa, Setaria italica
  misc_feature (94)..(94): Xaa can be any naturally occurring amino acid
  Transcript Sequence Number=SeqID_16324
  Gene Ontology: Mol. function=unfolded protein binding; Cellular component=chloroplast; Biological process=response to stress
  Homolog annotation: Hit_ID=Q2QV45; Match level="QueryCoverage=86%, HitCoverage=22%, E-value=6e-66, Identity=83%"; Hit description=70 kDa heat shock protein
  Pfam annotation: Domain name=HSP70; Domain location=1-179; Score= -241.7; E_value=6.5e-06; Accession=PF00012.12; Description=Hsp70 protein
RLSVSSHIEATLSRAKFEELCSDLIDRLKTPVNNALKDAKLSVSDLDEVILVGGSTRIPAVQELVRKLTDKDPNVTVNPDEVVSLGAAVQGGVXLAGDVKDVVLLDVTPLSLGLETLGGVMTKIIPRNTTLPTSKSEVFSTAADGQTSVEINVLQGEREFVHLQLLRIPLILRWAVWHSWG

SEQ ID NO: 82299 - protein, 680 aa, Setaria italica
  Transcript Sequence Number=SeqID_16325
  Gene Ontology: Mol. function=unfolded protein binding; Cellular component=chloroplast; Biological process=response to stress
  Homolog annotation: Hit_ID=A4ZYQ0; Match level="QueryCoverage=97%, HitCoverage=97%, E-value=0.0, Identity=88%"; Hit description =Chloroplast heat shock protein 70
  Pfam annotation: Domain name=HSP70; Domain location=47-642; Score =1356.5; E_value=0; Accession=PF00012.12; Description=Hsp70 protein
  Pfam annotation: Domain name=MreB_Mbl; Domain location=45-425; Score=- 198.9; E_value=3.7e-07; Accession=PF06723.5; Description=MreBMbl protein
  Pfam module annotation: Pfam domain module=HSP70::MreB_Mbl; Domain location=47-642::45-425
  Subcellular localization annotation: CTP_CleavageSite=59; ConfidenceScore=5.57e-01
MATTTFPTSTPFFAAHHGPRRSRPSVSAAVYSRSRRWRPLRVACEKVVGIDLGTTNSAVAAMEGGKPTIVTNAEGARTTPSVVAYTKSGDRLVGQIAKRQAVVNPENTFFSVKRFIGRKMNEVDEESKQVSYRVLRDDNGNVKLDCPAIGKQFAAEEISAQVLRKLVDDASKFLNDKVTKAVITVPAYFNDSQRTATKDAGRIAGLEVLRIINEPTAASLAYGFEKKNNETILVFDLGGGTFDVSVLEVGDGVFEVLSTSGDTHLGGDDFDKRIVDWLAGNFKNDEGIDLLKDKQALQRLTEAAEKAKMELSSLTQTNISLPFITATADGPKHIETTLTRAKFEELCSDLLDRLRTPVDNALRDAKLQFKDIDEVILVGGSTRIPAVQELVKKMTGKDPNVTVNPDEVVALGAAVQAGVLSGDVSDIVLLDVTPLSLGLETLGGVMTKIIPRNTTLPTSKSEVFSTAADGQTSVEINVLQGEREFVRDNKSLGSFRLDGIPPAPRGVPQIEVKFDIDANGILSVTAVDKGTGKKQDITITGASTLPKDEVERMVDEAEKFAKEDKEKRDAIDTKNQAESVIYQTEKQLKELGDKVPGDVKGKVEAKLQELKDAVAGGSTQTMKDALSALNQEVMQLGQSLYSQQGAPGAGPTPGADASAGSSEKPADEGDVIDADFTDSK

SEQ ID NO: 82300 - protein, 648 aa, Setaria italica
  misc_feature (39)..(39): Xaa can be any naturally occurring amino acid
  misc_feature (114)..(114): Xaa can be any naturally occurring amino acid
  misc_feature (468)..(468): Xaa can be any naturally occurring amino acid
  Transcript Sequence Number=SeqID_16326
  Gene Ontology: Mol. function=unfolded protein binding; Cellular component=chloroplast; Biological process=response to stress
  Homolog annotation: Hit_ID=Q2QV45; Match level="QueryCoverage=99%, HitCoverage=92%, E-value=0.0, Identity=86%"; Hit description=70 kDa heat shock protein
  Pfam annotation: Domain name=HSP70; Domain location=13-609; Score =1324.0; E_value=0; Accession=PF00012.12; Description=Hsp70 protein
  Pfam annotation: Domain name=MreB_Mbl; Domain location=11-395; Score=- 217.0; E_value=5.7e-06; Accession=PF06723.5; Description=MreBMbl protein
  Pfam module annotation: Pfam domain module=HSP70::MreB_Mbl; Domain location=13-609::11-395
RGGAALRVTCEKVVGIDLGTTNSAVAAMEGGKPTVVTNXEGARTTPSVVAYTKTGERLVGQIAKRQAVVNPENTFFSVKRFIGRKMSEVDDEAKQVSYGVVKDENGNVKLDCPXAIGKQFAAEEISAQVLRKLVDDASKFLNEKITKAVVTVPAYFNDSQRTATKDAGRIAGLEVLRIINEPTAASLAYGFEKKNNETILVFDLGGGTFDVSVLEVGDGVFEVLSTSGDTHLGGDDFDKRIVDWLASNFKKDEGIDLLKDKQALQRLTEAAEKAKMELSTLTQANISLPFITATADGPKHIEATLSRAKFEELCSDLIDRLKTPVNNALKDAKLSVSDLDEVILVGGSTRIPAVQELVRKLTDKDPNVTVNPDEVVSLGAAVQGGVLAGDVKDVVLLDVTPLSLGLETLGGVMTKIIPRNTTLPTSKSEVFSTAADGQTSVEINVLQGEREFVRDNKSLGSFRLDGIXPAPRGVPQIEVKFDIDANGILSVAAIDKGTGKKQDITITGASTLPKDEVERMVEEADKFAKEDKEKRDAIDTKNQADSVVYQTEKQLKELGDKVPAPVKEKVDVKLQELKDAISGGSTQGMKDAMAALNQEVMQIGQAMYNQPGAAGSTPDAEAGPTPGAGPAKGPNDGDVIDADFTDSN

SEQ ID NO: 82301 - protein, 125 aa, Setaria italica
  misc_feature (111)..(111): Xaa can be any naturally occurring amino acid
  Transcript Sequence Number=SeqID_16327
  Gene Ontology: Mol. function=transferase activity, transferring groups other than amino-acyl groups
  Homolog annotation: Hit_ID=B6TJD6; Match level="QueryCoverage=83%, HitCoverage=22%, E-value=2e-46, Identity=82%"; Hit description =Transferase
GWVVKCNDAGVRMVDARAAATLDEWLATATGDEEMDLLYYEPMGAEPFIWSPFYIQLTEFADKSFALGLSCTHIHNDPTAAALFFQAWAAAHRRTTSTYPPFLHAPALEVXSPASPAPAPAPAPD

SEQ ID NO: 82302 - protein, 148 aa, Setaria italica
  Transcript Sequence Number=SeqID_16328
  Homolog annotation: Hit_ID=B6TLA4; Match level="QueryCoverage=78%, HitCoverage=28%, E-value=2e-30, Identity=61%"; Hit description=CCT motif family protein
MMISICTLQDGISSPIAAHILDFCDDGSGGDLFAAVNAASDMFTASSEDASSSSVTTPPAPCSHGDNVSSGAAAAASAFSPMASLDSTLSALLEEDDPPVPDTELFLPIDYQFAAAVAGDEPQPEQQFDQVPVALPVAAAAAEQPALQ

SEQ ID NO: 82303 - protein, 218 aa, Setaria italica
  Transcript Sequence Number=SeqID_16329
  Gene Ontology: Mol. function=SNAP receptor activity; Cellular component=integral to membrane; Biological process=intracellular protein transport
  Homolog annotation: Hit_ID=B9SMU4; Match level="QueryCoverage=99%, HitCoverage=87%, E-value=1e-92, Identity=75%"; Hit description=Golgi snare 11 protein, putative
  Pfam annotation: Domain name=V-SNARE; Domain location=46-196; Score =113.0; E_value=1e-30; Accession=PF05008.7; Description=Vesicle transport v-SNARE protein
MEASSWDALRKQARRLEAQLDDQMIAYRKLVSMKSDGSENDIESDIERSLKQLQQVNSQMQTWVSSGGSEVLSHTLTRHMEILQDLTQEFYRLRSSLRVKQQHASLLDLRDFDRAKFDVEEASDSADQALLREQAAISRSAGQMDNVISQAQATLGSLMTQRSTFGGITSKISNVSSRLPTINHVLSSIRRKKSMDTIILSLVASVCAFLIFIYWLSK

SEQ ID NO: 82304 - protein, 262 aa, Setaria italica
  Transcript Sequence Number=SeqID_16330
  Gene Ontology: Mol. function=transferase activity; Cellular component= mitochondrion
  Homolog annotation: Hit_ID=B9RT09; Match level="QueryCoverage=92%, HitCoverage=34%, E-value=5e-76, Identity=58%"; Hit description =Pentatricopeptide repeat-containing protein, putative
  Pfam annotation: Domain name=PPR; Domain location=126-160; Score =28.7; E_value=2.4e-05; Accession=PF01535.12; Description=PPR repeat
  Pfam annotation: Domain name=PPR; Domain location=161-195; Score =34.2; E_value=5.1e-07; Accession=PF01535.12; Description=PPR repeat
  Pfam annotation: Domain name=PPR; Domain location=21-55; Score=35.5; E_value=2.1e-07; Accession=PF01535.12; Description=PPR repeat
  Pfam annotation: Domain name=PPR; Domain location=56-90; Score=13.7; E_value=0.21; Accession=PF01535.12; Description=PPR repeat
  Pfam annotation: Domain name=PPR; Domain location=91-125; Score=17.1; E_value=0.073; Accession=PF01535.12; Description=PPR repeat
  Pfam module annotation: Pfam domain module=PPR::PPR::PPR::PPR::PPR; Domain location=126-160::161-195::21-55::56-90::91-125
SKEAEDAFLRMKTDGIKPLSSSYTALLCAYAVNGLHAKAHSIYVDMKREGLKPTLETYTALLDTLRGAGDTEKLMETWKTMIDEKIGATRVIFHMVLDCLAKHGLYLQARDAIYEFGKIGLKPTVMTYNILMNAYGRGGQHYKLPLLLKEMAALELKPDSITYCTMIYAYARVRDFSRAFYYHKQMVRSGQVPDPRSYRKLLNTLDVKAARKNIKDKSAIQGIIKGKSGLKPRKEKKDEFWKNRRKRSMLNPTYGHQRKRFL

SEQ ID NO: 82305 - protein, 68 aa, Setaria italica
  Transcript Sequence Number=SeqID_16331
MAPAAAAAVVALGDDLLREVFVRLPTPADLLRAAAACKPFLRAARSAPFLRRFRRRHPSSCPRLLGCL

SEQ ID NO: 82306 - protein, 152 aa, Setaria italica
  Transcript Sequence Number=SeqID_16332
  Gene Ontology: Mol. function=potassium ion transmembrane transporter activity; Cellular component=membrane; Biological process=potassium ion transport
  Homolog annotation: Hit_ID=Q69L87; Match level="QueryCoverage=96%, HitCoverage=18%, E-value=8e-57, Identity=76%"; Hit description =Potassium transporter 22
  Pfam annotation: Domain name=K_trans; Domain location=1-152; Score= -476.6; E_value=0.00075; Accession=PF02705.8; Description=K+ potassium transporter
TDACRPVAISVLSAVGGLKEKAPNLTTEQIVWMTVGILLVLFGVQRFGTDKVGYLFAPVVLLWLLLIGGVGVYNLLRHDVGVLRAFNPRYIVDYFRRNGRDAWVSLGGVLLCFTGTEALFADLGYFSVRSIQLSFACGLVPAVLLAVLTIGS

SEQ ID NO: 82307 - protein, 83 aa, Setaria italica
  Transcript Sequence Number=SeqID_16333
  Homolog annotation: Hit_ID=B6TMA1; Match level="QueryCoverage=59%, HitCoverage=23%, E-value=9e-13, Identity=71%"; Hit description=SAM domain family protein
  Pfam annotation: Domain name=SAM_1; Domain location=13-75; Score =20.4; E_value=0.0014; Accession=PF00536.22; Description=SAM domain (Sterile alpha motif)
TWIYEIIGVHRLYAIIVTTLHPFLGHAIYFCLEKYLVLFQAEEVDMAALRQMGESDLKDMGVPMGPRKKILLALGPQSKQRQR

SEQ ID NO: 82308 - protein, 85 aa, Setaria italica
  Transcript Sequence Number=SeqID_16334
  Subcellular localization annotation: CTP_CleavageSite=66; ConfidenceScore=5.30e-01
GSLRPQSLITRDAPDTSRTQTYAGKSTISVDTVPKANGITPSSAALPTAPVMVCICTSSHRPEFTKASEERKEFLDPTSLFYLRL

SEQ ID NO: 82309 - protein, 398 aa, Setaria italica
  Transcript Sequence Number=SeqID_16335
  Pfam annotation: Domain name=SAM_1; Domain location=287-342; Score =19.6; E_value=0.0017; Accession=PF00536.22; Description=SAM domain (Sterile alpha motif)
MASSSSASSRHQVTITLGRSGQVVKRRAISDTINDDEVPFSGKKRSLRERLGTNVADSDFYESRHRNKRQQTESNSSLGDDGSDRHVGKDDLRLKLMRKGLLQRSNGGAEQNGVDLREKLSRNHKNLPRYDASGRAPESRARYDMRDNPVELRSRYSSREGVLASRPSPVASRIPSARSVDDLLKLDSSRKPYSSWTADGLRHRSPERLTSVRGDASPPRAFDQIRPMPSHRSAGSLRPQSLITRDAPDTSRTQTYAGKSTISVDTVPKANGITPSSAALPTAPVMTEVPQTVTGLLNSLGLEKYLVLFQAEEVDMAALRQMGESDLKDMGVPICICTSSHRPEFTKASEEERNFWIQLHCFICANIFKMFPKSHLPSGLQCCWRYEINIKPECKVMT

SEQ ID NO: 82310 - protein, 146 aa, Setaria italica
  Transcript Sequence Number=SeqID_16336
  Subcellular localization annotation: CTP_CleavageSite=17; ConfidenceScore=5.29e-01
PPVKSFWSSSPMALRLSSSKRRSPCFTGLELALMFKECSATSLEMPGMSEGFHAKTSLFAWRKSTSALSYLRNRVAPIRTVLPSELLGSRRTSLTPSVASKEVADCLESGWSSAPSASWTARSPVKVMAAAYSQHSTSHSYAFWKD

SEQ ID NO: 82311 - protein, 181 aa, Setaria italica
  Transcript Sequence Number=SeqID_16337
  Gene Ontology: Cellular component=integral to membrane; Biological process=protein transport
  Homolog annotation: Hit_ID=Q3T8Z1; Match level="QueryCoverage=98%, HitCoverage=20%, E-value=1e-87, Identity=84%"; Hit description =Autophagy protein 9
  Pfam annotation: Domain name=APG9; Domain location=73-181; Score= -224.5; E_value=2.9e-05; Accession=PF04109.8; Description=Autophagy protein Apg9
GVEALEVGKKPCDLMNVIKNHPLIPFTYVKMITIGSMVILTTYGIINLVKFFVKLRSTLNVRDFYYNSLKVTDLEIQTISWPKVVEKVVLLQKSQQLCVVKDLSEHDIMMRLMRKENYLIGMVNKGVIAFPIACWLPGVGPTVGSRFHGSKSYLMLPKMLEWTLNWCIFQSMFDSKFCSTE

SEQ ID NO: 82312 - protein, 107 aa, Setaria italica
  Transcript Sequence Number=SeqID_16338
PVRVQRREPGVHARVERALVLHEALHRPPVQDLHAHLGREKNLQFPHDRELVSSLASYVLVFLSTGLERCGRTVPEFYSGALIEPGVGFAGGNMLWDVPKHQQQRAV

SEQ ID NO: 82313 - protein, 85 aa, Setaria italica
  Transcript Sequence Number=SeqID_16339
  Gene Ontology: Mol. function=sequence-specific DNA binding; Cellular component=nucleus; Biological process=regulation of transcription, DNA-dependent
  Homolog annotation: Hit_ID=B6TPJ0; Match level="QueryCoverage=100%, HitCoverage=24%, E-value=2e-20, Identity=65%"; Hit description =WRKY51-superfamily of TFs having WRKY and zinc finger domains
MMTLDLMGGYGRVDEQVAIQEAAAAGLRGMEHLISQLSRAGTGERPSSPPPGTAPAQHHQQQLPEQSHPQQQVDCREITDMTVSK

SEQ ID NO: 82314 - protein, 139 aa, Setaria italica
  Transcript Sequence Number=SeqID_16340
  Gene Ontology: Mol. function=protein serine/threonine kinase activity; Biological process=protein amino acid phosphorylation
  Homolog annotation: Hit_ID=Q5N7S6; Match level="QueryCoverage=99%, HitCoverage=15%, E-value=5e-50, Identity=66%"; Hit description =Receptor serine/threonine kinase PR5K-like
  Pfam annotation: Domain name=Pkinase; Domain location=1-138; Score= -78.1; E_value=0.00077; Accession=PF00069.17; Description=Protein kinase domain
  Pfam annotation: Domain name=Pkinase_Tyr; Domain location=1-138; Score=-149.5; E_value=0.00087; Accession=PF07714.9; Description =Protein tyrosine kinase
  Pfam module annotation: Pfam domain module=Pkinase::Pkinase_Tyr; Domain location=1-138::1-138
IRGLVYEYMPNGSLERYTAGGDLGWEQLLGIAVGIARGLEYLHRGCNAHIVHFDIKPHNILLDAELRPKISDFGLAKLRPQRDSTIPVSIAGARGTVGYIAPEVFARQVGLGAVTSKSDVYSYGMMVLEMVGARRTTVN

SEQ ID NO: 82315 - protein, 86 aa, Setaria italica
  Transcript Sequence Number=SeqID_16341
  Gene Ontology: Mol. function=calcium ion binding
  Homolog annotation: Hit_ID=B6SSF5; Match level="QueryCoverage=100%, HitCoverage=21%, E-value=5e-37, Identity=88%"; Hit description=EF -Hand containing protein
  Pfam annotation: Domain name=efhand; Domain location=26-54; Score =25.9; E_value=0.00017; Accession=PF00036.24; Description=EF hand
RNGVVQVQDGSDIRALVENKEAFAKFVDDRFRKLDVDGDGRLSVKELQPAVADIGAAIGLPARGSSRQADHIYAEVLNEFTHGKQD

SEQ ID NO: 82316 - protein, 87 aa, Setaria italica
  Transcript Sequence Number=SeqID_16342
  Gene Ontology: Mol. function=phosphoric ester hydrolase activity; Biological process=carbohydrate metabolic process
  Homolog annotation: Hit_ID=B6SRX9; Match level="QueryCoverage=79%, HitCoverage=17%, E-value=6e-19, Identity=73%"; Hit description =Fructose-1,6-bisphosphatase
RAFVCQPLAAAATDDMAAAAAAASPPTLLEHMGQAGAAADLTVLVAHIQSACKRIASLVASPGNAELSRAKAAGGGGVAADPDATKR

SEQ ID NO: 82317 - protein, 103 aa, Setaria italica
  misc_feature (93)..(93): Xaa can be any naturally occurring amino acid
  Transcript Sequence Number=SeqID_16343
  Pfam annotation: Domain name=GRP; Domain location=22-103; Score= -29.9; E_value=0.1; Accession=PF07172.3; Description=Glycine rich protein family
MARAVASGVAAAAAGGFGPPWLLMLGAALLSVWAITLAVLLCGDSSDGRRRPRYNAAAAGAAAGAASGGAVCGASGGGGGCGGGGGGGGGGGXCGGGGGGGGG

SEQ ID NO: 82318 - protein, 73 aa, Setaria italica
  Transcript Sequence Number=SeqID_16344
LATDDRKGIRDQQFTSIELPLKSLHRPFQFLRSEVSARSKAQAGAGKGWGRNSRERRGLRPPSSLLPFVVLPS

SEQ ID NO: 82319 - protein, 77 aa, Setaria italica
  Transcript Sequence Number=SeqID_16345
RSLKSSYHLQFEEISLASQRLLGRIHSNSIHLLSPQAWLVMIVLNITVIIVGAFLSHEVLLVPTTASVCLYEHIFVG

SEQ ID NO: 82320 - protein, 112 aa, Setaria italica
  Transcript Sequence Number=SeqID_16346
ILQTSTASGTAPVAPLPQPPPPQPAQPHSQEIRDVKPVETDSEQNKHAYSVALASAVAAEAAAVAAQAAAEVVRLTAVTSTAPKMPANSREELAAIKIQTAFRGYLVILLHL

SEQ ID NO: 82321 - protein, 459 aa, Setaria italica
  Transcript Sequence Number=SeqID_16347
  Gene Ontology: Cellular component=plasma membrane
  Homolog annotation: Hit_ID=B9SGQ6; Match level="QueryCoverage=83%, HitCoverage=83%, E-value=3e-65, Identity=39%"; Hit description =Calmodulin binding protein, putative
  Pfam annotation: Domain name=IQ; Domain location=100-120; Score=31.2; E_value=4.2e-06; Accession=PF00612.19; Description=IQ calmodulin -binding motif
  Subcellular localization annotation: CTP_CleavageSite=11; ConfidenceScore=5.04e-01
PFGKCRHSDPSTSTASGTAPVAPLPQPPPPQPAQPHSQEIRDVKPVETDSEQNKHAYSVALASAVAAEAAAVAAQAAAEVVRLTAVTSTAPKMPANSREELAAIKIQTAFRGYLARRALRALRGLVRLKSLVDGNAVKRQTAHTLHCTQTMARVQTKIYSRRVKLEEEKQALQRQLQLKHQRELEKMKIDEDWDHSHQSKEQIEASLIMKQEAALRRERALAYAFSHQWRNSGRTITPTFTEPGNPNWGWSWMERWMSARPWESRLAASDKDPKERTLTKNPSTSAVRTSVPRAISIQRPATPNKSSRPPSRQSPSTPPSKAPSTSGKIRPASPRGSWLYKEDDLRSITSIRSERPRRQSTGGGSVRDDASLTSTPPLPSYMQSTESARAKSRYRSLLTEKLEVSDRAPLVHSVVKKRLSFPIMDKPSGAPVDKPKERARRHSDPPKVDPTTLKDAPVA

SEQ ID NO: 82322 - protein, 103 aa, Setaria italica
  misc_feature (94)..(94): Xaa can be any naturally occurring amino acid
  Transcript Sequence Number=SeqID_16348
  Gene Ontology: Mol. function=6-phosphogluconolactonase activity; Cellular component=chloroplast; Biological process=carbohydrate metabolic process
  Homolog annotation: Hit_ID=Q6Z4H0; Match level="QueryCoverage=95%, HitCoverage=35%, E-value=1e-48, Identity=92%"; Hit description =Probable 6-phosphogluconolactonase 2
CPIWSPLVSFLWKLCEAPYNKTLDWSKWYIFWTDERAVAKNHAESNYKLTKEGFLAKVPILNGHVYSINDNATVEDAATDYEFVIRQLVKVRTXGVSESNDSP

SEQ ID NO: 82323 - protein, 109 aa, Setaria italica
  Transcript Sequence Number=SeqID_16349
  Gene Ontology: Mol. function=6-phosphogluconolactonase activity; Cellular component=chloroplast; Biological process=carbohydrate metabolic process
  Homolog annotation: Hit_ID=B6U0H2; Match level="QueryCoverage=99%, HitCoverage=38%, E-value=4e-52, Identity=89%"; Hit description=6 -phosphogluconolactonase
MERESATTYEPKRNSEIRVFESFDDISTDLAEYISQISEISVKERGYFAIALSGAPLVSFLWKLCEAPYNKTLDWSKWYIFWTDERAVAKNHAESNYKLTKEGFLAKLH

SEQ ID NO: 82324 - protein, 183 aa, Setaria italica
  Transcript Sequence Number=SeqID_16350
  Gene Ontology: Mol. function=6-phosphogluconolactonase activity; Cellular component=chloroplast; Biological process=carbohydrate metabolic process
  Homolog annotation: Hit_ID=Q6Z4H0; Match level="QueryCoverage=98%, HitCoverage=63%, E-value=1e-87, Identity=85%"; Hit description =Probable 6-phosphogluconolactonase 2
HEGFLAKVPILNGHVYSINDNATVEDAATDYEFVIRQLVKVRTIGVSESNDCPKFDLILLDMGSDGHVASLFPNHPALELKDDWVTYITDSPQPPPERITFTLPVINSASNIAIVATGDDKVKAVHLAVSDGTEGPDAPALLPARMIHPTDGKLVWFLDKAAAASLEANNGDASYDEHAEYRL

SEQ ID NO: 82325 - protein, 147 aa, Setaria italica
  Transcript Sequence Number=SeqID_16351
  Homolog annotation: Hit_ID=C0L9Q9; Match level="QueryCoverage=76%, HitCoverage=22%, E-value=1e-15, Identity=45%"; Hit description =Sister of indeterminate spikelet 1 (Fragment)
LTSHRAVPFALGTTPPWPPPPRPDAAAARLLQEEEEAGVGGSRARSPAGLELEPMVLDLNAESPTAGSASATSSSSGVAGGGGGFFRFDLLGGSPDEEGCSPSPPVVTRQFFPSPHPYAASPASDGSPPPGVAGASAHRAADLGASA

SEQ ID NO: 82326 - protein, 151 aa, Setaria italica
  misc_feature (19)..(19): Xaa can be any naturally occurring amino acid
  misc_feature (31)..(31): Xaa can be any naturally occurring amino acid
  Transcript Sequence Number=SeqID_16352
  Gene Ontology: Mol. function=hedgehog receptor activity; Cellular component=membrane; Biological process=cholesterol transport
  Homolog annotation: Hit_ID=B9R8N7; Match level="QueryCoverage=85%, HitCoverage=10%, E-value=6e-41, Identity=62%"; Hit description =Hedgehog receptor, putative
NKQTDYVNSMRAARDFSSXMSKDLQMEIFPXYSVFYIFFEQYLGVWKTAIMNICVCLGTIFVVCFLVTSSLWASAIILIVLAMIVLDLMGVMAILGIQLNAISVVNLVMSIGIAVEFCVHITHAFMVGAVHLEIPAPNLLTLLIYVIIGKF

SEQ ID NO: 82327 - protein, 458 aa, Setaria italica
  Transcript Sequence Number=SeqID_16353
  Gene Ontology: Mol. function=hedgehog receptor activity; Cellular component=integral to membrane; Biological process=cholesterol transport
  Homolog annotation: Hit_ID=B9R8N7; Match level="QueryCoverage=98%, HitCoverage=36%, E-value=1e-146, Identity=55%"; Hit description =Hedgehog receptor, putative
NGVDEADATKAVKPDTLFSSRIQSLCPTITGNVCCTADQFDTLHQQVQQAVPFLVGCPACLRNFLNLFCEMSCSPNQSLFINVTSVKQINSTMTVDGIDYYVTTNYGEELYNSCKDVKFGTLNTRAMDFLGGGAKTYKEWLAFIGRQANPNEPGSPYLITFRSDFSDSSGVKPLNSTIYSCGDPSLGCSCGDCPSSSVCTGSLLPQLNTDTSCSVKMGSLKAKCLDFSLVVIYLALLCAFLLWGLLHRARGRTASSLQTKPLRNSDDKSDSNQNGKSPHNSVQVSEAASSTVKPSYPSIVQTYMSIFFRKHGIFVARHPLLVLCVSLLIPLLLCIGLLRFKVETRPEKLWVSPGSQAADEKNYFDSHLAPFYRIEQLVLATSASSGSAAPSIVNDNNMKLLFQIQKKVDDLRASYSGSTVALADICLKPLSTDCATQSVLQYFQLDPKKDDSGIDHAK

SEQ ID NO: 82328 - protein, 888 aa, Setaria italica
  Transcript Sequence Number=SeqID_16354
  Gene Ontology: Mol. function=hedgehog receptor activity; Cellular component=integral to membrane; Biological process=cholesterol transport
  Homolog annotation: Hit_ID=B9R8N7; Match level="QueryCoverage=97%, HitCoverage=69%, E-value=0.0, Identity=64%"; Hit description =Hedgehog receptor, putative
  Pfam annotation: Domain name=Patched; Domain location=11-867; Score= -26.5; E_value=1.5e-12; Accession=PF02460.10; Description=Patched family
KRRRPIHKRRGISNDTHNTRRGCLATFYRIEQLVLATSASSGSAAPSIVNDNNMKLLFQIQKKVDDLRASYSGSTVALADICLKPLSTDCATQSVLQYFQLDPKKYDDSGIDHAKFCFQHYTSEETCLSTFQSPIDPSTILGGFSGNNFTEASAFVITYPVNNKVETTGQENGKAVAWERAFINLVKEEILPMVLAQNLTLSFSSESSIQDELNRESTADAITIVISYIVMFAYISFTLGDRPSRWLSLFVSSKVLLGLSGVVLVMLSVLGSMGFFSAIGVKSTLIIMEVIPFLVLAVGVDNMCILVHAVKRQPDQSNLEERISEALVEVGPSITLASFAEVLAFAVSAINPMPATRVFSMFAALAVFMDFLLQVTAFVALIVFDFRRAQDGRIDCVPCARIASSPAAGDGGDGQRLHLLARYMRDIHGPILSYRAVKFVVITVFVGLAFSSIALSTRLQPGLEQQIVLPRNSYLQDYFDDLAKYMKVGPPLYFVVKDFNYSSASVHTNQICSINQCNSNSLLNEIARQSLSPETSYIAKPAASWLDDFLIWMSPEAFGCCRKFVNGSYCPPDDQPPCCQLDQDSGTCSASRTCSNCTTCFLHSDLDNGRPSTTQFKDKLPWFLDALPSSDCSKGGKGAYSTSLDLNGYESGIIQASAFRTYHTPLNKQTDYVNSMRAARDFSSKMSKDLQMEIFPYSVFYIFFEQYLGVWKTAIMNICVCLGTIFVVCFLVTSSLWASAIILIVLAMIVLDLMGVMAILGIQLNAISVVNLVMSIGIAVEFCVHITHAFMIGTGDRETRARQALSTMGASVFSGITLTKLVGVIVLRFAKSEVFVVYYFQMYLALVLIGFLHGLIFLPVVLSLCGPPPKSVKPVEQNQPPSASTERT

SEQ ID NO: 82329 - protein, 84 aa, Setaria italica
  Transcript Sequence Number=SeqID_16355
DAPQPSEPRTVRFGPDAGASVVVRRRVEELVRSLEELEEDEEGSDASSDLFELESLRRAGADELPVYGTTSLVANRAIAQGAAC

SEQ ID NO: 82330 - protein, 176 aa, Setaria italica
  Transcript Sequence Number=SeqID_16356
  Gene Ontology: Mol. function=transporter activity; Cellular component= membrane; Biological process=oligopeptide transport
  Homolog annotation: Hit_ID=Q2HU45; Match level="QueryCoverage=98%, HitCoverage=27%, E-value=2e-37, Identity=43%"; Hit description=TGF -beta receptor, type I/II extracellular region
FSVAVTAIVYLQDNVGWSVGFAVPMGLMLLSTVSFFLGSGLYIKEKGKRLMFSGIGAAVGAAIRNHRARLPAKTGDGVYHHLKDCKLTVPTDQLRFLNKACMIGSTEEGSGSPSNSGRRPCTVDQVEQLKSAIRVLPIWSSTIFLALAMNQSFAVKQADTMDRRVGKGRFQVPSCS

SEQ ID NO: 82331 - protein, 68 aa, Setaria italica
  Transcript Sequence Number=SeqID_16357
LKGTYFRPSNYQTNFFNNFLECILFASQVARTPNCTIENAMGFVLLLVQILMHPQWCRLGMYMPLGRT

SEQ ID NO: 82332 - protein, 139 aa, Setaria italica
  misc_feature (19)..(19): Xaa can be any naturally occurring amino acid
  Transcript Sequence Number=SeqID_16358
  Gene Ontology: Mol. function=phosphotransferase activity, phosphate group as acceptor; Biological process=nucleobase, nucleoside, nucleotide and nucleic acid metabolic process
  Homolog annotation: Hit_ID=B6T904; Match level="QueryCoverage=99%, HitCoverage=66%, E-value=3e-58, Identity=81%"; Hit description=UMP -CMP kinase family protein
  Pfam annotation: Domain name=ADK; Domain location=1-111; Score=23.4; E_value=1.3e-09; Accession=PF00406.14; Description=Adenylate kinase
RTMIETMIRRKIVPSEVTXKLLQEAMIKVKCQFLIDGFPRNEENRSAFKNVTKISPAFVLFFDCTEEEMEKRLLGRNQGRVDDNIETIKRSSKVFVESSLPVIEYYSSKDKVKKIDAAKPIPEVFEDVTAIFAPYAPKV

SEQ ID NO: 82333 - protein, 76 aa, Setaria italica
  Transcript Sequence Number=SeqID_16359
  Homolog annotation: Hit_ID=Q6Z2H0; Match level="QueryCoverage=63%, HitCoverage=14%, E-value=4e-20, Identity=95%"; Hit description =Putative tubby-like protein
VVKTLEECGRITFPISLKQPGPREQPVQCFVKRDRATSTYLLYLGLSPCKFSCLAVDLVFLFKLFCSYPFRSSVSA

SEQ ID NO: 82334 - protein, 336 aa, Setaria italica
  misc_feature (15)..(15): Xaa can be any naturally occurring amino acid
  Transcript Sequence Number=SeqID_16360
  Gene Ontology: Cellular component=plasma membrane
  Homolog annotation: Hit_ID=Q6Z2G9; Match level="QueryCoverage=100%, HitCoverage=78%, E-value=1e-170, Identity=87%"; Hit description =Tubby-like F-box protein 5
  Pfam annotation: Domain name=Tub; Domain location=41-330; Score =431.2; E_value=1.7e-126; Accession=PF01167.10; Description=Tub family
ARRQVVLCAHVCRSXREVTKEVVKTLEECGRITFPISLKQPGPREQPVQCFVKRDRATSTYLLYLGLSPSLNVENDKLLLAARKVRRATRTSFVISLASNDFSHSSSTYVGKLKPNFLGTKFTIFDSQPPSDAVVLPNNKPSKRQSKQVSPRLPLGNYNVATVTYELTVLRNRGPRRMQCTMHSIPAQCIQEGGKCPTPTGTIHSLDEPSTLPSTKGKEPAVEFSSTSLSADLSGPACTSEAPLVLKNKAPRWHEQLQCWCLNFRGRVTVASVKNFQLVASVDPSLNVPAAEQEKVILQFGKIGKDIFTMDYRYPLSAFQAFAICLTSFDTKPACE

SEQ ID NO: 82335 - protein, 89 aa, Setaria italica
  misc_feature (70)..(70): Xaa can be any naturally occurring amino acid
  Transcript Sequence Number=SeqID_16361
  Gene Ontology: Mol. function=nucleotide binding; Biological process =defense response
  Homolog annotation: Hit_ID=Q60E25; Match level="QueryCoverage=97%, HitCoverage=7%, E-value=4e-20, Identity=65%"; Hit description =Putative NBS-LRR-like protein
INGFPTLVSDESTGGWCSLEELRPLSKLQSLEISCLEKAPSGSMAAKANLSSKHHLTWLDLIFTSRLGDXNGVVEGNISEEEHRRTEEV

SEQ ID NO: 82336 - protein, 85 aa, Setaria italica
  Transcript Sequence Number=SeqID_16362
  Gene Ontology: Mol. function=protein serine/threonine kinase activity; Biological process=protein amino acid phosphorylation
  Homolog annotation: Hit_ID=B9SEN4; Match level="QueryCoverage=98%, HitCoverage=16%, E-value=3e-34, Identity=79%"; Hit description =Serine/threonine protein kinase, putative
AMKVVDKDALAFRKKLRRAEVEREILRTLDHPFLPTLYADFEAAHYACLVMEFCPGGDLHVARQRQPGRRFSISSARYYAATKLP

SEQ ID NO: 82337 - protein, 129 aa, Setaria italica
  misc_feature (15)..(15): Xaa can be any naturally occurring amino acid
  Transcript Sequence Number=SeqID_16363
  Pfam annotation: Domain name=WD40; Domain location=11-49; Score=15.9; E_value=0.17; Accession=PF00400.24; Description=WD domain, G-beta repeat
  Pfam annotation: Domain name=WD40; Domain location=54-91; Score=0.7; E_value=32; Accession=PF00400.24; Description=WD domain, G-beta repeat
  Pfam module annotation: Pfam domain module=WD40::WD40; Domain location=11-49::54-91
IHQADDTEQDAVFWXQGEKTQSPVTAMCFNQQGDLLLVGYGDGHMTIWDVQKATAAKVIYGEHTAPVVHVCFIRQSKAITGDSKGVVLLHTFSIIPVINRLTVKGTQRLFDGNTGIVLSACPLLVDLSL

SEQ ID NO: 82338 - protein, 36 aa, Setaria italica
  Transcript Sequence Number=SeqID_16364
MALQYVEAQRQARPDLADWYASLADLYQRKLWHQLT

SEQ ID NO: 82339 - protein, 116 aa, Setaria italica
  Transcript Sequence Number=SeqID_16365
  Gene Ontology: Mol. function=protein binding; Cellular component =protein complex; Biological process=anaphase-promoting complex -dependent proteasomal ubiquitin-dependent protein catabolic process
  Homolog annotation: Hit_ID=B9RZ27; Match level="QueryCoverage=98%, HitCoverage=28%, E-value=3e-42, Identity=71%"; Hit description=26S proteasome subunit, putative
MALQYVEAQRQARPDLADWYASLADLYQRKLWHQLTLKLDQFLQLQAAQTGDTIIQLYNNFITDFETKINLLKLAHFAVIASRQYPDKDAAITFLEGVITKLRETRESRINEPILT

SEQ ID NO: 82340 - protein, 347 aa, Setaria italica
  Transcript Sequence Number=SeqID_16366
  Gene Ontology: Mol. function=protein binding; Cellular component =protein complex; Biological process=anaphase-promoting complex -dependent proteasomal ubiquitin-dependent protein catabolic process
  Homolog annotation: Hit_ID=Q076B1; Match level="QueryCoverage=100%, HitCoverage=96%, E-value=1e-155, Identity=74%"; Hit description=RPN9 (Fragment)
  Pfam annotation: Domain name=PCI; Domain location=197-305; Score =67.2; E_value=6.1e-17; Accession=PF01399.19; Description=PCI domain
FDKTLQLQAAQTGDTIIQLYNNFITDFETKINLLKLAHFAVIASRQYPDKDAAITFLEGVITKLRETRESRINEPILYVKMQIAAINLEKGNQKECKNLLDEGKTTLDSMTDVDPTVHASFYWISSQYHKARQEFAEFYKNALLYLAYTTVESLSESFKLDLAFDLSLAALLGDNIYNFGELLAHPIINSLIGTKVEWVYHMLQAFNTGNLALYQELCRVHNAALTAQPALVQNERKLLEKINILCLMEIIFSRPSEDRTIPLSVIAERTKLSVSDVEHLLMKSLSVHLIEGIIDEVDSTVHVSWVQPRVLGIPQVKALRERLDAWVGKVHTTLLSVEAETPDLVAA

SEQ ID NO: 82341 - protein, 61 aa, Setaria italica
  Transcript Sequence Number=SeqID_16367
AQPAPPDRLSLAGNPQRSGDRRRRAPPSPAGGESSASRIQAWIPESYGFIPLEIVIQQALY

SEQ ID NO: 82342 - protein, 53 aa, Setaria italica
  misc_feature (1)..(15): Xaa can be any naturally occurring amino acid
  Transcript Sequence Number=SeqID_16368
XXXXXXXXXXXXXXXTCNSTTSCSDQNKFAWRTEGYVFPNKKNENTISRVKLS

SEQ ID NO: 82343 - protein, 146 aa, Setaria italica
  misc_feature (68)..(68): Xaa can be any naturally occurring amino acid
  misc_feature (88)..(88): Xaa can be any naturally occurring amino acid
  misc_feature (113)..(113): Xaa can be any naturally occurring amino acid
  Transcript Sequence Number=SeqID_16369
  Gene Ontology: Cellular component=integral to membrane
  Homolog annotation: Hit_ID=A6MZB6; Match level="QueryCoverage=97%, HitCoverage=76%, E-value=3e-39, Identity=62%"; Hit description =Putative transporter (Fragment)
  Pfam annotation: Domain name=TPT; Domain location=3-140; Score=102.3; E_value=1.7e-27; Accession=PF03151.8; Description=Triose-phosphate Transporter family
DYVWSTAFQQYYVHFLQKKYALNSFNLLGHTAPAQAGSLLLVGPFVDYLLTGKRVDHFNFSSLALFFXLTLSCFIAIGVNLSQFICIXRFSAVSFQVLGHMKTVLVLSLGFLXFFGKEGLNLQVVLGMVLAVLGMIWYGNASAKPR

SEQ ID NO: 82344 - protein, 332 aa, Setaria italica
  Transcript Sequence Number=SeqID_16370
  Gene Ontology: Cellular component=integral to membrane
  Homolog annotation: Hit_ID=B6TVS5; Match level="QueryCoverage=97%, HitCoverage=95%, E-value=1e-125, Identity=69%"; Hit description =Integral membrane protein like
  Pfam annotation: Domain name=TPT; Domain location=156-299; Score =146.3; E_value=9.6e-41; Accession=PF03151.8; Description=Triose -phosphate Transporter family
  Subcellular localization annotation: CTP_CleavageSite=90; ConfidenceScore=5.38e-01
MTSLKKSDKKAALDFAAWSFNVTTSVGIIMVNKALMATHGFSFATTLTGLHFVTTTLMTIVFRWLGLSQPSHLPLADLIKFVIFSNLSIVGMNVSLMWNSVGFYQIAKLCMIPASCLLEVVFDHVHYSRDTKLSIMVVLIGVAVCTVTDVSVNARGLIAAVIAVWSTAFQQYYVHFLQKKYALNSFNLLGHTAPAQAGSLLLVGPFVDYLLTGKRVDHFNFSSLALFFLTLSCFIAIGVNLSQFICIGRFSAVSFQVLGHMKTVLVLSLGFLFFGKEGLNLQVVLGMVLAVLGMIWYGNASAKPGGKERRSILPVRSASLKGSSEEKAGAEK

SEQ ID NO: 82345 - protein, 117 aa, Setaria italica
  Transcript Sequence Number=SeqID_16371
  Gene Ontology: Cellular component=integral to membrane
  Homolog annotation: Hit_ID=B6T9X6; Match level="QueryCoverage=100%, HitCoverage=24%, E-value=1e-57, Identity=92%"; Hit description=Amino acid carrier
SVELGHTAASKCYDDDGRLKRTGTMWTASAHIITAVIGSGVLSLAWAIAQLGWVAGPTVMLLFSFVTYYTSALLADCYRSGDPCTGKRNYTYMDAVNANLSGIKVQICGFLQYANIV

SEQ ID NO: 82346 - protein, 327 aa, Setaria italica
  Transcript Sequence Number=SeqID_16372
  Gene Ontology: Mol. function=transporter activity; Cellular component= intracellular; Biological process=transport
  Homolog annotation: Hit_ID=B6TAH4; Match level="QueryCoverage=99%, HitCoverage=98%, E-value=1e-148, Identity=74%"; Hit description =SEC14-like protein 1
  Pfam annotation: Domain name=CRAL_TRIO; Domain location=91-276; Score= 36.1; E_value=1.4e-07; Accession=PF00650.12; Description=CRALTRIO domain
  Pfam annotation: Domain name=CRAL_TRIO_N; Domain location=2-69; Score= 29.1; E_value=1.8e-05; Accession=PF03765.7; Description=CRALTRIO, N -terminus
  Pfam module annotation: Pfam domain module=CRAL_TRIO::CRAL_TRIO_N; Domain location=91-276::2-69
MGADSEDAVKQLSLLMEQVETPLKRSFQNVHQGYPKETLMRFLKAREWNVSKAHKMIVDSLNWRIQNEIDSVLERPIVPVDLYRSIRDSQLVGLSGYTKEGLPVFAIGVGHSTYDKASVHYYVQSHIQINEYRDRIILPRLSQQFGRPVTSCVKVLDMTGLKLSALSQIKMLTSISTVDDLNYPEKTETYYVVNVPYIFSACWKVVKPLLQERTKKKVKVLSGCGRDELLKIMDYSSLPHFCRREGSGSSKHSSSDVDNCFSLDHPFHKELYGHIKEQASHRELIKMGSLHVSIPEPDPNDAKIVEVIQAEFQKMGEQDGSTNGHKD

SEQ ID NO: 82347 - protein, 112 aa, Setaria italica
  misc_feature (38)..(38): Xaa can be any naturally occurring amino acid
  Transcript Sequence Number=SeqID_16373
  Gene Ontology: Mol. function=aminoacyl-tRNA hydrolase activity; Cellular component=chloroplast; Biological process=translation
  Homolog annotation: Hit_ID=B9RE24; Match level="QueryCoverage=88%, HitCoverage=36%, E-value=1e-38, Identity=73%"; Hit description =Peptidyl-tRNA hydrolase, putative
  Pfam annotation: Domain name=Pept_tRNA_hydro; Domain location=1-98; Score=-22.2; E_value=1.1e-06; Accession=PF01195.11; Description =Peptidyl-tRNA hydrolase
IYDDLDIPFAKLRLLPKGGHGGHNGMRSIIDHFKTEPXFPRLRMGIGRPPEEMGAISFVLRSFSKEEKEELEVTFQRGLQAVRIMVREGFNKSATFVNTPLPLEMPLEMLNR

SEQ ID NO: 82348 - protein, 785 aa, Setaria italica
  Transcript Sequence Number=SeqID_16374
  Gene Ontology: Mol. function=protein binding; Cellular component =nucleus; Biological process=ribosome biogenesis
  Homolog annotation: Hit_ID=B9R8L9; Match level="QueryCoverage=100%, HitCoverage=99%, E-value=0.0, Identity=63%"; Hit description =Ribosome biogenesis protein tsr1, putative
  Pfam annotation: Domain name=AARP2CN; Domain location=228-308; Score =99.4; E_value=1.3e-26; Accession=PF08142.4; Description=AARP2CN (NUC121) domain
  Pfam annotation: Domain name=DUF663; Domain location=481-774; Score =514.7; E_value=1.2e-151; Accession=PF04950.4; Description=Protein of unknown function (DUF663)
  Pfam module annotation: Pfam domain module=AARP2CN::DUF663; Domain location=228-308::481-774
MGGGRAQVNKAHKTRFASKASRHAHKIDKVRSGKPESSHRAAVKGARAARIQQSKAIRDKKRAALLKEKRSSVGSSGAPRVIVLVGLSSSTDVGSLAKDLLTFAEGDDGKLRSSTVASPTYKLRTTVLQAPYGDLTSCMELAKVADLLAFVLPANSLYSSDSSSPIDEFGSQCLSVFRAMGLPSTAVFIRDLPADNRSRQELKKAATSFLSAELPEDCKFYLADTKDDLHKFMWLFKEQHLSSPHWRNQRPYVMSEQICIKPDDNTGLCTLLVSGYLRAHNLSVNQLVHVSGAGDFQLGQIDVLKDPCPLCERKSSDVMETEDDGIQIVNTFVSDPSNQEPLLVENVPDPLAGEQTWPTEEDMKEANINNKERKLVKRKLPRGTSEYQAAWIVDDTDDEDNDSDNDNQAGSGMVIDEQGHADEGSDGSDIDAVSHFTEKFDTETVGDTEMADDENLTKEQIEAEIKKIKEANTEDEEFPDEVETPLDVPAKKRFAKYRGLKSFRTSTWDPKESLPPDYARIFAFDNFTRTQKHVLAKIAELDGGTKDCALVGSYVRLYVTNVPTDIASKLCHPSRRIPVVVSGLLQHESKMSVLHFSIKKHDSYEAPIKSKEPLIFNVGFRQFTARPLFSSDNINCNKHKMERFLHHGRFSVASVYAPICFPPLPLIVLKNRDGEQPAIAAVGSLKSVDPDRIILKKIVLTGYPQRVSKLKAIVRYMFHNPEDVKWFKPVELWTKHGRRGRIKETVGTHGAMKCIFNSSIQQHDTVCMSLFKRAYPKWPEQLYHV

SEQ ID NO: 82349 - protein, 301 aa, Setaria italica
  misc_feature (16)..(16): Xaa can be any naturally occurring amino acid
  Transcript Sequence Number=SeqID_16375
  Gene Ontology: Mol. function=ubiquitin-protein ligase activity; Cellular component=ubiquitin ligase complex; Biological process =ubiquitin-dependent protein catabolic process
  Homolog annotation: Hit_ID=B6SV52; Match level="QueryCoverage=100%, HitCoverage=39%, E-value=1e-141, Identity=83%"; Hit description =Ubiquitin-protein ligase
  Pfam annotation: Domain name=Arm; Domain location=122-160; Score=7.8; E_value=1.3; Accession=PF00514.15; Description=Armadillobeta-catenin -like repeat
  Pfam annotation: Domain name=Arm; Domain location=204-244; Score=4.5; E_value=3.3; Accession=PF00514.15; Description=Armadillobeta-catenin -like repeat
  Pfam annotation: Domain name=Arm; Domain location=81-121; Score=4.1; E_value=3.7; Accession=PF00514.15; Description=Armadillobeta-catenin- like repeat
  Pfam module annotation: Pfam domain module=Arm::Arm::Arm; Domain location=122-160::204-244::81-121
  Subcellular localization annotation: CTP_CleavageSite=48; ConfidenceScore=5.05e-01
VSYAMVLNGFVEASLXLRNDTGSYSVQAQKAGFQFFLTFLSNSRAKIPSMNEEAFHLITSFLDSELKVEALLTLHGLVQHLSSPRSHVMASVVTPPLFKMLASEDTEGLELSLRILCELSCDADIRSSLVSMGIISKLVPIFSEGSFVECCLEILRNLCDMEEAAVRITRTSRCLASVAEYLDVGSPKEREHAVVILLAICSRSIEDCLLVMKEGVIPALVDLSVNGTEEAKSCSTKLLHLLRDMRRSDQFTNSCSQEVAATDAVEDAPDNSVHKQPISKSSRFFQKKLNIFSKPRSLTLF

SEQ ID NO: 82350 - protein, 76 aa, Setaria italica
  Transcript Sequence Number=SeqID_16376
KKSYCTCIGTGFLRWWETKLCKCLLPCSMCLQTSDGGKQNYVSACFHVPCVSKLVHYFEFQISRQMQDSKKLVSQN

SEQ ID NO: 82351 - protein, 138 aa, Setaria italica
  Transcript Sequence Number=SeqID_16377
CSIILVSSYPTLGNYFTAALHAKLVGHTSNSLRLATFFWLMPHKVAAWIYWEALRLWLKNVKFLDHPRYLNMSYRDEALKRDLELRSSCSFLQKQKANNQRNSSTDKTCEISNHPDNKDDENIMKRWCVWRDAQWPWS

SEQ ID NO: 82352 - protein, 89 aa, Setaria italica
  Transcript Sequence Number=SeqID_16378
VLVMGRGGGSCDRPLQIQDHKKTFICIGCHRHESFTTMKKTSSLQSSFWNQFMTGIVMLPLVVLSCSGKFMHIVMTEKMLWRKQGRARV

SEQ ID NO: 82353 - protein, 97 aa, Setaria italica
  Transcript Sequence Number=SeqID_16379
  Subcellular localization annotation: CTP_CleavageSite=75; ConfidenceScore=5.26e-01
PPAALVSAGGIPYCPPPHPAPPLQIGCRFLVSWQPTSPSPRSQLSIPLHHQLIPPSPSSPLAPTPPLPLPRLTPAAAAAAAAVPVESNQIKSRRKVV

SEQ ID NO: 82354 - protein, 301 aa, Setaria italica
  misc_feature (267)..(267): Xaa can be any naturally occurring amino acid
  Transcript Sequence Number=SeqID_16380
  Gene Ontology: Mol. function=DNA-3-methyladenine glycosylase I activity; Biological process=base-excision repair
  Homolog annotation: Hit_ID=B6U9I4; Match level="QueryCoverage=94%, HitCoverage=68%, E-value=1e-132, Identity=82%"; Hit description=DNA -3-methyladenine glycosylase I
  Pfam annotation: Domain name=Adenine_glyco; Domain location=70-250; Score=315.6; E_value=1e-91; Accession=PF03352.5; Description =Methyladenine glycosylase
  Subcellular localization annotation: CTP_CleavageSite=43; ConfidenceScore=5.05e-01
LSSSCSSDASAELVRTRAFTGKVEKSRSWSTAAPKQGKAVGKVAESKSAGVDFVAPVTPEAVEGKRRCAWATPTTDPFYVTFHDEEWGVPVHDDRRLFELLVLSCALAELTWPEILKRRQLFREIFMDFDPPAVSKINEKKLVAPGSVALSLLSEQKLRAVLENARQILKIADEFGSFDRYCWGFLNPKPIVSKFRYPRQVPVKSPKADIISKDMMRRGFRGVGPTVIYSFMQAAGLTNDHLVSCFRFEECNATPTLCTRDINKANXKADLKKDEMTTKICCEEVGTNAEMPRTIDALIVS

SEQ ID NO: 82355 - protein, 195 aa, Setaria italica
  Transcript Sequence Number=SeqID_16381
  Gene Ontology: Mol. function=oxidoreductase activity; Biological process=oxidation reduction
  Homolog annotation: Hit_ID=B6UEX0; Match level="QueryCoverage=96%, HitCoverage=67%, E-value=2e-96, Identity=89%"; Hit description=3 -oxoacyl-reductase
PRRRRWQRAWDAFGRIDVLINNAGIRGAVHSPLDWPEDEWDKLIKTNLTGLWLVAKHVCRRMRDAKLKGSVINISSIAGLNRGHLPGSIGYASSKSAVHYATKLMALELGAYGIRVNAIAPGLFKSEITAPLLQKRWLNTVASKIVPLKEHGTTDPALTSLVRFLIHEASSYVTGNIFVVDSGVSIPGVPIFSSL

SEQ ID NO: 82356 - protein, 105 aa, Setaria italica
  Transcript Sequence Number=SeqID_16382
  Gene Ontology: Mol. function=diacylglycerol kinase activity; Biological process=activation of protein kinase C activity
  Homolog annotation: Hit_ID=Q2QN60; Match level="QueryCoverage=97%, HitCoverage=20%, E-value=6e-29, Identity=55%"; Hit description =Pentatricopeptide, putative, expressed
  Pfam annotation: Domain name=PPR; Domain location=31-65; Score=7.3; E_ value=1.2; Accession=PF01535.12; Description=PPR repeat
  Pfam annotation: Domain name=PPR; Domain location=67-101; Score=15.5; E_value=0.13; Accession=PF01535.12; Description=PPR repeat
  Pfam module annotation: Pfam domain module=PPR::PPR; Domain location =31-65::67-101
MIAGLAFHGMGKVALEYFCQMKHDGFQPNSVTYIAVLTACSHSCLLNEGRMHFNEMRSLHRIQPQIEHYGCMIDLLARSGLLDEAMNLVQTMPMQPNAVIVGLHL

SEQ ID NO: 82357 - protein, 473 aa, Setaria italica
  Transcript Sequence Number=SeqID_16383
  Gene Ontology: Mol. function=dihydrolipoyl dehydrogenase activity; Cellular component=cytoplasm; Biological process=cell redox homeostasis
  Homolog annotation: Hit_ID=Q94CN9; Match level="QueryCoverage=99%, HitCoverage=83%, E-value=0.0, Identity=97%"; Hit description =Dihydrolipoyl dehydrogenase
  Pfam annotation: Domain name=Pyr_redox; Domain location=159-260; Score=88.4; E_value=2.6e-23; Accession=PF00070.19; Description =Pyridine nucleotide-disulphide oxidore
  Pfam annotation: Domain name=Pyr_redox_2; Domain location=4-311; Score=110.7; E_value=5.1e-30; Accession=PF07992.6; Description =Pyridine nucleotide-disulphide oxidore
  Pfam annotation: Domain name=Pyr_redox_dim; Domain location=340-453; Score=149.2; E_value=1.2e-41; Accession=PF02852.14; Description =Pyridine nucleotide-disulphide oxidored
  Pfam module annotation: Pfam domain module=Pyr_redox::Pyr_redox _2::Pyr_redox_dim; Domain location=159-260::4-311::340-453
QTNKVEKGLKTAIIEGDVVGGTCVNRGCVPSKALLAVSGKMRELQDEHHMKSLGLQVSSPGYDRQAVADHANNLASKIRSNLTNSMKALGVDILTGIGTIVGKQKVRYGKVGFPDNEITARNIIIATGSVPFVPKGIEIDGKTVFTSDHALKLESVPDWIAIVGSGYIGLEFSDVYTALGSEVTFVEALDQLMPGFDPEIGKLAQRILINPRKIDYHTGVFASKITPAKDGKPVLIELIDAKTKEHKETLEVDAALIATGRAPFTKGLGLENINVVTQRGFVPVDERMQVMDADGSVVPNLYCIGDANGKLMLAHAASAQGISVVEQISGRDNILNHLSIPAACFTHPEISMVGLTEPQAREKADKEGFEVSVVKTSFKANTKALAENEGDGLAKMIYRPDTGEILGVHILGLHAADLIHEASNAIALGTRVQDIKFAVHAHPTLSEVLDELFKAAKVNSAGVSHSVNEPVAA

SEQ ID NO: 82358 - protein, 88 aa, Setaria italica
  Transcript Sequence Number=SeqID_16384
  Subcellular localization annotation: CTP_CleavageSite=54; ConfidenceScore=5.70e-01
MSLRYMSRVGARAAQAVRDSTGRSVKDKAQSASSSASMARSGRAAGSVDSGRVSAAAAARRKAEEEKRRRAEQALRTVMFLSVWGPNT

SEQ ID NO: 82359 - protein, 141 aa, Setaria italica
  Transcript Sequence Number=SeqID_16385
  Gene Ontology: Mol. function=RNA-directed DNA polymerase activity; Biological process=RNA-dependent DNA replication
  Homolog annotation: Hit_ID=Q7XUD8; Match level="QueryCoverage=90%, HitCoverage=9%, E-value=3e-27, Identity=44%"; Hit description =OSJNBa0088A01.7 protein
MIGPDVDVLCWNVRGLNQQAHKDVVHQIVANTTCAIACFQETKLAQIDDFTASYLGGYRLTKTAFAPATRASGTRGGLLILWDERVVQVSQITVGMFHLSASISLHDGETFRLSNVYGPSSQGLREPFYFFWQQHYVGCVD

SEQ ID NO: 82360 - protein, 107 aa, Setaria italica
  misc_feature (32)..(32): Xaa can be any naturally occurring amino acid
  Transcript Sequence Number=SeqID_16386
  Gene Ontology: Mol. function=protein serine/threonine kinase activity; Cellular component=cell surface; Biological process =protein amino acid phosphorylation
  Homolog annotation: Hit_ID=Q25AB6; Match level="QueryCoverage=100%, HitCoverage=79%, E-value=3e-29, Identity=57%"; Hit description =B0808H03.2 protein
  Subcellular localization annotation: CTP_CleavageSite=23; ConfidenceScore=5.12e-01
LVFFSSPCQSNNQLTQAKPLFLKDKLVSEGGXFALGFFSPTNSSRKLYIGIWYNSIPERTVVWVANRDNPINSPSSAKLAITNNSELMLSDYPKAESIWKTNNTRGG

SEQ ID NO: 82361 - protein, 229 aa, Setaria italica
  Transcript Sequence Number=SeqID_16387
  Homolog annotation: Hit_ID=B4FE44; Match level="QueryCoverage=100%, HitCoverage=100%, E-value=4e-99, Identity=83%"; Hit description =Nitrate-induced NOI protein
  Pfam annotation: Domain name=NOI; Domain location=164-228; Score =26.7; E_value=8.3e-05; Accession=PF05627.3; Description=Nitrate -induced NOI protein
MAQSEIPPFRDWETTGNTKDARKNKKTGIPAQQNDPRRNPEPPRKSPLHPTAYKTDPQNQGPRNPTHRPRPETDHQRHSDHPTHRESAPRRHTNPQREQGGNAGAPRSPYRTAAGSASPMQPSNQSKPKHRSTGMQTPERRASSEGYGQHTPGRSRMKPSDRSYEPEEEVAVPPFGEWDDANAASGEKYTGIFNRVRDDRLSPNTSARQPSTSRAEENKAQQKCFCCIL

SEQ ID NO: 82362 - protein, 81 aa, Setaria italica
  Transcript Sequence Number=SeqID_16388
  Homolog annotation: Hit_ID=Q01K95; Match level="QueryCoverage=100%, HitCoverage=3%, E-value=1e-22, Identity=66%"; Hit description =OSIGBa0148A10.3 protein
SRGRANLEFIGSTKVTIKIDDFPVLSCSDAADASLVDEVHQGDETQIKRWASLREYIQDEVHGAMPDPQVLLKLLSSASQK

SEQ ID NO: 82363 - protein, 127 aa, Setaria italica
  Transcript Sequence Number=SeqID_16389
TLSAGARMHGNFGGSSMEILKIPPLFLEKCLCTVGVEVLVLLSDTNGCFTSVSLLVKYLCPKIHIFMLEQVQRKGYAKDPSLVVHIILRSSPLMVSARVFMSKIHIFMLEQVSYVKDPSVVVLLLFM

SEQ ID NO: 82364 - protein, 89 aa, Setaria italica
  Transcript Sequence Number=SeqID_16390
  Subcellular localization annotation: CTP_CleavageSite=76; ConfidenceScore=5.62e-01
KKEVSKRTRSKNGKSASFGSTASSSSDECATVTTPRTVLPPPASGAKGKPAPVTRADLEIALRRVVSSEAELAEMLADAEGSGILLEEI

SEQ ID NO: 82365 - protein, 182 aa, Setaria italica
  Transcript Sequence Number=SeqID_16391
  Gene Ontology: Mol. function=calcium ion binding
  Homolog annotation: Hit_ID=Q2RAQ9; Match level="QueryCoverage=73%, HitCoverage=68%, E-value=1e-18, Identity=42%"; Hit description=EF hand family protein, expressed
  Pfam annotation: Domain name=efhand; Domain location=116-144; Score =39.5; E_value=1.4e-08; Accession=PF00036.24; Description=EF hand
  Pfam annotation: Domain name=efhand; Domain location=153-181; Score =29.1; E_value=1.8e-05; Accession=PF00036.24; Description=EF hand
  Pfam module annotation: Pfam domain module=efhand::efhand; Domain location=116-144::153-181
  Subcellular localization annotation: CTP_CleavageSite=55; ConfidenceScore=5.89e-01
MKLGVPFFGSSGAKKEVSKRTRSKNGKSASFGSTTSSSSDECATVTKRRTVLPPSASASASGAKRNPAPVTREDLEIALRRVVSSEAELAAMLAEAEAAGLALEDIAAAEVEDVGELRETFAVFDADGDGRISAEELLAVLASLGDDRCSVEDCRRMIGGVDVDGDGFVCFNEFTRMMTQGV

SEQ ID NO: 82366 - protein, 53 aa, Setaria italica
  Transcript Sequence Number=SeqID_16392
  Gene Ontology: Mol. function=protein serine/threonine kinase activity; Biological process=protein amino acid phosphorylation
  Homolog annotation: Hit_ID=Q6YVK3; Match level="QueryCoverage=83%, HitCoverage=11%, E-value=3e-11, Identity=72%"; Hit description =Protein kinase-like
ESLANSAENNYNLAKPPPSTMRDGMPWGGRAGHSFAASGLPPSVARKDSGRIF

SEQ ID NO: 82367 - protein, 90 aa, Setaria italica
  Transcript Sequence Number=SeqID_16393
  Gene Ontology: Mol. function=protein serine/threonine kinase activity; Biological process=protein amino acid phosphorylation
  Homolog annotation: Hit_ID=Q6YVK3; Match level="QueryCoverage=82%, HitCoverage=19%, E-value=9e-21, Identity=64%"; Hit description =Protein kinase-like
FSAEGFELGIGANLLDLFHASSLGERARPPGHVTLDGYNHANYSQQSLPSFRGQPFQQYNNMTSSYIRPMRTHHNGRPVWTNYNLAEPPP

SEQ ID NO: 82368 - protein, 70 aa, Setaria italica
  Transcript Sequence Number=SeqID_16394
  Gene Ontology: Mol. function=protein serine/threonine kinase activity; Cellular component=cytoplasm; Biological process=protein amino acid phosphorylation
  Homolog annotation: Hit_ID=Q56YT6; Match level="QueryCoverage=67%, HitCoverage=9%, E-value=8e-16, Identity=78%"; Hit description =Protein kinase-like
ILTCELVLLTNARYTTAIDMWSFGCIVAELFIGLPLFPGASEYDVLCRMIEILGLVLPAEKLSLGFKFRL

SEQ ID NO: 82369 - protein, 132 aa, Setaria italica
  Transcript Sequence Number=SeqID_16395
GGGDEDEARGRRAGRQERVGAQVALGVEVEQEDEDDDHEEEDDRGEQHPVADGQLLLPRAAASRGLVRRLAGPRRRRVRAHRRHQCRRRRGRRGEHGCFLGMAGSSRGPLSDAEERRGGDEENGDETGRGQR

SEQ ID NO: 82370 - protein, 277 aa, Setaria italica
  misc_feature (72)..(72): Xaa can be any naturally occurring amino acid
  Transcript Sequence Number=SeqID_16396
  Gene Ontology: Cellular component=nucleus
  Homolog annotation: Hit_ID=Q9LPC9; Match level="QueryCoverage=93%, HitCoverage=47%, E-value=2e-55, Identity=45%"; Hit description =F22M8.5 protein
  Pfam annotation: Domain name=SET; Domain location=18-277; Score=54.1; E_value=5.5e-13; Accession=PF00856.20; Description=SET domain
RKSSNTAMAAAADEARLESFLQWLQANGADLRGCTIRTCGGGKGFGVFSTAAPEPGATDGVVLVVPLDLAIXPMRVLQDPLVGARCRALFEEGGVDDRLLVMLFLMAERRRPGSLWKPYLDMLPSTFGSSLWFSEEELAELEGTTLYRATVIQRNSMQSLFDEKVKGLVEELLHVDESASSTEVLFEDFLWANSIFWTRALNIPLPHSYVFPGSCSDQQTRTNDDVCDSSLPAHQETDITAKDSSSDENSKSSNTESIWVEGLIPGIDFCNHNVKAL

SEQ ID NO: 82371 - protein, 131 aa, Setaria italica
  misc_feature (97)..(97): Xaa can be any naturally occurring amino acid
  Transcript Sequence Number=SeqID_16397
  Gene Ontology: Mol. function=RNA binding
RKEWAPSDPSQPAPAPAPSPTTSIDRIVHRLRNLGLASDDDDPSAATATATAPPDGTERLGDLLDRSWARPDRQFAAASFDDAVLPWERDDEAAGGXRDEEDGAKRRRVKAPTLAELTIEDEELRRLRRLG

SEQ ID NO: 82372 - protein, 212 aa, Setaria italica
  misc_feature (15)..(15): Xaa can be any naturally occurring amino acid
  misc_feature (104)..(104): Xaa can be any naturally occurring amino acid
  misc_feature (172)..(172): Xaa can be any naturally occurring amino acid
  Transcript Sequence Number=SeqID_16398
  Gene Ontology: Mol. function=rRNA methyltransferase activity; Cellular component=cytoplasm; Biological process=cell cycle
  Homolog annotation: Hit_ID=B9RB84; Match level="QueryCoverage=96%, HitCoverage=71%, E-value=2e-69, Identity=62%"; Hit description =Methyltransferase gidB, putative
  Pfam annotation: Domain name=GidB; Domain location=2-184; Score =157.8; E_value=3.2e-44; Accession=PF02527.7; Description=Glucose inhibited division protein
  Pfam annotation: Domain name=Methyltransf_11; Domain location=47-146; Score=0.1; E_value=0.09; Accession=PF08241.4; Description =Methyltransferase domain
  Pfam module annotation: Pfam domain module=GidB::Methyltransf_11; Domain location=2-184::47-146
GLNLTAVTDEAEVMXRHVADSLAVLPPLERAYRSTTGGSDIDGVSFIDVGSGAGLPGLILAIARPSWRFTLLESMKKRCTFLEHAVEAMGLSNVDVVCDRAEDXNVGQSLDYREAYDIAAARAVAELKVLAEYCLPLVRVGGLFIAAKGHDPHEEIKDAKSAVQKLGASMLXLCNVESMGPHGHRTAVIYFKERATPKKYPRLPGTPSKMPL

SEQ ID NO: 82373 - protein, 187 aa, Setaria italica
  Transcript Sequence Number=SeqID_16399
  Gene Ontology: Mol. function=binding
  Homolog annotation: Hit_ID=Q9S7T0; Match level="QueryCoverage=100%, HitCoverage=15%, E-value=5e-41, Identity=44%"; Hit description =F28J7.11 protein
IAAALSSPAESLRLAAVTSLSSLLPRDDLALMCSTNPSLMAHATTWWGRLAELALDSADAVSASAFEALARLFQELEGRRMSRLAGDKLVDGEGALAVRAQWAADAIDFIWSRRNMLIARTMVMPVESFRVTVYPLVHAAKMVASGVVNTLRRIAKPGDTSIADSVESSAEKLVGVSDIVSHLLPFL

SEQ ID NO: 82374 - protein, 896 aa, Setaria italica
  Transcript Sequence Number=SeqID_16400
  Gene Ontology: Mol. function=binding
  Homolog annotation: Hit_ID=Q9S7T0; Match level="QueryCoverage=89%, HitCoverage=68%, E-value=0.0, Identity=72%"; Hit description =F28J7.11 protein
NWFVFLGCVVNTLRRIAKPGDTSIADSVESSAEKLVGVSDIVSHLLPFLSSLDPPLVFEVGINMLALADVPGGKPEWASAAIIAILTLWDRQEFSSMRETIVRAVVTNLHLLDLGMQVSLFKRLLQMVRNLRAESDRMHALACICRTALCVDLFAKESVRRGQKPVPGTDVISLFEDVRVKEDLNSVTSKNLFREELVASLVESCFQLSLPLPEFKNSGTESRVIGALAYGTGYGALNWTEPALDVVEVCRPCVLWDCDGRTYAIDCYLKLLVRLCHIYDTRGGVKTIKAGASQDQILNETRLRNLQLQLIRDLREVHTPRISSRLIWAISEHFDLEGLDPLLADDPEDPLNIIISNMHKILFNTDSSATTSNRIQDVQAVLICAQRLGARNARAGQLISKELEEFRASTSADSVTKHQSRYVLQVIKYVTNHPDNRWVGVGDATGDYPFSHHKLTVQFSEASAAQDRKLEGLVHKAIRELWRPNPSQLTLLQTKGIGALHKELPKACTLTGSSDPCYIEAYHLADPTDGRITLHLKILNLTELELNRVDIRVGLSGALYYMDGFSRTVRHLRNLVSQDPVQSSVTVGVSHFERCSLWVQVLYYPFYGSGGSADYEGDYAEEDSQMMRQKRSLRPELGEPIVLRCQPYKFPLAELLLPLECSPVEYFRLWPSLPAMVECTGTYTYEGSGFKATAAQQYDSSPFLSGLKSISSKPFHQVCSHFIRTVAGFQLCYAAKTWFGGFVGMMIFGASEVSRNVDLGDETTTMICKFVMRASDESITREIEADLQGWLDDITDGAVEYMPEDEVKSAAAERLKISMERLAILKAAKPKVPPAKTEQEEEEERKQSEELDGFGNPKGPSTLSKLTAEEAEHRALQAAVLQEWHQLCKEKAMKAQ

SEQ ID NO: 82375 - protein, 85 aa, Setaria italica
  Transcript Sequence Number=SeqID_16401
  Subcellular localization annotation: CTP_CleavageSite=46; ConfidenceScore=5.41e-01
MVAPQQQHFAPVLVPGSQQGMQMAIQAASMGMMMASMSQQAQAQAMAAHQQAQGMVQSQSPALPMMQMQQAQAGDMMVTPPLPLG

SEQ ID NO: 82376 - protein, 127 aa, Setaria italica
  Transcript Sequence Number=SeqID_16402
  Gene Ontology: Mol. function=transferase activity; Biological process= carbohydrate metabolic process
  Homolog annotation: Hit_ID=Q9FT43; Match level="QueryCoverage=70%, HitCoverage=17%, E-value=5e-20, Identity=55%"; Hit description =Sterol glucosyltransferase-like protein
SFHVTAASTNILCFCCFDNSGSTAAALLAGIPQLVCPFLLDQFNWAERLHWLGVAPEPLQRQHLIPNNDDALSIHNAADVLLGAIRSALSPEIKAQATRIAHKLSYEDGVGEAIKIFKERVLTQNKT

SEQ ID NO: 82377 - protein, 145 aa, Setaria italica
  misc_feature (35)..(35): Xaa can be any naturally occurring amino acid
  Transcript Sequence Number=SeqID_16403
  Gene Ontology: Mol. function=hydrolase activity, hydrolyzing O -glycosyl compounds; Cellular component=anchored to membrane; Biological process=carbohydrate metabolic process
  Homolog annotation: Hit_ID=B6TCY1; Match level="QueryCoverage=100%, HitCoverage=29%, E-value=9e-62, Identity=82%"; Hit description =Glucan endo-1,3-beta-glucosidase 4
  Pfam annotation: Domain name=Glyco_hydro_17; Domain location=1-145; Score=-125.5; E_value=0.00075; Accession=PF00332.10; Description =Glycosyl hydrolases family 17
KKIQHVRLIDSDHQMLTALANTGIEVMVGVPNDQXLLRVGQSRSTAADWINKNVAAYVPATNITYIAVGDEVLTNIPNAALVLIPALQFLQSALLAANLNTQVKISSPHSMDMISKAFPPSTATFNSTWSSIMSQYLQFLKNTGS

SEQ ID NO: 82378 - protein, 142 aa, Setaria italica
  Transcript Sequence Number=SeqID_16404
  Gene Ontology: Mol. function=phospholipase D activity; Cellular component=cytoplasmic vesicle; Biological process=phosphatidylcholine metabolic process
  Homolog annotation: Hit_ID=A3FJ58; Match level="QueryCoverage=100%, HitCoverage=17%, E-value=8e-66, Identity=83%"; Hit description =Phospholipase D alpha
  Pfam annotation: Domain name=PLDc; Domain location=116-142; Score =26.5; E_value=0.00011; Accession=PF00614.14; Description =Phospholipase D. Active site motif
INALHLIPKELSLKIVSKIEAGERFAVYVVLPMWPEGVPESGSVQAILDWQRRTMEMMYRDVSLAIRAKGLQDDPRDYLTFFCLGNREAPRPGEYVPPERPDPDTDYERAQQARRFMIYVHAKTMIVDDEYIIVGSANINQR

SEQ ID NO: 82379 - protein, 78 aa, Setaria italica
  misc_feature (38)..(38): Xaa can be any naturally occurring amino acid
  Transcript Sequence Number=SeqID_16405
CIGLSKVGKVGRSVGGEKKPTPLPIPWHHLPPQYMNMXHGRLHEPAPPPAYYNPYAPAPYYYVRNMSMEENPNSCAIC

SEQ ID NO: 82380 - protein, 119 aa, Setaria italica
  Transcript Sequence Number=SeqID_16406
  Gene Ontology: Mol. function=metal ion binding
GKKEGQQNGVGGRAGKKDGDGKKEDGGEGKKEGDGDGKKEGDGKKEEGGGGGEKKPTPLPIPWHHLPPQYMNMVTADYMNQYRPPPPPPPAYYNPYAPAPYYYVRNMSMEENPNSCAIC

SEQ ID NO: 82381 - protein, 54 aa, Setaria italica
  Transcript Sequence Number=SeqID_16407
MPTKGQFSSERNVKIISGRDGQKKGNSQYDQIAHVPKDRVTAANGNVDGKNYSH

SEQ ID NO: 82382 - protein, 223 aa, Setaria italica
  misc_feature (56)..(56): Xaa can be any naturally occurring amino acid
  Transcript Sequence Number=SeqID_16408
SRTTSSRSKWQFSSERNVKIISGRDGQKKGNSQHDQIAHVPKDRVTAANGNVDGKXEDRIRVAKNDKFRRQRESWSGEKAACMKGSKPWPGRKTTTVDELVKHMSNVPSYLQRKETADHLQDKALNVGVLEWGLLANWSQQQKHELARSHGASPSNTSRSVLFSSPSHSSASPSSRSLESNQSTPMSDHHHSSIRAQQSRLSDKQHGTARYSPSPNSAVLSLL

SEQ ID NO: 82383 - protein, 285 aa, Setaria italica
  Transcript Sequence Number=SeqID_16409
  Homolog annotation: Hit_ID=Q9S7Y6; Match level="QueryCoverage=97%, HitCoverage=78%, E-value=3e-93, Identity=56%"; Hit description =F28J7.5 protein
MIMRGPITPWEYGAKLGHPVSTPYEYLIGCDNILAKIHTRNPSACDKVGGVIIMHIDDLRHFAILWLHKSEEVRADKAHYATNITGDIYASGWISEMYGYSFAAAEINLRHIIRRDIMIYPGYVPLPGAKYKVFHYGLRFGVGNWSFDKADWRNSDVVNTCWAKFPEPPDPATIMQEDLDARERDLLSIECGRALNKALYLHHKRRNCPRLDTIHSTSSNKIERIAHESTRSRNRGKFESMDAAREKTVERAAATIPNVHRSKRRRGRSSRMWIIAVWWLQPFRQ

SEQ ID NO: 82384 - protein, 145 aa, Setaria italica
  Transcript Sequence Number=SeqID_16410
  Gene Ontology: Mol. function=electron carrier activity; Biological process=electron transport chain
  Homolog annotation: Hit_ID=B6SXE9; Match level="QueryCoverage=67%, HitCoverage=75%, E-value=2e-40, Identity=79%"; Hit description =Chemocyanin
  Pfam annotation: Domain name=Copper-bind; Domain location=49-145; Score=-3.6; E_value=0.0028; Accession=PF00127.12; Description=Copper binding proteins, plastocyaninaz
  Pfam annotation: Domain name=Cu_bind_like; Domain location=60-138; Score=149.6; E_value=9.6e-42; Accession=PF02298.9; Description =Plastocyanin-like domain
  Pfam module annotation: Pfam domain module=Copper-bind::Cu_bind_like; Domain location=49-145::60-138
VGNKQLLVVQCEGDRAAMAQGRGSGGSVVALAAAALLLCVLLQAQVAESAVFTVGDRGGWTFNSNTWTNGKRFKAGDVLVFKYDSSAHNVASVNAAGYKGCAAPRGARTYTSGNDRVTLARGTNYFICSIPGHCQAGMKIAVTAA

SEQ ID NO: 82385 - protein, 143 aa, Setaria italica
  Transcript Sequence Number=SeqID_16411
  Gene Ontology: Mol. function=extracellular-glutamate-gated ion channel activity; Cellular component=integral to membrane; Biological process=G-protein coupled receptor protein signaling pathway
  Homolog annotation: Hit_ID=Q653Y6; Match level="QueryCoverage=74%, HitCoverage=12%, E-value=6e-15, Identity=40%"; Hit description =Putative ionotropic glutamate receptor ortholog GLR6
HDKWLNPGTCDSQSADVGSADRLNLNSFWGLFLICGVACFIALLIYFARILCQFCEYHDGSNNNTNADDSGDIMDPESERSVRRPARLSSIRDLMSFVDMKEAEVKRAIRSRSRERRLDRSMGASSVSEGPSLSRPSSIMSPV

SEQ ID NO: 82386 - protein, 253 aa, Setaria italica
  Transcript Sequence Number=SeqID_16412
  Gene Ontology: Mol. function=molecular_function; Cellular component =cellular_component; Biological process=biological_process
  Homolog annotation: Hit_ID=B6T6T0; Match level="QueryCoverage=92%, HitCoverage=92%, E-value=1e-122, Identity=91%"; Hit description =Cellular retinaldehyde-binding/triple function, C-terminal
MASGSGGGGGDFSVLVLGSDFATDAGAALLTPADREEWHDCLPDLSDADACFSDLEELQVVLVQGTDRAGRTIVRVVGKFFPAPVIDGERLKKYVFFKLRTELPEGPFCILYIHSTVQSDDNNPGMSILRTIYEELPPEYKERLQVFYFLHPGLRSRLAIATLGRLFLSGGLYWKIKYISRLEYLWVDIRKGVVEIPDFVVEHDKVLEHRPLTDYGIEPDPLHLADVPAAGYSLGRYEDKWAPEDRRYSRNYM

SEQ ID NO: 82387 - protein, 71 aa, Setaria italica
  Transcript Sequence Number=SeqID_16413
TNSLYSRDSSSSEMTVGYGYYSNVIFVIDVSRSNIANKFIDNENIEAQGLEKSCLHLLDDRIRIFLIIVLR

SEQ ID NO: 82388 - protein, 132 aa, Setaria italica
  Transcript Sequence Number=SeqID_16414
  Homolog annotation: Hit_ID=B6THC5; Match level="QueryCoverage=95%, HitCoverage=28%, E-value=7e-21, Identity=48%"; Hit description =Ankyrin repeat protein
  Subcellular localization annotation: CTP_CleavageSite=49; ConfidenceScore=5.49e-01
SHHHHHRLLLPFPSPIQTLNPFSTSSARLRHQLPKPIVLSLSLRPAFSSAFAVAAVDDDEDVVVGDCLVFDDDAFEEPDLDLPSSAPPPRASRYGRRAEASGGGSLVPEKWRDAEEEINLTKKEKRRIAHGM

SEQ ID NO: 82389 - protein, 58 aa, Setaria italica
  misc_feature (6)..(6): Xaa can be any naturally occurring amino acid
  misc_feature (26)..(26): Xaa can be any naturally occurring amino acid
  misc_feature (34)..(34): Xaa can be any naturally occurring amino acid
  Transcript Sequence Number=SeqID_16415
FGALGXLGGLFMAANQVGGDRAHGEXSQAETPPXCSSATSSRCESLRFPSCVRAREAL

SEQ ID NO: 82390 - protein, 225 aa, Setaria italica
  Transcript Sequence Number=SeqID_16416
  Gene Ontology: Mol. function=transporter activity; Cellular component= membrane; Biological process=oligopeptide transport
  Homolog annotation: Hit_ID=B6SVA1; Match level="QueryCoverage=100%, HitCoverage=36%, E-value=7e-95, Identity=76%"; Hit description=LigA
  Pfam annotation: Domain name=PTR2; Domain location=1-225; Score= -99.8; E_value=0.015; Accession=PF00854.13; Description=POT family
  Subcellular localization annotation: CTP_CleavageSite=72; ConfidenceScore=5.22e-01
FFNWYYFTFTIAMMISATVIIYLQSSVSWALGLAVPATLMGLSCALFFMGTPLYVRVRPEGSPFTSFAQVLVAAARKRRLPAPASLGELFDPPHRSNLITKIAYTDQFVCLDKAAVLTPEDELAADGSTAANPWRLCTLQQVEEVKCLARLIPVWSSGIVYYIVLTNLSKYNVLQAMQTDRHLGRSGFQIPAGSFVVFNMLALTVWLPVYDRLLVPALQRVTKRE

SEQ ID NO: 82391 - protein, 192 aa, Setaria italica
  misc_feature (16)..(16): Xaa can be any naturally occurring amino acid
  Transcript Sequence Number=SeqID_16417
  Gene Ontology: Mol. function=transporter activity; Cellular component= membrane; Biological process=oligopeptide transport
  Homolog annotation: Hit_ID=B6SVA1; Match level="QueryCoverage=97%, HitCoverage=31%, E-value=2e-79, Identity=77%"; Hit description=LigA
VLLQQVEEVKCLARLXWSSGIVYYIVLTNLSKYNVLQAMQTDRHLGRSGFQIPAGSFVVFNMLALTVWLPVYDRLLVPALQRVTKREGGITQFQRIGTGIVMSIATMLVAAAAEWHRRRVGDSTSCFVLVPQQVLAGLSEAFAVIGQVDFYYKQFPENMRSVAGALLFLGFAVASYASGLMVTVVHRTTWSV

SEQ ID NO: 82392 - protein, 211 aa, Setaria italica
  Transcript Sequence Number=SeqID_16418
  Gene Ontology: Mol. function=transporter activity; Cellular component= membrane; Biological process=oligopeptide transport
  Homolog annotation: Hit_ID=B6SVA1; Match level="QueryCoverage=95%, HitCoverage=33%, E-value=4e-76, Identity=71%"; Hit description=LigA
LLNVTVLGWLLALTVWLPVYDRLLVPALQRVTKREGGITQFQRIGTGIVMSIATMLVAAAVERHRRRVGNSTSCFVLVPQQVLAGVSEAFAVIGQVDFYYKQFPENMRSVAGAVLSLGFAIASYASGLMVTVVNQRTGGRDGRPDWLAQDLNQGRLDLYYLLIAAMAAVNLVYFVACARWYRFKKSDAGIAVVVLQGNNDGLKVKAAAPPV

SEQ ID NO: 82393 - protein, 119 aa, Setaria italica
  Transcript Sequence Number=SeqID_16419
SGRPSFCTSKLGCLHAGAASWATWSDLTRLAVDGLVQLRLADGPLVAGPCAPCRAGLRHWTWPTRVLLLFVARCWFASMPYTHTNKRGIGRTDRMNTGTPEELAQLQSRITLSILLGSK

SEQ ID NO: 82394 - protein, 55 aa, Setaria italica
  Transcript Sequence Number=SeqID_16420
DKSESESSNHEKTRCGRIEKLSLKTKWLHRNYPLDGFDKQILSRLPFLTGIRSLL

SEQ ID NO: 82395 - protein, 94 aa, Setaria italica
  Transcript Sequence Number=SeqID_16421
  Subcellular localization annotation: CTP_CleavageSite=55; ConfidenceScore=5.38e-01
ASQNHVPCSVKGPDGSALAARPPPYAPGRGHSPSVSPGVHDSLTLSITAKGHSPSASRAEPKLYDSPTAAPMPESHGSQDMDVDNKVHNAPPPI

SEQ ID NO: 82396 - protein, 125 aa, Setaria italica
  Transcript Sequence Number=SeqID_16422
  Homolog annotation: Hit_ID=Q7XSD4; Match level="QueryCoverage=79%, HitCoverage=70%, E-value=1e-18, Identity=52%"; Hit description =OSJNBa0079A21.10 protein
MAFAQRYGYGSAGFFEVVQGLHPRGIPKSEARGGAGVAVNKVKKYLAQMDRAVDYDFYDDDDLRYVRFKSPFNRRPLIGRRPSLGKNAGKRTLRLVGGSSPDYLRQCEEAAFGDFDDSDDWEDEV

SEQ ID NO: 82397 - protein, 84 aa, Setaria italica
  Transcript Sequence Number=SeqID_16423
GLAAACCYLCSELSLQDTTLLVFQSESQTTADHTRHNRDTTSTRPGLNITGEKTAERVAVGVRRAATPSPCAAASRAASSPPRR

SEQ ID NO: 82398 - protein, 110 aa, Setaria italica
  Transcript Sequence Number=SeqID_16424
EYWSTQALSYGCHSELGPLECGFETQHLSLNGSCKDSNQKVEEITSQMTADHTRHDKDTTCTRLGLNITGEKTAERVAVGVRRAATPSPRAAASSPRAPPALPRAASSPR

SEQ ID NO: 82399 - protein, 39 aa, Setaria italica
  Transcript Sequence Number=SeqID_16425
MTTPSRDSNMQQLVPIAPPGKASGSDTGKELVVVDPAGK

SEQ ID NO: 82400 - protein, 119 aa, Setaria italica
  Transcript Sequence Number=SeqID_16426
EYWSTQALSYGCHSELGPLECGFETQHLSLNGSCKDSNQKVEEITSQMTADHTRHDKDTTCTRLGLNITCMPISKRKLKQQFTGSIKKLASKKICKRHEMQFQQVGIMDSYHHELMIEN

SEQ ID NO: 82401 - protein, 106 aa, Setaria italica
  Transcript Sequence Number=SeqID_16427
EWIFSTAAFIAGLDRVDPDLSLNPGDPSISCSDLRRLQITPGTIGTPHARGPASTSPVRRRRRGSPSGCAAPPCHHLVPAPRRLARRQLSPAPLALPAPWSRGGFD

SEQ ID NO: 82402 - protein, 86 aa, Setaria italica
  Transcript Sequence Number=SeqID_16428
LPAGSTTTSSFPVSLPEAFPGGAIGTSCCHVAISARSCHCRIQLYLSFNLTAHKQMTMDMNVEFPSGMVTFGHQVHAMQIEIPSSF

SEQ ID NO: 82403 - protein, 175 aa, Setaria italica
  Transcript Sequence Number=SeqID_16429
  Homolog annotation: Hit_ID=B6T3M6; Match level="QueryCoverage=64%, HitCoverage=63%, E-value=4e-44, Identity=80%"; Hit description=PRKR interacting protein 1
  Pfam annotation: Domain name=DUF1168; Domain location=47-174; Score =166.9; E_value=5.9e-47; Accession=PF06658.4; Description=Protein of unknown function (DUF1168)
MTTPSRDSNMQQLVPIAPPGKASGSDTGKELVVVDPAGKGSGGVKLREDEEDLEVKLRRIMENVPVRVSNTSGSSAGSGSGDFHQYRQMRRREQDRLARMDADYQKRKEMALFEMRKEERLKAAEERTAKKRLKRQKKQRKKEKRTKTSNGGEESNRMESSDDDEGSDDDEKLKQ

SEQ ID NO: 82404 - protein, 176 aa, Setaria italica
  Transcript Sequence Number=SeqID_16430
  Homolog annotation: Hit_ID=B6T3M6; Match level="QueryCoverage=62%, HitCoverage=62%, E-value=7e-42, Identity=80%"; Hit description=PRKR interacting protein 1
  Pfam annotation: Domain name=DUF1168; Domain location=47-175; Score =182.0; E_value=1.7e-51; Accession=PF06658.4; Description=Protein of unknown function (DUF1168)
MTTHSRDSNMQQLVPIAPPGKASGSDTGKELVVVDPAGKGSGGVKLREDEEDLEVKLRRIMENVPVRVSNTSGSSAGSGSGDFHQYRQMRRREQDRLARMDADYQKRKEMAEFELRREERLKAAEERTAKKRLKRQKKKQRKKEKRTKTSNGGEEPNRVESSDDEEGSDDDDKSKQ

SEQ ID NO: 82405 - protein, 291 aa, Setaria italica
  Transcript Sequence Number=SeqID_16431
  Gene Ontology: Mol. function=aspartic-type endopeptidase activity; Cellular component=chromatin; Biological process=DNA integration
  Homolog annotation: Hit_ID=Q688L2; Match level="QueryCoverage=75%, HitCoverage=13%, E-value=3e-92, Identity=75%"; Hit description =Putative polyprotein
  Pfam annotation: Domain name=RVT_2; Domain location=113-291; Score =277.6; E_value=2.7e-80; Accession=PF07727.6; Description=Reverse transcriptase (RNA-dependent DNA pol
  Subcellular localization annotation: CTP_CleavageSite=3; ConfidenceScore=5.21e-01
PVRVYQRRARPAPLHLEPATPPPSPPRSPPVDSSPPATPTPPPPPAPTARVAPTVYHPPLLHRHPRHVHPMVTRLAAGTLQPRALSAMPGAPQVSPVPSSVRGALSDPHWRRAMEEEYAALLANQTWDLVPRPPGSNVVTGKWIWTHKRRADGTLERYKARWVLRGFTQRPGVDYDETFSPVVKPATVRTVLSLALSRSWPVHQLDVKNAFLHGTLTETVYCSQPAGFVDSSRPDMVCRLNKSLYGLKQAPRAWYSRFAAYLLTLGFVEAKSDTSLFIYHHGAETAYLLLY

SEQ ID NO: 82406 - protein, 226 aa, Setaria italica
  Transcript Sequence Number=SeqID_16432
  Gene Ontology: Mol. function=binding; Cellular component=mitochondrion
  Homolog annotation: Hit_ID=B9T2B9; Match level="QueryCoverage=100%, HitCoverage=90%, E-value=3e-42, Identity=32%"; Hit description =Pentatricopeptide repeat-containing protein, putative
  Pfam annotation: Domain name=PPR; Domain location=132-166; Score =32.0; E_value=2.3e-06; Accession=PF01535.12; Description=PPR repeat
  Pfam annotation: Domain name=PPR; Domain location=167-201; Score =39.5; E_value=1.3e-08; Accession=PF01535.12; Description=PPR repeat
  Pfam annotation: Domain name=PPR; Domain location=27-61; Score=41.0; E_value=4.9e-09; Accession=PF01535.12; Description=PPR repeat
  Pfam annotation: Domain name=PPR; Domain location=62-96; Score=26.6; E_value=0.0001; Accession=PF01535.12; Description=PPR repeat
  Pfam annotation: Domain name=PPR; Domain location=97-131; Score=51.0; E_value=4.7e-12; Accession=PF01535.12; Description=PPR repeat
  Pfam module annotation: Pfam domain module=PPR::PPR::PPR::PPR::PPR; Domain location=132-166::167-201::27-61::62-96::97-131
GLCDGKTNEAEELLDSAIARGFKPTVVTFTNMINGYCKAERIDDALRVKNIMMSSKCKLDLQAYGVLINVLIKKDRVKEAKETLNEILSYGLAPNVVIYTSIIDGYCKIGKVGAALEVFKLMEHEGCRPNVWTYSSLIYGLIQDQKLHKAMALITKMQEDGITPSVITYTTLIQGQCNRHDFDNAFRLFEMMEQNGLTPDEQAYNVLTDALCKSRRAEEAYSFLER

SEQ ID NO: 82407 - protein, 78 aa, Setaria italica
  Transcript Sequence Number=SeqID_16433
  Subcellular localization annotation: CTP_CleavageSite=39; ConfidenceScore=5.37e-01
MAQSLNSMTRYPRRDRSRSRSRSPARRRDRGGYRRPSPRRSHSPAEQTRRDASNEPVATNGKDLAVGSADNGQPQRIR

SEQ ID NO: 82408 - protein, 643 aa, Setaria italica
  Transcript Sequence Number=SeqID_16434
  Gene Ontology: Mol. function=peptidyl-prolyl cis-trans isomerase activity; Cellular component=cytoplasm; Biological process=protein folding
  Homolog annotation: Hit_ID=Q6XPZ5; Match level="QueryCoverage=79%, HitCoverage=80%, E-value=8e-78, Identity=63%"; Hit description =Cyclophilin-like protein
  Pfam annotation: Domain name=DUF755; Domain location=159-245; Score= -41.7; E_value=0.1; Accession=PF05501.3; Description=Domain of unknown function (DUF755)
  Pfam annotation: Domain name=Pro_isomerase; Domain location=8-175; Score=325.5; E_value=1.1e-94; Accession=PF00160.13; Description =Cyclophilin type peptidyl-prolyl cis-tr
  Pfam module annotation: Pfam domain module=DUF755::Pro_isomerase; Domain location=159-245::8-175
MPKAKNPHVFMDISIGGGSTERITFELFANVVPKTAENFRALCTGERGLGASTQKPLYYKGTNIHRIVKGFVAQGGDFSKGDGRGGESIYGGKFPDENFRLTHDQPGMLSMANAGPDTNGSQFFITFKPLPHLDGKHVVFGKVASGIALLKKLEAVGGENGNPSRQVKIVDCGEVSNINTQDQLQGEKDKKLRKADGNSIAEGRAKSKKASSDDKHRKKRKHYSSDSYSSDTSDSRSYSSDSGSESESYSSSSLDTSSSSDHRRKRRKGSKKDKRKPTKRKSKHTKSKKKSRGSKRRSRRSYGSSSDDSIGSSSSDSENGGHRTKRSSRKDKESTKTTISEEGRTFEDVDKGKQMVTAVHQSHDGSKPSRKDENGADDRSGNYNSEDRNDPVASSRINPIQADTADGNGGADTAEAGVSRSGTERHPPSNEPVATNGKDLAVGSADNGQPQRIRKGRGFTEKYGYARRYRTPSPERPPVRPRYDGGRDDRWNSFNRYGRNGPYSRRSPVRRYHGSPRASSPSRYPRRDRSRSRSRSPARRRDRGGYRRPSPRRSHSPAEQTRRDASNRPPRSGHGGGPDYRGSSPLVNRGRSRSRSKSRDPSRSKSPEAAPAKRESSRYNRRRSSSSRSSSPDGNGNKGLVSY

SEQ ID NO: 82409 - protein, 48 aa, Setaria italica
  Transcript Sequence Number=SeqID_16435
DLDISSCDLLGWIKLDLDDPKSMGLLIISQSSSFKSHLSNFIYNQFNL

SEQ ID NO: 82410 - protein, 61 aa, Setaria italica
  Transcript Sequence Number=SeqID_16436
TALKNTWRSIPLRKDKSIFIAGLNTFRHANNRLPAQPYFQISLSIQYLVDGKPLGRSNIED

SEQ ID NO: 82411 - protein, 88 aa, Setaria italica
  Transcript Sequence Number=SeqID_16437
SRGRRLKTCTCPAERPRSRRSYRAPCLMVCGKNANAVESDTTTSDEDDEVTTSSFAVADVKSPAPAAVAASRRERYCLVACKQMVGLF

SEQ ID NO: 82412 - protein, 115 aa, Setaria italica
  Transcript Sequence Number=SeqID_16438
  Gene Ontology: Mol. function=cytokine activity; Cellular component =chloroplast
  Homolog annotation: Hit_ID=B6TUZ6; Match level="QueryCoverage=100%, HitCoverage=100%, E-value=2e-55, Identity=92%"; Hit description =Macrophage migration inhibitory factor
  Pfam annotation: Domain name=MIF; Domain location=2-115; Score=94.0; E_value=5.3e-25; Accession=PF01187.10; Description=Macrophage migration inhibitory factor (MIF)
MPTLILSTNVPVDAVVAADILKDCSKAVARIIGKPESYVMVSINGSVPMSFAASEEPTAYGELVSIGGIGPGVNGKLSAAVAEILETKLSVSKSRFYIKFDDVQRHNFGFNGSTF

SEQ ID NO: 82413 - protein, 116 aa, Setaria italica
  Transcript Sequence Number=SeqID_16439
CSHPATPTSQASSTLCQQESKPVAAPHKEISACKSKATKAVPIKTVQMEVDPLKVAEPEACLHKTNPVVAADTPKENVPAVHQNIKANVDASSLVDLLTQKLSSISLGEATPDLAS

SEQ ID NO: 82414 - protein, 427 aa, Setaria italica
  Transcript Sequence Number=SeqID_16440
  Gene Ontology: Mol. function=glutathione synthase activity; Cellular component=chloroplast; Biological process=glutathione biosynthetic process
  Homolog annotation: Hit_ID=Q7X9G1; Match level="QueryCoverage=99%, HitCoverage=80%, E-value=0.0, Identity=87%"; Hit description =Glutathione synthetase
  Pfam annotation: Domain name=GSH_synth_ATP; Domain location=1-425; Score=602.7; E_value=3.8e-178; Accession=PF03917.9; Description =Eukaryotic glutathione synthase, ATP binding domain
  Pfam annotation: Domain name=GSH_synthase; Domain location=155-257; Score=204.0; E_value=4.1e-58; Accession=PF03199.7; Description =Eukaryotic glutathione synthase
  Pfam module annotation: Pfam domain module=GSH_synth_ATP::GSH _synthase; Domain location=1-425::155-257
MPPFSLLPSRFPTSFWKQACELAPIFNELVDRVSLDGEFLQAALSRTKQVDEFTARLLEIHEKMMAINKKEAIRLGLHRSDYMLDSETNSLLQIELNTISSSFPGLGSLVSELHRTLLNQYGKVLGLDSKRIPRNWAATQFAEALGKAWAEYNNDSAVVLMVVQPEERNMYDQYWLANHLKESYGVTTIRKTLAQVEAEGQVLTDGTLVIDGRTVAVVYFRAGYAPTDYPSEAEWKARLLMEQSSAVKCPSISYHLVGTKKIQQELAKPNVLERFLDNKEDIAKLRKSFAGLWSLDNEEIVKSAIEKPDLFVLKPQREGGGNNIYGHDVRDTLIKLQKEQGESLAAYILMQRIFPKASLTPLVRGGDCFEDLTISELGIYGAYLRNKDKVILNNQCGYLMRTKVSSSNEGGVAAGFAVLDSVLLTDE

SEQ ID NO: 82415 - protein, 53 aa, Setaria italica
  Transcript Sequence Number=SeqID_16441
  Pfam annotation: Domain name=DUF1070; Domain location=1-51; Score =20.6; E_value=0.0035; Accession=PF06376.4; Description=Protein of unknown function (DUF1070)
MAAAGKSSSAVEETTKVAAAPAARGRRGIDRQAVDRGVAYALMVAALVATYAL

SEQ ID NO: 82416 - protein, 135 aa, Setaria italica
  Transcript Sequence Number=SeqID_16442
SVPVPVPENNLAGVKVGPAPGWKWDTAEHVLISDTGDAPGLSTARRGAAPTQNALRVGQMDVMLGVQATGGMAYGAATAAVNPEVLYHAGPELEQLNPAWFPHVQHDGMHHHGGSGGTSVYLRGDGRQRWGALSR

SEQ ID NO: 82417 - protein, 203 aa, Setaria italica
  Transcript Sequence Number=SeqID_16443
LRRNRRRRSSNRRPDAAGKRWIRSGGEGEGIGRVKCARTHGASASPRRFAEIAHNNAKANPTAEAIKKRTRRCGGGESAHAPIPIEPNTQQKQPTTPSAIQERVRDRENLSKKPNQKLERDQQRIRQAGLIPSPEATNQLTTNPASQRHKTLEQSGLAQGGVKIGFLTGRGEGGPEILADFSSSDFWTPPPARSPARNHTHRL

SEQ ID NO: 82418 - protein, 106 aa, Setaria italica
  Transcript Sequence Number=SeqID_16444
  Gene Ontology: Mol. function=nucleic acid binding
  Homolog annotation: Hit_ID=Q9M9L2; Match level="QueryCoverage=82%, HitCoverage=11%, E-value=8e-19, Identity=49%"; Hit description =F10A16.15 protein
  Pfam annotation: Domain name=PB1; Domain location=35-106; Score=31.6; E_value=3.1e-06; Accession=PF00564.16; Description=PB1 domain
MYIVIILSAEQLGRSMADGGILVAICQYGGEFTSGPNGNLIYKGGEAHAVDVTRDMSLESFKDEVSKVFHVDVTDMSFKYFLPNNNRTLITISCDRDLQRMVDFYY

SEQ ID NO: 82419 - protein, 133 aa, Setaria italica
  misc_feature (82)..(82): Xaa can be any naturally occurring amino acid
  misc_feature (127)..(127): Xaa can be any naturally occurring amino acid
  Transcript Sequence Number=SeqID_16445
  Gene Ontology: Mol. function=protein binding; Cellular component =nucleus; Biological process=embryonic development ending in birth or egg hatching
  Homolog annotation: Hit_ID=B6SJN3; Match level="QueryCoverage=96%, HitCoverage=53%, E-value=1e-36, Identity=66%"; Hit description =Protein mago nashi
  Pfam annotation: Domain name=Mago_nashi; Domain location=4-133; Score= 67.9; E_value=3.6e-17; Accession=PF02792.6; Description=Mago nashi protein
EGRGQQRDKFGHEFLEFEFRPDGKLRYANNSNYKNDTMIRKEVFVSPSVLREARRIIQESDVSSHHPSPYPSIRLHSIRNLXRKPARVCRFDCLPSSPPQIMKEDDSNWPEPDRIGRQELEIVMGNXEHISFT

SEQ ID NO: 82420 - protein, 160 aa, Setaria italica
  Transcript Sequence Number=SeqID_16446
  Gene Ontology: Mol. function=RNA binding; Cellular component=nucleus; Biological process=mRNA processing
  Homolog annotation: Hit_ID=B6SJN3; Match level="QueryCoverage=90%, HitCoverage=87%, E-value=2e-81, Identity=100%"; Hit description =Protein mago nashi
  Pfam annotation: Domain name=Mago_nashi; Domain location=16-158; Score=362.9; E_value=5.9e-106; Accession=PF02792.6; Description=Mago nashi protein
MASGGGDNGGGAGDAEFYLRYYVGHKGKFGHEFLEFEFRPDGKLRYANNSNYKNDTMIRKEVFVSPSVLREARRIIQESDIMKEDDSNWPEPDRIGRQELEIVMGNEHISFTTSKIGSLVDVQSSKDPEGLRIFYYLVQDLKCFVFSLINLHFKIKPIQS

SEQ ID NO: 82421 - protein, 66 aa, Setaria italica
  Transcript Sequence Number=SeqID_16447
PWCAKLSNTCQGNVGENKLQLVTILGKKKHLAESITVASAHHEQKWCDFALYFSFAISTRVVMNQA

SEQ ID NO: 82422 - protein, 201 aa, Setaria italica
  misc_feature (159)..(159): Xaa can be any naturally occurring amino acid
  Transcript Sequence Number=SeqID_16448
  Gene Ontology: Mol. function=amino acid transmembrane transporter activity; Cellular component=integral to membrane; Biological process=amino acid transport
  Homolog annotation: Hit_ID=B9GYF7; Match level="QueryCoverage=82%, HitCoverage=27%, E-value=1e-66, Identity=76%"; Hit description =Cationic amino acid transporter
VLVIGFVIVAGFIHAKPSNLRPFMPHGVPGVFRAAAIVYFAYGGFDNIATMAEETKNPSRDIPLGLLGSMSVITVIYCVMALVLSMMQPYTAIDRSAAYSVAFTNVGMHWAQYVVALGALKGMTTVLLVGALGQARYTTHIARSHIYSRPVVRALVYPXGTGIPVHATALIAIASSCIALFSSLDVLSSLLSVSTLFIFMM

SEQ ID NO: 82423 - protein, 529 aa, Setaria italica
  Transcript Sequence Number=SeqID_16449
  Gene Ontology: Mol. function=molecular_function; Biological process =biological_process
  Homolog annotation: Hit_ID=B9RS75; Match level="QueryCoverage=97%, HitCoverage=21%, E-value=0.0, Identity=66%"; Hit description=Zinc finger protein, putative
  Pfam annotation: Domain name=TPR_2; Domain location=17-50; Score =22.6; E_value=0.0016; Accession=PF07719.9; Description =Tetratricopeptide repeat
RLVIIVYTCRKCKIEAFPVWIAWGHALVRMEHYAQARVKFKQALQQYKGDAATVVTEIINTIEGGPPVDVSSVRSMYEHLAKSAATIFDDSLSADAYLNVLYMPSTFPRSESSRQSRDPIDNQFTSATSYLEDGPRSNLDSVRYAECIHYLQDYARPQILAFMFRHGHFSEACSLFFPFSQQTTEGETSLSSVPWSDPLTTDYGTIDDLCDLCLGYGAMAVLENTIRAITQSPAYHETPVIQYMNTVLTRICNYCETHRHFNYLYNFLVLKDDHVASGLCCIQLFMNSMSQEEALRHLGHAKTHFEEALSVRDRTIEATKLVLRSARNKSTPGKMTRETIMKYSTRVSYQMDVVKALNSIDGPQWKTSLFGNPTDPETLRRRCMVVETLAEKHFDLAFRMLHEFDLPAVDIYAGVAASLAERKKGGQLTEFLKNIRGTIDDDEWDQVLGAAINVYANKHKERPDRLIDMLISNHRKVLACVVCGRLKSAFQIASRSGSVADVQYVAHQALHANALPVLDLCKQWLAQYM

SEQ ID NO: 82424 - protein, 201 aa, Setaria italica
  Transcript Sequence Number=SeqID_16450
ELQGRKDDKNIAHLTHVSEMEKKCESLARITVILKDVIQNKDRIIARLQQPYSLDCIPVEAEYQKQFSELLLKAASDYGALTASVGDFQWSQNFRESPAVWGEMLRPIPAALASCTRFFEAMSAMRESFSTLQKLRVGHSSLSMTPSGSSDDSKFLTPPQWRDGSVLDSWKQVDDINPESDGLDSMNQRRLSWPSSIKRDP

SEQ ID NO: 82425 - protein, 130 aa, Setaria italica
  Transcript Sequence Number=SeqID_16451
  Gene Ontology: Mol. function=hydrogen ion transporting ATP synthase activity, rotational mechanism; Cellular component=proton -transporting two-sector ATPase complex; Biological process=ATP metabolic process
  Homolog annotation: Hit_ID=A7LIT9; Match level="QueryCoverage=99%, HitCoverage=99%, E-value=2e-61, Identity=87%"; Hit description =Vacuolar proton pump subunit F
  Pfam annotation: Domain name=ATP-synt_F; Domain location=15-115; Score=183.1; E_value=8e-52; Accession=PF01990.9; Description=ATP synthase (F14-kDa) subunit
MAGRTNIPTNNSALIAIIADEDTVTGFLMAGVGNVDLRKKTNYLLVDNKTTVKQIEDAFKEFTAREDIAIVLISQYIANMIRFLVDSYNKPVPAILEIPSKDHPYDPAHDSVLSRVKYLFSTESVASERR

SEQ ID NO: 82426 - protein, 107 aa, Setaria italica
  Transcript Sequence Number=SeqID_16452
  Gene Ontology: Mol. function=transcription regulator activity; Cellular component=nucleus
MKNYGLIDNPLWRGLRNVGASGQLEMYSGQQSDQGPSANSGREFSEANWNSVTMHQKMGYNSGPYGFGPYSMGLEERPGLYQSSSGTFSQNIQMSDEHSGGVKKRKG

SEQ ID NO: 82427 - protein, 133 aa, Setaria italica
  misc_feature (14)..(14): Xaa can be any naturally occurring amino acid
  Transcript Sequence Number=SeqID_16453
  Gene Ontology: Mol. function=peptidase activity; Cellular component =endoplasmic reticulum membrane; Biological process=proteolysis
  Homolog annotation: Hit_ID=Q6YVD9; Match level="QueryCoverage=100%, HitCoverage=14%, E-value=4e-69, Identity=93%"; Hit description =Peptidase family-like protein
  Pfam annotation: Domain name=Peptidase_M28; Domain location=1-126; Score=44.2; E_value=2.2e-10; Accession=PF04389.9; Description =Peptidase family M28
PVISFSNGAEELFXLGSHGFIKTHKWNSTIGAFINIEASGSGGTDLVCQSGPGSWPSRVYAQTAKYPMANSVAQDMFGIIPGDTDYRIFAEDITNIPGLDIIFVLGGYFYHTSYDTLENLLPGSIQARGENLF

SEQ ID NO: 82428 - protein, 56 aa, Setaria italica
  Transcript Sequence Number=SeqID_16454
FSPLNDVFMNYTIGASIDSYYDMWMFKYWRLFSHRLSFFVGALFLFVIIIFVSWEM

SEQ ID NO: 82429 - protein, 257 aa, Setaria italica
  misc_feature (74)..(74): Xaa can be any naturally occurring amino acid
  Transcript Sequence Number=SeqID_16455
  Gene Ontology: Mol. function=peptidase activity; Biological process =proteolysis
  Homolog annotation: Hit_ID=Q6YVD9; Match level="QueryCoverage=98%, HitCoverage=32%, E-value=1e-87, Identity=58%"; Hit description =Peptidase family-like protein
SLYCSWSVTLLDLIRGMLLHAFGVILAIFIPAGAAALRLLFTKNAMNWFAHPYLAFFMFVPTSLVGLLLPRITXVPRITWGLSEQTHFWGAFGLYSAITMAYMLAGLSGGFLTFFISMSMLLGRFISSIIKRQWNQQSTKSLVAYVVPMTPCLLYCIYYGGFLIQFLIEKMGMMGSLPKPYGYFVPDVIVGAVVGLVVGWCFGPLAPVAGRWLSKISIIQGLLQITVVALAISSQLFPYSTGAPKRVILQHSYVTDG

SEQ ID NO: 82430 - protein, 593 aa, Setaria italica
  Transcript Sequence Number=SeqID_16456
  Gene Ontology: Mol. function=peptidase activity; Cellular component =integral to membrane; Biological process=proteolysis
  Homolog annotation: Hit_ID=Q6YVD9; Match level="QueryCoverage=97%, HitCoverage=69%, E-value=0.0, Identity=67%"; Hit description =Peptidase family-like protein
YCIIHLVRIALDIQDMFGIIPGDTDYRIFAEDITNIPGLDIIFVLGGYFYHTSYDTLENLLPGSIQARGENLFLLVKAFTNSMLLKENEISSKAAKDGIEDSRAVFFDYLTWFLVFYSRDVSVILHSLPIAIFFLVPLFLKFPNISLMSWSVTLLDLIRGMLLHAFGVILAIFIPAGAAALRLLFTKNAMNWFAHPYLAFFMFVPTSLVGLLLPRITWVLSEQTLRLSEQTHFWGAFGLYSAITMAYMLAGLSFPSIIKRQWNQQSTKSLVAYVVPMTPCLLYCIYYGGFLIQFLIEKMGMMGSLPKPYGYFVPDVIVGAVVGLVVGWCFGPLAPVAGRWLSKISIIQGLLQITVVALAISSQLFPYSTGAPKRVILQHSYVTDGNDIVDSNYGFSVVDANSLEFLFNNAPEAAKWLKDNSELSFEEKYRSDRSSWVALYPVPFLFSGSLKFQARTDEIRKHYQLFPQLLVQKTLSSNGQRTVHLKLSLGSLSEIWTAVLNVTGPLSKWSFADDMLPAPQSVSGGPPSYICRLSGKSDVDWSFWLEANSSESLRIDVAVLDQYIVDSTKKLKSLFPSWADLTAFTTFFSTYYV

SEQ ID NO: 82431 - protein, 51 aa, Setaria italica
  Transcript Sequence Number=SeqID_16457
  Subcellular localization annotation: CTP_CleavageSite=26; ConfidenceScore=5.04e-01
FLPGSLNMIIDCFTVSRLNNLNCQLRANSFQKLFLPIGRNNSMMTSTSRTD

SEQ ID NO: 82432 - protein, 72 aa, Setaria italica
  Transcript Sequence Number=SeqID_16458
CFLLFFVVTNNLSFCFLLLLCYRKIRGPTEGFSGYYVASISSRSLLGYKPATFAMPFRWTKKGKKIMLFLKG

SEQ ID NO: 82433 - protein, 124 aa, Setaria italica
  Transcript Sequence Number=SeqID_16459
  Subcellular localization annotation: CTP_CleavageSite=28; ConfidenceScore=5.41e-01
GPWAPGLHFLRSPWASWSSSTSVFFFLVASKGVAERVLGKGIPPNGGGGSVEAGEGEALLGGLLPRRMGSRAAGPHDVDAAPGRLQAQVRRRCLGRRILLLGVGVGAQVKGLLSLHTFSFFPIK

SEQ ID NO: 82434 - protein, 264 aa, Setaria italica
  misc_feature (176)..(176): Xaa can be any naturally occurring amino acid
  misc_feature (241)..(241): Xaa can be any naturally occurring amino acid
  Transcript Sequence Number=SeqID_16460
  Gene Ontology: Mol. function=transporter activity; Cellular component= intracellular; Biological process=transport
  Homolog annotation: Hit_ID=Q2L3A5; Match level="QueryCoverage=100%, HitCoverage=61%, E-value=1e-113, Identity=78%"; Hit description =SEC14 cytosolic factor (Secretion factor 14) family protein (Fragment)
  Pfam annotation: Domain name=CRAL_TRIO; Domain location=100-264; Score=80.2; E_value=7.5e-21; Accession=PF00650.12; Description =CRALTRIO domain
  Pfam annotation: Domain name=CRAL_TRIO_N; Domain location=14-83; Score=51.0; E_value=4.6e-12; Accession=PF03765.7; Description =CRALTRIO, N-terminus
  Pfam module annotation: Pfam domain module=CRAL_TRIO::CRAL_TRIO_N; Domain location=100-264::14-83
RRRVDFRFPPAAISIEDVRDAEEERAVAAFRDRLNAHGLLPDKHDDYHMMLRFLKARKFDAEKAMQMWADMLKWRKEFGADTILEDFEFEELDDVLRYYPQGYHGVDREGRPVYIERLGKVDPNKLMNITSTDRYIKYHVQEFERAFRERFPACTLAAKRHIDSTTTILDVQGVGXRNFSKTARELINRMQKIDSDYYPETLHQMFVVNAGSGFKWIWNSVKGFLDPKTSSKIHVSFFCMXVLGSNYQSRLLEVIDSSELPEFL

SEQ ID NO: 82435 - protein, 450 aa, Setaria italica
  Transcript Sequence Number=SeqID_16461
  Gene Ontology: Mol. function=transporter activity; Cellular component= intracellular; Biological process=transport
  Homolog annotation: Hit_ID=B6U127; Match level="QueryCoverage=99%, HitCoverage=73%, E-value=1e-155, Identity=62%"; Hit description =Phosphatidylinositol transporter/ transporter
  Pfam annotation: Domain name=CRAL_TRIO; Domain location=1-169; Score =96.0; E_value=1.3e-25; Accession=PF00650.12; Description=CRALTRIO domain
VFGKVDPNKLMNITSTDRYIKYHVQEFERAFRERFPACTLAAKRHIDSTTTILDVQGVGLKNFSKTARELINRMQKIDSDYYPETLHQMFVVNAGSGFKWIWNSVKGFLDPKTSSKIHVLGSNYQSRLLEVIDSSELPEFLGGSCTCSDKGGCLGSNKGPWNDPYILKLIHNLEAGCVREIKPVSEGEERSCSSFRLEQLKWQGMLSDTSNAESGSDIDDFGPSFFQKVSDYGCLTPVREEVKGTDCATYFSCDDQGHPDMAPESYRGVRRTHEMVQKPMANFGPSSTNTRPHDLGNNALNVDGTIAPRGWENMIKLVVTALIKLFSFIRLFISRAERRLEIVHRSAPPVIQAAEKPRPRTVSDEEMCACLQRLDNLESLCNHLATKPPQIPEDKELVLLSSFERIKSVEADLERTKRVLNATVVKQKSLVEALESVQESSRVRKRMFCS

SEQ ID NO: 82436 - protein, 300 aa, Setaria italica
  Transcript Sequence Number=SeqID_16462
  Gene Ontology: Mol. function=cobyrinic acid a,c-diamide synthase activity; Cellular component=chloroplast; Biological process =selection of site for barrier septum formation
  Homolog annotation: Hit_ID=Q45RR7; Match level="QueryCoverage=81%, HitCoverage=75%, E-value=1e-112, Identity=86%"; Hit description =Plastid division regulator MinD
  Pfam annotation: Domain name=CbiA; Domain location=3-202; Score=51.5; E_value=3.3e-12; Accession=PF01656.15; Description=Cobyrinic acid a,c- diamide synthase
RSKTTTTANLAASLARLSLPAVAVDADAGLRNLDLLLGLENRVHLTAADVLAGDCRLDQALVRHRALQDLHLLCLSKPRSKLPLAFGSKTLTWVADALRRAPNPPAFILIDCPAGVDAGFVTAIAPAEEAVLVTTPDITALRDADRVAGLLECDGIKDIKIIVNRVRPDLVKGEDMMSALDVQEMLGLPLLGVVPEDTEVIRSTNRGVPLVLNDPPTPAGLALEQATWRLVERDAMTAVMVEDQERPGVASNFKKKKGTYLKNVKKVSIEFNCGVYLGCRCCTGSQSGVYRLFFICFILG

SEQ ID NO: 82437 - protein, 66 aa, Setaria italica
  Transcript Sequence Number=SeqID_16463
IETFHCWFINTFFQLNKWINLASAEVKTSLLYNNGLSKVGLKNPKHRDSLICHKFYTEYLKKLQSP

SEQ ID NO: 82438 - protein, 132 aa, Setaria italica
  Transcript Sequence Number=SeqID_16464
  Homolog annotation: Hit_ID=B6ZA22; Match level="QueryCoverage=84%, HitCoverage=50%, E-value=1e-18, Identity=48%"; Hit description =Necrotic spotted lesions 1 (Fragment)
  Subcellular localization annotation: CTP_CleavageSite=40; ConfidenceScore=5.07e-01
GALSLRLGFSGVAATKIRRSEWDGPSVVPLKSGSLSARLSAALSGGLAQAVPPPPAAEEKVEVNSAIFPKGPPVPLPVQKMARHVDTTEVMRGPDDQPGYWVVTGAKLCVEGGKIALKVKYSLLIAVQDTDV

SEQ ID NO: 82439 - protein, 183 aa, Setaria italica
  misc_feature (8)..(8): Xaa can be any naturally occurring amino acid
  misc_feature (12)..(12): Xaa can be any naturally occurring amino acid
  Transcript Sequence Number=SeqID_16465
AATEGRYXKTMXEVGDDSRSSFCVSMWSSKQSSDIIAGDVLLMQNIKIVEFRNGLEGRASQISAVQVLLNSKDLMNPEGIDELIASSKVGDVPKAKLRRVTEWTLRTKCALGESNQQLQVTSKNWKEAKEKESTDFLCISELFSQRKLRNVNVYACIAKMVLLSSPASHSKGHLSVIDIHSLK

SEQ ID NO: 82440 - protein, 193 aa, Setaria italica
  misc_feature (105)..(105): Xaa can be any naturally occurring amino acid
  misc_feature (153)..(153): Xaa can be any naturally occurring amino acid
  misc_feature (164)..(164): Xaa can be any naturally occurring amino acid
  Transcript Sequence Number=SeqID_16466
  Gene Ontology: Mol. function=sequence-specific DNA binding; Cellular component=nucleus; Biological process=regulation of transcription
  Homolog annotation: Hit_ID=Q7XMG4; Match level="QueryCoverage=98%, HitCoverage=20%, E-value=2e-28, Identity=37%"; Hit description =OSJNBa0028I23.18 protein
SNRYQYLCPVFVRLVARASVCEESYRALEQCSVEMSKKVEGIIRKQTSIDASACEPDTVDIQISLSVSATDNESEHAMNYSSNKRSKKTKKKGHKDKSQTRSCIXKGLQNKKTLQLEQPAVQFFMLDTPTQTVQDSLREGLSSPFPMGQLHYXKMQPGLSPSFXTVIAFQDLGLDPYCASDPSSYSQHNQQGL

SEQ ID NO: 82441 - protein, 92 aa, Setaria italica
  misc_feature (80)..(80): Xaa can be any naturally occurring amino acid
  Transcript Sequence Number=SeqID_16467
  Homolog annotation: Hit_ID=B4FAZ6; Match level="QueryCoverage=97%, HitCoverage=31%, E-value=5e-21, Identity=61%"; Hit description =Adaptin ear-binding coat-associated protein 2
  Subcellular localization annotation: CTP_CleavageSite=62; ConfidenceScore=5.21e-01
EGETIRINVKNKPSTGSGMLTSAGLSGGAAAKPKTSMLLAPPPGAAGKLRSPLPPPPNDPAAARMNSGPNAGIRAPKDPXKRNNDPFSDLLL

SEQ ID NO: 82442 - protein, 285 aa, Setaria italica
  Transcript Sequence Number=SeqID_16468
  Gene Ontology: Mol. function=protein binding; Cellular component =membrane; Biological process=endocytosis
  Homolog annotation: Hit_ID=B4FAZ6; Match level="QueryCoverage=100%, HitCoverage=100%, E-value=1e-123, Identity=79%"; Hit description =Adaptin ear-binding coat-associated protein 2
  Pfam annotation: Domain name=DUF1681; Domain location=11-180; Score =297.8; E_value=2.4e-86; Accession=PF07933.6; Description=Protein of unknown function (DUF1681)
MSSLVEEEEEAFEHTLLVVREVSVYKIPPRTTSGGYKCGEWLQSDKIWSGRLRVVSCGDRCEIRLEDPATGELFAACFVLPGQRESAVETVLDSSRYFVLRIEDGRGKHAFVGLGFNERNEAFDFNVALSDHEKYVKREQEKETAGAGGEDSGSGGEIDIHPAVNRRLKEGETIRINVKNKPSTGSGMLTSAGLSGGAAAKPKTSMLLAPPPGAAGKLRSPLPPPPNDPAAARMNSGPNAGIRAPKESTKRNNDPFSDLSAIKQNLPSSAEPGQTKSTGAGWAAF

SEQ ID NO: 82443 - protein, 52 aa, Setaria italica
  Transcript Sequence Number=SeqID_16469
TNNKIFLMQVISFYFSKAASVLSWKLDSSSFTVFPLTCLCCWFLYGPLIRLA

SEQ ID NO: 82444 - protein, 127 aa, Setaria italica
  misc_feature (10)..(10): Xaa can be any naturally occurring amino acid
  Transcript Sequence Number=SeqID_16470
LVEMLRRRGXEKSGGTKGVGKDKGLENSGPQKAKKATPGDWLMAGEHSGRSWKAWSERVERIRSCRFTLDGDILGFQSSQEHQDGKKTHAENVAERDFLRTEGDPAAVGYTINEAVALTRSMVFCNS

SEQ ID NO: 82445 - protein, 71 aa, Setaria italica
  Transcript Sequence Number=SeqID_16471
GPCDRPNGRDGLALRHAAPPLAAAAASANQPRTNCKALPPKWYRIVLASSCSWAASSGGAVLTAECYLDRH

SEQ ID NO: 82446 - protein, 44 aa, Setaria italica
  Transcript Sequence Number=SeqID_16472
  Homolog annotation: Hit_ID=Q01IQ0; Match level="QueryCoverage=100%, HitCoverage=11%, E-value=6e-19, Identity=95%"; Hit description =H0115B09.2 protein
IVIVRKISSNGWAEGECKGKAGWFPHAYIERRERVLASKVPHIF

SEQ ID NO: 82447 - protein, 86 aa, Setaria italica
  Transcript Sequence Number=SeqID_16473
  Gene Ontology: Cellular component=plasma membrane
  Homolog annotation: Hit_ID=Q01IQ0; Match level="QueryCoverage=77%, HitCoverage=18%, E-value=5e-28, Identity=91%"; Hit description =H0115B09.2 protein
TLPFLPLRSDITLFSLTHLQGVFKQFGYGNSDNAFTDESEVKLHQRLEKLYLSTRAAKHFQRDIVRGVEGYIVTGSKQVEIGNKLS

SEQ ID NO: 82448 - protein, 367 aa, Setaria italica
  Transcript Sequence Number=SeqID_16474
  Gene Ontology: Cellular component=plasma membrane
  Homolog annotation: Hit_ID=Q01IQ0; Match level="QueryCoverage=100%, HitCoverage=100%, E-value=1e-161, Identity=82%"; Hit description =H0115B09.2 protein
  Pfam annotation: Domain name=BAR; Domain location=4-255; Score=-60.7; E_value=0.029; Accession=PF03114.10; Description=BAR domain
  Pfam annotation: Domain name=SH3_1; Domain location=301-355; Score =43.5; E_value=8.5e-10; Accession=PF00018.20; Description=SH3 domain
  Pfam annotation: Domain name=SH3_2; Domain location=302-355; Score =28.3; E_value=3.1e-05; Accession=PF07653.9; Description=Variant SH3 domain
  Pfam module annotation: Pfam domain module=BAR::SH3_1::SH3_2; Domain location=4-255::301-355::302-355
MEALWKQASRLKDQVARQGVFKQFGYGNSDNAFTDESEVKLHQRLEKLYLSTRAAKHFQRDIVRGVEGYIVTGSKQVEIGNKLSDDSQKYGVENTCTSGDTLSKAATYFGKARSQMEKERCNMLKAFGTQVAEPLRAMVMGAPLEDARHLAQRYDRMRQEAEAQVVEVSRRQNRVRESPGNGDMISKLEAAEYKLEELKSSMVGLGKEAIAAMSAVEAQQQRLTLQRLIALVEAERAYHQRVLEILDQLEEEMVSERQKIEAPPTPAAENYMPPPPPSYDEVNGVFASTSANESVQPVDFFLGEALDSFKAESEFELTLSAGDIVIVRKISSNGWAEGECKGKAGWFPHAYIERRERVLASKVPHIF

SEQ ID NO: 82449 - protein, 126 aa, Setaria italica
  Transcript Sequence Number=SeqID_16475
ATVLDIAELPFSDLVLLQSPETLDDDRRRRRILDTVATELGRGGSGLLAIAEVPRVGAIRRRLLPLSRRLALMDHPTRSQLLKKHGLGSDVPLKKLDRSVSSFTKLLRHSGELALVELVNNTESMN

SEQ ID NO: 82450 - protein, 92 aa, Setaria italica
  Transcript Sequence Number=SeqID_16476
  Gene Ontology: Mol. function=metal ion binding; Cellular component =plasma membrane
  Homolog annotation: Hit_ID=B6SRS7; Match level="QueryCoverage=100%, HitCoverage=20%, E-value=2e-40, Identity=86%"; Hit description =Copine-1
  Pfam annotation: Domain name=zf-C3HC4; Domain location=49-81; Score =10.0; E_value=0.0073; Accession=PF00097.17; Description=Zinc finger, C3HC4 type (RING finger)
  Pfam annotation: Domain name=zf-P11; Domain location=46-90; Score =12.3; E_value=0.0044; Accession=PF03854.6; Description=P-11 zinc finger
  Pfam module annotation: Pfam domain module=zf-C3HC4::zf-P11; Domain location=49-81::46-90
YSRSSSFDQQTSGFQQRSESFKQQQPAATRRPGPDTYAAESALEDRILCPICMYKSKDLAFGCGHQTCYECGKNLERCPLCQQPITTRIRLY

SEQ ID NO: 82451 - protein, 445 aa, Setaria italica
  Transcript Sequence Number=SeqID_16477
  Gene Ontology: Mol. function=metal ion binding; Cellular component =plasma membrane
  Homolog annotation: Hit_ID=B6SRS7; Match level="QueryCoverage=100%, HitCoverage=100%, E-value=0.0, Identity=85%"; Hit description=Copine- 1
  Pfam annotation: Domain name=Copine; Domain location=108-256; Score =306.2; E_value=7.1e-89; Accession=PF07002.8; Description=Copine
  Pfam annotation: Domain name=zf-C3HC4; Domain location=402-434; Score= 10.0; E_value=0.0073; Accession=PF00097.17; Description=Zinc finger, C3HC4 type (RING finger)
  Pfam annotation: Domain name=zf-P11; Domain location=399-443; Score =12.3; E_value=0.0044; Accession=PF03854.6; Description=P-11 zinc finger
  Pfam module annotation: Pfam domain module=Copine::zf-C3HC4::zf-P11; Domain location=108-256::402-434::399-443
  Subcellular localization annotation: CTP_CleavageSite=42; ConfidenceScore=5.34e-01
MGQKDSKPSYGHSYDYGSTSSGYTSRYAGNTSSSYNTRYTPSSENNVQPETHARLQRKYSRIGDDYRSLSQVTDALAQAGLESSNLIVGIDFTKSNEWTGKMSFNRRCLHDIGSTPNPYEQAISIIGRTLSAFDEDNLIPCFGFGDASTHDQEVFSFYPENRPCNGFEEALERYREIVPTLRLAGPTSFAPIIETAIGIVDSTGGQYHVLLIIADGQVTRSVDTQYGQLSPQERDTIDAIVRASQFPLSIVLVGVGDGPWDMMHQFDDNIPARSFDNFQFVNFTEIMSKSIAADRKEAEFALSALMEIPEQYKATLDLQLLGRRQRITPRVALPPPTRNAYSRSTSFSQQSGVYSRSSSFDQQTSGFQQRSESFKQQQPAATRRPGPDTYAAESALEDRILCPICMYKSKDLAFGCGHQTCYECGKNLERCPLCQQPITTRIRLY

SEQ ID NO: 82452 - protein, 581 aa, Setaria italica
  Transcript Sequence Number=SeqID_16478
  Gene Ontology: Cellular component=vacuole
  Homolog annotation: Hit_ID=P93811; Match level="QueryCoverage=61%, HitCoverage=74%, E-value=3e-20, Identity=29%"; Hit description =F19P19.4 protein
MELVYMDRRNGLHDEGAIPEFSGRAEEDQDLTIAASEVQPDLSQINNKKPLTSDEKKSKSCQSCHKSPCLCCGDAHHADLFPALPAKMMILEFLIRSLRHPTRTHNVTDLDDLITDGVSQGSVNLGPSEKKVLDSLHALVNAKTRPKSPSPFLAGSKMRKTRSKSHIITQSEILKLISPETWETSSPGTSPMNKGTAEVHIHEKTSPSCSHMTSMSSNQPVLSHCPSSLSAGLLQCIWKDGLPHFELSLDDPIAVYTANPIKVQDNDRALDYVYMIHSGEQGRKDWMGHSSNVSRLVGKIKVSSSLVLNSDKSSLLETEFVLYGSPDDYLRQMHSSYSVPKGKGLVKRVTEIMRTGHVSSSPKHPWKFGKSFSHQFDDLTEILEGEMISARESGLTNLDAEDQPTNQELAAIVVKEQRQKRQKEPVVGGWGLKFLEKAGLNHSEGTEVSDVQNRNGAAKCITAIVPRGYHGGAVPKCSGPSGLIERWRSGGCCDCGGWDLGCPIRVLNNDGCASLPEEESQESRAVELSIKGARKQTMLRLVNITEDLYILYFDSGLSPLQCFSTGIAIVHSQAPQLCPKL

SEQ ID NO: 82453 - protein, 47 aa, Setaria italica
  misc_feature (33)..(33): Xaa can be any naturally occurring amino acid
  Transcript Sequence Number=SeqID_16479
MKSPPAMDPEAPPPPPGTPPDEEEEKRGGRKGXPWRMTLSLAYQSLG

SEQ ID NO: 82454 - protein, 210 aa, Setaria italica
  Transcript Sequence Number=SeqID_16480
  Gene Ontology: Mol. function=transporter activity; Cellular component= membrane; Biological process=oligopeptide transport
  Homolog annotation: Hit_ID=B9S1I2; Match level="QueryCoverage=98%, HitCoverage=34%, E-value=3e-78, Identity=68%"; Hit description =Peptide transporter, putative
SETKGLATLAFFGVNVNLVLFLTRVLGQSNGDAANNVIKWTGTVYMFSLIGAFLSDSYWGRYKTCAIFQAIFVLGLALLSVSSHLYLIRPEGCGMEHAPCGPHSGKELGIFYIALYMIAFGNGGYQPNVATFGSDQFDEEDPAEAHSKVSFFSYFYLALNLGSLFSNTFLSYLEDEGRWALGFWASTAAAAAALLLFLSGTLRYRYFNPG

SEQ ID NO: 82455 - protein, 262 aa, Setaria italica
  Transcript Sequence Number=SeqID_16481
  Gene Ontology: Mol. function=structural constituent of ribosome; Cellular component=ribonucleoprotein complex; Biological process =translation
  Homolog annotation: Hit_ID=B9T052; Match level="QueryCoverage=68%, HitCoverage=68%, E-value=2e-72, Identity=74%"; Hit description=50S ribosomal protein L15, putative
  Pfam annotation: Domain name=L15; Domain location=189-220; Score =42.9; E_value=1.3e-09; Accession=PF00256.15; Description=Ribosomal protein L15
  Pfam annotation: Domain name=Ribosomal_L15; Domain location=70-177; Score=192.9; E_value=9e-55; Accession=PF01305.9; Description =Ribosomal protein L15 amino terminal region
  Pfam module annotation: Pfam domain module=L15::Ribosomal_L15; Domain location=189-220::70-177
  Subcellular localization annotation: CTP_CleavageSite=50; ConfidenceScore=5.66e-01
LAPTATFLHIPASTSTSSPFAAAPGILTSRRPAPRALPLRARPPQRVTVVCSGAAAAAEASDAAAPTEKFRLDNLGPQKGSRRRPKRKGRGISAGQGASCGFGMRGQKSRSGPGVRRGFEGGQMPLYRRIPKLRGIAGGMHIGLPKYVPFNLKDIVRGGFKDGDEISLETLKSRGLINPSGRERKLPLKILGDGDVSVKLNIKAGAFSAAAKEKLEAAGCNLTVLPKRKKWLSQNYLKNQARAEEYFAKKKGSAGESDGASA

SEQ ID NO: 82456 - protein, 85 aa, Setaria italica
  Transcript Sequence Number=SeqID_16482
  Gene Ontology: Mol. function=metal ion binding; Cellular component =endoplasmic reticulum lumen; Biological process=auxin mediated signaling pathway
  Homolog annotation: Hit_ID=P13689; Match level="QueryCoverage=100%, HitCoverage=42%, E-value=3e-30, Identity=74%"; Hit description=Auxin- binding protein 1
  Pfam annotation: Domain name=Auxin_BP; Domain location=1-85; Score =86.5; E_value=9.3e-23; Accession=PF02041.8; Description=Auxin binding protein
  Pfam annotation: Domain name=Cupin_2; Domain location=1-74; Score =20.4; E_value=0.0031; Accession=PF07883.3; Description=Cupin domain
  Pfam module annotation: Pfam domain module=Auxin_BP::Cupin_2; Domain location=1-85::1-74
PGGRTPIHRHSCEEVFVVLKGKGTLLLGSSTLKYPGQPQKIPIFQNSTFSVPVNDPHQVLNSDEHEDLQVLVIISRPPAKIFLYD

SEQ ID NO: 82457 - protein, 158 aa, Setaria italica
  misc_feature (110)..(110): Xaa can be any naturally occurring amino acid
  misc_feature (133)..(133): Xaa can be any naturally occurring amino acid
  Transcript Sequence Number=SeqID_16483
  Gene Ontology: Cellular component=integral to membrane
  Pfam annotation: Domain name=DUF588; Domain location=8-140; Score =58.2; E_value=3.1e-14; Accession=PF04535.4; Description=Domain of unknown function (DUF588)
EQDEECVGSPGTWSGLALRVSRCMFAAASYAALISAPDHDDFTAFRALQISMEMQFLWSFVLLCVGIHCLRTKRHLNEPGVLMVVTFDWLTAILSMATASASAAVTIYLXRDFTLCTTYPQLPCSRYKISVIXAFISWSFVAASSASSFWLLTSFHHG

SEQ ID NO: 82458 - protein, 516 aa, Setaria italica
  Transcript Sequence Number=SeqID_16484
  Gene Ontology: Mol. function=DNA-directed RNA polymerase activity; Cellular component=nucleus; Biological process=transcription
  Homolog annotation: Hit_ID=B9SGJ3; Match level="QueryCoverage=94%, HitCoverage=72%, E-value=4e-68, Identity=37%"; Hit description=DNA -directed RNA polymerase, putative
  Pfam annotation: Domain name=Sin_N; Domain location=9-388; Score =185.8; E_value=1.2e-52; Accession=PF04801.5; Description=Sin-like protein conserved region
LGERAEAEEEEEDFVVREIDVYYTPKPFDDDTKLYIMQYPLRPCWRPYELNEICEEVRVKPLSSEIEVDLSVDTQSENYDQEAPLRLTKQTLSSSKADDVSDYAIGVLKGNLVHLNHIDAVVQLRPSMSHVFSGRAYTRQALQSREMNGGASGSKASSRKGDEHPEDSKDHAEDSEPWISLTYQPTGSNISTKYHDKMISNEGGPIDFTMRNSDYVMSLCPGASTSSRHINKCQAIREMLLLPLEERLKKWFTEVSEVNQFDALKHLAPTYSEEEILKVLPEYAYLVRGLWVCKSSLLFDDGYASKRDRVLLEFTKMESIPSDTLDAWIRLDDPKRKRILFPLCKRRGILKDYKFISADLSFLKRYPHIVNEQECAWSAREMILHESPKMCSTVPRKGKNSTRPNVASKGPHPNTSKGRDGPAQGSDDLVQSVLGTVFTANKVRSMQAVVRDLRQLAAKYASNRKDVSKFQALSDAAKYCASLPHDKLKSSILLVAVDVHDVFVAKHENKLALRNV

SEQ ID NO: 82459 - protein, 127 aa, Setaria italica
  Transcript Sequence Number=SeqID_16485
MYGQGGSFNPHYRHGAPPPQHQSGVTGSFPQQPIPPPPAPYPQHPGMRPPPGPYQHGVPPPQNQPYPFAQQQRGYAPMPLPPQQRGYAPMPMPGPPPQQQATYQAPPQYPMPGSLPPPPPRPTQLCS

SEQ ID NO: 82460 - protein, 131 aa, Setaria italica
  Transcript Sequence Number=SeqID_16486
DGVYHSTKLSKVHGSLRIIITLKILLCRPDFCSGVGIISQLHHSETRTPLACTKYVHRRHHLLASRGTPAVHRCRIRVLPNRLRGVTRTILQRSESTSRIGSDFRRIDNLLTIYTERKLFQQRTVRWFSHW

SEQ ID NO: 82461 - protein, 936 aa, Setaria italica
  Transcript Sequence Number=SeqID_16487
  Gene Ontology: Mol. function=RNA binding
  Homolog annotation: Hit_ID=B9SDY1; Match level="QueryCoverage=98%, HitCoverage=88%, E-value=0.0, Identity=46%"; Hit description=Pumilio, putative
  Pfam annotation: Domain name=NABP; Domain location=191-600; Score =194.2; E_value=3.7e-55; Accession=PF07990.4; Description=Nucleic acid binding protein NABP
  Pfam annotation: Domain name=PUF; Domain location=601-635; Score =35.3; E_value=2.4e-07; Accession=PF00806.11; Description=Pumilio -family RNA binding repeat
  Pfam annotation: Domain name=PUF; Domain location=637-671; Score =41.0; E_value=4.6e-09; Accession=PF00806.11; Description=Pumilio -family RNA binding repeat
  Pfam annotation: Domain name=PUF; Domain location=673-707; Score =33.3; E_value=9.8e-07; Accession=PF00806.11; Description=Pumilio -family RNA binding repeat
  Pfam annotation: Domain name=PUF; Domain location=709-743; Score =35.7; E_value=1.9e-07; Accession=PF00806.11; Description=Pumilio -family RNA binding repeat
  Pfam annotation: Domain name=PUF; Domain location=745-779; Score =44.1; E_value=5.3e-10; Accession=PF00806.11; Description=Pumilio -family RNA binding repeat
  Pfam annotation: Domain name=PUF; Domain location=782-816; Score =38.8; E_value=2.2e-08; Accession=PF00806.11; Description=Pumilio -family RNA binding repeat
  Pfam annotation: Domain name=PUF; Domain location=818-852; Score =27.2; E_value=6.9e-05; Accession=PF00806.11; Description=Pumilio -family RNA binding repeat
  Pfam annotation: Domain name=PUF; Domain location=860-894; Score =34.4; E_value=4.6e-07; Accession=PF00806.11; Description=Pumilio -family RNA binding repeat
  Pfam module annotation: Pfam domain module=NABP::PUF::PUF::PUF::PUF::P UF::PUF::PUF::PUF; Domain location=191-600::601-635::637-671::673 -707::709-743::745-779::782-816::818-852::860-894
GNLNPRLPPPVLSKEDWRSTQRLKAGVVGGIGDRRKVGQEDAVQGTGTAVGRSLFPQHPGSEQEEEARVDGGGAAEWVDGGGDGLIGLSLGRQRSFADILQDNIGRRTPTSEHPSRAASRNSFLDNQEPVDSAENQYSVHTDILEAHHPVGNVQNVGGRHSLNASTSQTFASILGSSVSRNATPDPHYVARVPSPGLPPVGVRITSNEKKLNCSSSPFNTVSSKAVGADDILSALSSMNLSKGGTLNGNNNISRSNFQRGTSDQQKFSLDSQAGAAQVNNKQHPVMLGTDDEYLGMPSMSQPSNTSFADVNNSMAGLAELRNSTNTRSDGHLEMQRSSTLSARSYQKSPSSSNESPGGSPAQHQNFDGINSAFLNYGLSGYPLSPGLPSMMPPLFESAAAASAIASLGADSRNLGNNILASPTLSLTDVHNLGRGGNQAPTGLQSPLSDPFYVQYLKATQYATQGAGSYGDPSLERGYMGNSYGNLTAVQKAYIEALLQQQKQYEMPLLGKSNASNHGYYGNLPFGMGMAYPGSPLGSPVASPSGPGSPLRLGERNLRFPSNLRNLGGWTSDPSGYMNENFPSSLLDEFKSNKARSFELAEIAGHVVEFSADQYGSRFIQQKLETATVEEKNMVFEEIMPHALSLMTDVFGNYVVQKFFEHGSAEQRRELADKLFGHVLALSLQMYGCRVIQKAIEVVDLDQKTKMVTELDGHIMKCVRDQNGNHVIQKCIERVPEDSIQFVISTFYGHVVPLSTHPYGCRVIQRVLEHCADPKTQQIVMDEILQSVCMLAQDQYGNYVVQHVLEHGKPHERSIIIEKLAGQIIQMSQQKFASNVVEKCLTFGGPTEREVLINEMLGTTDENEPLQAMMKDQFGNYVVQKVLETCDDQQRELILSRVKVHLNALKKYTYGKHIVARVEKLVAAGERRIGLQSQNPS

SEQ ID NO: 82462 - protein, 81 aa, Setaria italica
  Transcript Sequence Number=SeqID_16488
  Gene Ontology: Mol. function=zinc ion binding; Cellular component =intracellular
HVSHGCVFPSRGAPAAAAAASAPYVADDHSGRRVHHASPVAALARYPGMAGHGMVVAEPVVAGPEDALGLDLQLSLAPAGL

SEQ ID NO: 82463 - protein, 198 aa, Setaria italica
  misc_feature (184)..(184): Xaa can be any naturally occurring amino acid
  Transcript Sequence Number=SeqID_16489
  Gene Ontology: Mol. function=transcription regulator activity; Cellular component=nucleus; Biological process=regulation of transcription
  Homolog annotation: Hit_ID=B9SBG3; Match level="QueryCoverage=94%, HitCoverage=30%, E-value=5e-50, Identity=55%"; Hit description=DNA binding protein, putative
MVMKMEIEDDGAVGGTGGTWTEEDRALGAAVLGTDAFAYLTKGGGAISEGLVATSLPDDLQNKLQELVDSEGPGTGWNYAIFWQLSRTKSGDLVLGWGDGSCREPRDGEVGAAGSAGSDDTKQRMRKRVLQRLHIAFGVADEEDYAPGIDQVTDTEMFFLASMYFAFPRRAGGPGQAFAAGIPXLWIPNTERKVFPAN

SEQ ID NO: 82464 - protein, 92 aa, Setaria italica
  Transcript Sequence Number=SeqID_16490
LSVNQKRFISDIRKKFQDDQEFFASKVNAALSNYSKKNGVQGHISTFGQYPRDQMLLALLLYCSLLNVAMMLMRKRNQCVSLYLLLQLIPCA

SEQ ID NO: 82465 - protein, 92 aa, Setaria italica
  Transcript Sequence Number=SeqID_16491
YSQSKTAHGIKIVHPCDEVYHGNGEDFNIMAIGEHSISNELLISSCQFHVDMVHVLDEDWIYFDSKLDAKIAERNMMDDGAFKIWRWKGRIF

SEQ ID NO: 82466 - protein, 107 aa, Setaria italica
  Transcript Sequence Number=SeqID_16492
PLLFSREVRCFDCEYYGIKIVHPCDEVYHGNGEDFNIMAIGEHSISNELLISSCQFHVDMVHVLDEDWIYFDSKLDAKIAERNMMDDGAFKIWRWKIDDSIFSDSAP

SEQ ID NO: 82467 - protein, 121 aa, Setaria italica
  Transcript Sequence Number=SeqID_16493
HNFGVLTCCKLSLTFSLELQSLSLKLPGSKGEVLLKFLVPKIDFQVEVLPKFPVLNIDFPGEVLPKFSALTISFPRGGSAKIFCADHHFSRGGSDKTFFSHHQFSKGKFCQNFLEQEPTLS

SEQ ID NO: 82468 - protein, 140 aa, Setaria italica
  Transcript Sequence Number=SeqID_16494
  Gene Ontology: Mol. function=DNA binding
  Homolog annotation: Hit_ID=B4FR03; Match level="QueryCoverage=99%, HitCoverage=100%, E-value=7e-48, Identity=66%"; Hit description=OB -fold nucleic acid binding domain containing protein
  Subcellular localization annotation: CTP_CleavageSite=46; ConfidenceScore=5.28e-01
MATAAAKRKPVFVKVDQLKPGTTGHTLVAKVLSSKTVLQKGRPGAPAAGPAARPTRIAECLIGDETGCILFTARNEQVDLLKPESTVIIRNAKIDMFKGSMRLAVDKWGRIEVTEPASFNVKEDNNLSLVEYELVNVAEE

SEQ ID NO: 82469 - protein, 87 aa, Setaria italica
  Transcript Sequence Number=SeqID_16495
  Subcellular localization annotation: CTP_CleavageSite=44; ConfidenceScore=5.06e-01
IAVWYHILNKNHMNNKLISSHHTWRQTRSRGRSKQSLLLHLPVRLQEGVGPPESPDEEGDQMALAGGAVDAERSPRSGSLAEAPPEP

SEQ ID NO: 82470 - protein, 139 aa, Setaria italica
  Transcript Sequence Number=SeqID_16496
  Gene Ontology: Mol. function=sequence-specific DNA binding; Cellular component=nucleus; Biological process=regulation of transcription, DNA-dependent
  Homolog annotation: Hit_ID=Q949F7; Match level="QueryCoverage=86%, HitCoverage=56%, E-value=2e-54, Identity=84%"; Hit description=WRKY -like DNA-binding protein
  Pfam annotation: Domain name=WRKY; Domain location=63-122; Score =140.8; E_value=4.2e-39; Accession=PF03106.7; Description=WRKY DNA -binding domain
  Subcellular localization annotation: CTP_CleavageSite=33; ConfidenceScore=5.33e-01
RPQRRKPPARSLAPPPPPICTGSASSWWKGSAPAMADRGKMKVRRKMREPRFCFQTRSDVDVLDDGYKWRKYGQKVVKNSLHPRSYFRCTHSNCRVKKRVERLSTDCRMVMTTYEGRHTHSPCSDDAASGDHTDCFSSF

SEQ ID NO: 82471 - protein, 74 aa, Setaria italica
  Transcript Sequence Number=SeqID_16497
RGHGSAQRRVAREGRRGSGRWGDMVRRPGQVVSGCQVVDLVTNPCLPGARRHLTSPARRLLLHRAAWKHPSIKG

SEQ ID NO: 82472 - protein, 211 aa, Setaria italica
  Transcript Sequence Number=SeqID_16498
  Gene Ontology: Mol. function=binding
  Homolog annotation: Hit_ID=Q4ABQ0; Match level="QueryCoverage=100%, HitCoverage=33%, E-value=1e-111, Identity=87%"; Hit description =80A08_17
MDKIQSDCPYPGCFFCVMKEANPSKRKASVLKFFRELPSQDDDGQVLPISGLWNTAMAHPNDPEFINLGIFECMASLIWKGLKNRRWLAHDQNIYIPYYAAHIIGSYTMNVEEFAERAVRAGVIPPLVELLRGRLTWVEQRVAVRALGHLATYPSTFPAVAEHGEVLELAIQLASSSLEIVYSHFYQFVDRRLGYHCDLLTRGMGGVEMES

SEQ ID NO: 82473 - protein, 162 aa, Setaria italica
  Transcript Sequence Number=SeqID_16499
  Gene Ontology: Mol. function=zinc ion binding
  Homolog annotation: Hit_ID=Q10DV6; Match level="QueryCoverage=92%, HitCoverage=33%, E-value=4e-34, Identity=49%"; Hit description =Transposon protein, putative, unclassified, expressed
  Pfam annotation: Domain name=FAR1; Domain location=43-135; Score =133.0; E_value=9.8e-37; Accession=PF03101.7; Description=FAR1 family
QPPPAAAAAQPQSVCRDLFPVESDACLEPRLGMEFESGEAAKTFYIAYAGRVGFSVRIARSRKSKCSESIIMLRFVCSREGFSKEKRAATAGKKTRKRPASIREGCNAMLEVLRRGDSKWVVTKLVKEHNHEVGLPSRVHYIAIEGDAVVDPYLGMEFDSLE

SEQ ID NO: 82474 - protein, 186 aa, Setaria italica
  Transcript Sequence Number=SeqID_16500
  Gene Ontology: Cellular component=chloroplast
  Subcellular localization annotation: CTP_CleavageSite=45; ConfidenceScore=5.45e-01
MACSFSPSSATRLQAVDAAAAAVKNGRVPIKASVAPAQRSLGCCRATARQEGATKEPSVAVSSARTQLDLLEQLTSPTLDGIAGLENGTLPEPRQGATIREQLSALANGKVDEFTLPLGKKLKEGLKQLNRLTVSQRRNIKRQAMLTQVSGRNDSVFFATVGAFVLVPPFAILAIAVLTGYIQLLP

SEQ ID NO: 82475 - protein, 85 aa, Setaria italica
  Transcript Sequence Number=SeqID_16501
KEKKRPPDPDPATPDAGRRLIFARSRSVGSWRQPEAASSHGHTALRLRFPCCPEQLRFCPPSPCGPACLLRRWRGFSKPRCSLAP

SEQ ID NO: 82476 - protein, 64 aa, Setaria italica
  Transcript Sequence Number=SeqID_16502
MVSEQAPAAEVEKSEAAAPAEAAPKAEQPAEDEAPVVEDVKEDEDDDDEDEDDDDDDDDAGEGE

SEQ ID NO: 82477 - protein, 91 aa, Setaria italica
  Transcript Sequence Number=SeqID_16503
  Subcellular localization annotation: CTP_CleavageSite=30; ConfidenceScore=5.26e-01
PPPEPSMTSSMPPSPRPPPPLPFSPITTVRKMEKRDNELPPPSLAFSPPGIRIRKVEKRDDELLPPPLAFSPPRIRTRKMEKRDDELRRGC

SEQ ID NO: 82478 - protein, 108 aa, Setaria italica
  Transcript Sequence Number=SeqID_16504
LVSCSVCHSAENFHQKPCWLGRHSAEISCPKTLFSRPTLCQNFHLGLVSWFLRARFCPNSDLNTLLVQGKTLLDFSFATSSFFICFSDLCRCSCHEPFNVAALLLPSP

SEQ ID NO: 82479 - protein, 60 aa, Setaria italica
  Transcript Sequence Number=SeqID_16505
YVSLVWDGLQDLMNMDEADLWFAPICWHCCVQFLRAHPVLSVVYTKVVRLLLLLIRSQVG

SEQ ID NO: 82480 - protein, 100 aa, Setaria italica
  Transcript Sequence Number=SeqID_16506
IISSRKHYSVDVVVAWLVHILLHCGNITMLLFPFVDVSFLDRYTVNLVVFFVDKKLTELPDRSAGSASILPVSTKDKDTKLKEESTRLLNGNSGDSADRV

SEQ ID NO: 82481 - protein, 313 aa, Setaria italica
  Transcript Sequence Number=SeqID_16507
  Homolog annotation: Hit_ID=C5LU78; Match level="QueryCoverage=71%, HitCoverage=22%, E-value=2e-21, Identity=30%"; Hit description=Heat shock protein 70kD, putative
MSPFYLARSASKLVRRITSEVSVELKILSEKWRLLLAGLVFQYIHGLAARGVHYLHRPGPTLQDLGFMILPELGKERGYISETLFTFIFLSFVLWTFHPFILQTKRFYTVLIWRRVLAFLCASQFLRIITFYSTQLPGPNYHCREGSPLARLPPPQNAAEVLLINFPRGVIYGCGDLIFSSHMIFTLVFVITYQKYGSIRFVKMLAWCIAIVQSLLIISSRKHYSVDVVVAWYTVNLVVFFVDKKLTELPDRSAGSASILPVSTKDKDTKLKEESTRLLNGNSGDSADRRPRTQINGKHIENESHVDSESVKT

SEQ ID NO: 82482 - protein, 118 aa, Setaria italica
  misc_feature (102)..(102): Xaa can be any naturally occurring amino acid
  Transcript Sequence Number=SeqID_16508
GKPAEVVPASPYGGKPENKSESKAKGKVPGNQAAESGSGGGRVEPADAAILSSRDCFRRGRPKGAGGRSTETCTGVAPVKTDGPSPPRGVKSDGMGKPKPPXPRRADAVAGGHPPDGK

SEQ ID NO: 82483 - protein, 248 aa, Setaria italica
  Transcript Sequence Number=SeqID_16509
  Gene Ontology: Mol. function=exonuclease activity; Cellular component= intracellular; Biological process=nucleobase, nucleoside, nucleotide and nucleic acid metabolic process
  Homolog annotation: Hit_ID=B6U6N3; Match level="QueryCoverage=100%, HitCoverage=100%, E-value=1e-112, Identity=79%"; Hit description =Oligoribonuclease
  Pfam annotation: Domain name=Exonuc_X-T; Domain location=69-233; Score=117.1; E_value=5.9e-32; Accession=PF00929.16; Description =Exonuclease
MSKLYGMFSALRLDAEISGEDDRLEVAQASSSAEETASRERDKTQNGTIVVNYEEGTLVSSSGDYKMPLVWIDLEMTGLDITKDRILEIACIITDGKLTKQIEGPDLVISQSKDCLDNMDEWCKTHHSASGLTERVLQSELSECDAESQVLDFVRRHVSSGTPLLAGNSVYVDLLFLKKYMPQLAAIFSHVTVDVSSVMALCVRWYPKERKQTPRKQKAHRAMDDIKESIAELKYYKDNIFKPQKSKR

SEQ ID NO: 82484 - protein, 184 aa, Setaria italica
  Transcript Sequence Number=SeqID_16510
  Gene Ontology: Mol. function=transporter activity; Cellular component= integral to membrane; Biological process=transport
  Homolog annotation: Hit_ID=B6TU79; Match level="QueryCoverage=100%, HitCoverage=40%, E-value=1e-83, Identity=85%"; Hit description =Sulfate transporter
FSHSSSASTAVARPLLGLDGLVLALAALLFIILATGSGDDEEVSSDGTIRRRRSCSRVPAALIVFALGLLLCFVRDPSIVQGLRFGPAPLRIVKITWDDFKIGFWEGAVPQLPLSVLNSVIAVCKLSSDLFPERAELSPARVSVSVGLMNFVGCWFGAMPCCHGAGGLAGQYRFGGRSGASVVF

SEQ ID NO: 82485 - protein, 94 aa, Setaria italica
  Transcript Sequence Number=SeqID_16511
  Subcellular localization annotation: CTP_CleavageSite=81; ConfidenceScore=5.89e-01
GSNCSSSPFSFSFSFSFPRSFFSFTCFCFLGGGGWGGGGGCCFLGRLRRGLLRTSWTSGRTTRRRDGRVALSPPEASPRASAMLRASPPWKGGS

SEQ ID NO: 82486 - protein, 122 aa, Setaria italica
  Transcript Sequence Number=SeqID_16512
  Gene Ontology: Mol. function=heat shock protein binding; Cellular component=chloroplast; Biological process=protein folding
  Homolog annotation: Hit_ID=B9RGM8; Match level="QueryCoverage=78%, HitCoverage=53%, E-value=2e-15, Identity=45%"; Hit description =Chaperone protein dnaJ 8, chloroplast, putative
  Pfam annotation: Domain name=DnaJ; Domain location=22-89; Score=49.0; E_value=1.9e-11; Accession=PF00226.23; Description=DnaJ domain
AATVRCSCVGEAGPAAGGLAEEHYRTLRLRPGATRGEVKKAFRRLALMYHPDVCKESDGGGGRDACGVQFQRISVAYQMLMSNMREAEERLEYWRLKYGLTDQDLDRYRSYLNEDDDDWFDV

SEQ ID NO: 82487 - protein, 91 aa, Setaria italica
  Transcript Sequence Number=SeqID_16513
  Gene Ontology: Mol. function=heat shock protein binding; Biological process=protein folding
RADSSDGLLPRASSLLLQYHPDVCKESDGGGGRDACGVQFQRISVAYQMLMSNMREAEERLEYWRLKYGLTDQDLDRYRSYLNEDDDDWLR

SEQ ID NO: 82488 - protein, 69 aa, Setaria italica
  misc_feature (39)..(39): Xaa can be any naturally occurring amino acid
  Transcript Sequence Number=SeqID_16514
  Gene Ontology: Mol. function=heat shock protein binding; Biological process=protein folding
KESDGGGGATPAAVQFQRISVAYQMLMSNMKEAEERLEXNWRLKYGLTDQDLDRYRSYLNEDDDDWFDV

SEQ ID NO: 82489 - protein, 110 aa, Setaria italica
  Transcript Sequence Number=SeqID_16515
  Subcellular localization annotation: CTP_CleavageSite=44; ConfidenceScore=5.80e-01
GGAKRSAARPLKSSPPPRPPSSSSSSSVSGGGVAATTFTRLPLRDAPESAEVTLDRFPTAPANPEAPAPAPTRGNGVQRLEDEEEFEVGLGATSFAQIPLRDSPDGVELT

SEQ ID NO: 82490 - protein, 140 aa, Setaria italica
  Transcript Sequence Number=SeqID_16516
  Homolog annotation: Hit_ID=Q7XVB5; Match level="QueryCoverage=98%, HitCoverage=39%, E-value=4e-63, Identity=82%"; Hit description =OSJNBa0072D21.5 protein
LLTKPVAAVKVTLSLAAKAYANSLPLCKETFFSPQMDDELVLRYQALMKESSKLPLFDLRKLNAALPVPSVPDNTTEILVMGASNDFIVDSEGLSETSRFYGVQPVCVEGVAHDMMLDCSWEKGAEIILTWLEKLTPRLN

SEQ ID NO: 82491 - protein, 211 aa, Setaria italica
  misc_feature (82)..(82): Xaa can be any naturally occurring amino acid
  Transcript Sequence Number=SeqID_16517
  Gene Ontology: Cellular component=plasma membrane
  Homolog annotation: Hit_ID=B9S9G0; Match level="QueryCoverage=89%, HitCoverage=11%, E-value=6e-33, Identity=41%"; Hit description =Disease resistance protein RPS5, putative
SRNEPSPSYNMDANRNTLRYAQVSSDRHVEQMDIVGTTPSNYFEENVRNGEARVDGDSQLYRHENQDYPADGDPLPGIEGFXIVGEPRLGSTLTACGFPTNGTTLCNFQWVRHLENGTRQSIEGATMYDYVVTADDVGTLLAVDCTPMDDNGRQGDLVTKFANNGYKITCDPEMQNHIDACILNGKAEFEVVVLHAYSPPEEWELATLVLT

SEQ ID NO: 82492 - protein, 87 aa, Setaria italica
  Transcript Sequence Number=SeqID_16518
MHAGPSYQIKLKHTGEVIIDEKYSSYLQTKIPNGRTTQFVLVSSTGANLPVNTQGLSDPNNEDYDVRLRDLIVLVMRTFQKKALDAK

SEQ ID NO: 82493 - protein, 84 aa, Setaria italica
  Transcript Sequence Number=SeqID_16519
FLPSFVQHAYSPPEEWELATLVLTRPSYQIKLKHTGEVIIDEKYSSYLQTKIPNGRTTQFVLVSSTGANLPVNTQGLSGPNNED

SEQ ID NO: 82494 - protein, 247 aa, Setaria italica
  misc_feature (27)..(27): Xaa can be any naturally occurring amino acid
  misc_feature (40)..(40): Xaa can be any naturally occurring amino acid
  Transcript Sequence Number=SeqID_16520
  Gene Ontology: Cellular component=plasma membrane
  Homolog annotation: Hit_ID=B9S9G0; Match level="QueryCoverage=91%, HitCoverage=14%, E-value=1e-41, Identity=41%"; Hit description =Disease resistance protein RPS5, putative
MNFPSYNMDANRNTLRYAQVSSDRHVXQMYHGSHFQQDIXGTTPSNIFEENVRNGEARVDGDSQLYRHENQDYPADGDPLPGIEGFQIVGEPRLGSTLTACGFPTNGTTLCNFQWVRHLENGTRQSIEGATMYDYVVTADDVGTLLAVDCTPMDDNGRQGDLVTKFANNGYKITCDPEMQNHIDACILNGKAEFEVVVLHAYSPPEEWELATLVLTRPSYQIKLKHTGEVIIDEKYSSYLQTKIPNG

SEQ ID NO: 82495 - protein, 541 aa, Setaria italica
  Transcript Sequence Number=SeqID_16521
  Gene Ontology: Cellular component=plasma membrane
  Homolog annotation: Hit_ID=Q9S835; Match level="QueryCoverage=67%, HitCoverage=97%, E-value=9e-67, Identity=37%"; Hit description =T12J13.16 protein
MRDPFDAPVDLVNADHNGGNQLSRTSVVPARDYGLQNGDAKSFAPNSDTLVRHQLQGASMQKDLVVEDPNTRLMDPETKELYFRSQSQEDEILLLRKQVADASLKELRLLNEKHILERRLTDLRMAVDEKQEEAISGAMKQLNQKKNHIEENMRLANDLKAEEEELYLFTSSLLSMLAEYNVRPPQINASTITTGTKRLYQQLYWKIRSLNDSLGDMTQPGNIYNPNHQQATPSRNEPSPSYNMDANRNTLRYAQVSSDRHVEQMYHGSHFQQDIVGTTPSNYFEENVRNGEARVDGDSQLYRHENQDYPADGDPLPGIEGFQIVGEPRLGSTLTACGFPTNGTTLCNFQWVRHLENGTRQSIEGATMYDYVVTADDVGTLLAVDCTPMDDNGRQGDLVTKFANNGYKITCDPEMQNHIDACILNGKAEFEVVVLHAYSPPEEWELATLVLTRPSYQIKLKHTGEVIIDEKYSSYLQTKIPNGRTTQFVLVSSTGANLPVNTQGLSDPNNEDYDVRLRDLIVLVMRTFQKKALDAKRKGKA

SEQ ID NO: 82496 - protein, 241 aa, Setaria italica
  Transcript Sequence Number=SeqID_16522
  Gene Ontology: Mol. function=RNA-directed DNA polymerase activity; Cellular component=mitochondrion; Biological process=RNA-dependent DNA replication
  Homolog annotation: Hit_ID=Q2QT48; Match level="QueryCoverage=100%, HitCoverage=27%, E-value=1e-123, Identity=88%"; Hit description =Intron maturase, type II family protein, putative, expressed
  Pfam annotation: Domain name=Intron_maturas2; Domain location=7-153; Score=-8.6; E_value=0.0001; Accession=PF01348.13; Description=Type II intron maturase
VSEKGVGTLLSVTASLQRCIRHFRKLELVKGDRDPEPLPCSPMLYSGQAHTNSQMNKFLETMADWYRYADNRKKIVGFCAYVIRSSLAKLYAARYRLKSRAKVYKIASRDLSRPLRENTRNDAPEYSDLLRMGLVDFIEGVQFARMSSIPSCDYTPFPRNWVPHHELVLQEYIKLQDPKFFFELHKTIKRQEISSPQDDVSKMVWYYKVHGVYDDKGSLMRAKELRNGEVVNGYKQLLLDT

SEQ ID NO: 82497 - protein, 141 aa, Setaria italica
  Transcript Sequence Number=SeqID_16523
  Gene Ontology: Mol. function=ubiquitin-protein ligase activity; Cellular component=ubiquitin ligase complex
TPFKVTALKNIRACMAGDVAMQCEFVSSGGIQAVARVMAQALAESAAGGDFSAFTACEEAAAVLALLPLADAASVGLVLAPECMRPVMALLQRGGAEARLHAMDIVTKISNAGAGDWTAAAGVEVDDVLKPLLELLADEVS

SEQ ID NO: 82498 - protein, 87 aa, Setaria italica
  Transcript Sequence Number=SeqID_16524
  Subcellular localization annotation: CTP_CleavageSite=32; ConfidenceScore=5.24e-01
MASLQPTLLTPRPLCCCSHALLYPRFRKLPPRFSNGAYSTARPLDRSEFLGKGDKLAWRTAGRRRRRLGAAAAGRGPFFGGGGRRMG

SEQ ID NO: 82499 - protein, 206 aa, Setaria italica
  Transcript Sequence Number=SeqID_16525
  Gene Ontology: Mol. function=glycolipid transporter activity; Cellular component=cytoplasm; Biological process=glycolipid transport
  Homolog annotation: Hit_ID=Q01LK5; Match level="QueryCoverage=96%, HitCoverage=97%, E-value=2e-25, Identity=34%"; Hit description =OSIGBa0130K07.2 protein
  Pfam annotation: Domain name=GLTP; Domain location=30-172; Score =173.3; E_value=7.1e-49; Accession=PF08718.3; Description=Glycolipid transfer protein (GLTP)
MGSSEADKPLRRIAASFEELAAVAKQQPAGAMDAGAFARACSNVSVLFGCLGIAFKFAERDYVAKVDDLLEASKSISTLPLMVELDIQQDTVRVPGSHTRNLLRVKRGIDMVKVLFEQMLVTEGNSLRDAASVAYAQVFAPHHGWAIRKAVAAGMYALPSKSQLLKKLNEDEDSAKAQMQNFVRSSAPVISYVEDLFTSRNLGIDW

SEQ ID NO: 82500 - protein, 35 aa, Setaria italica
  Transcript Sequence Number=SeqID_16526
MSSGRYMAYSPSPSTTPHSPRIAGLRAPSAAVAEQ

SEQ ID NO: 82501 - protein, 73 aa, Setaria italica
  misc_feature (6)..(6): Xaa can be any naturally occurring amino acid
  misc_feature (19)..(19): Xaa can be any naturally occurring amino acid
  Transcript Sequence Number=SeqID_16527
PRAERXRALGEDNMEYCNXLTGRGGGMHSSSGFHSGHYSQPRSDPASDPTLGRLHHSSHGSQSGMPTRRSNYN

SEQ ID NO: 82502 - protein, 98 aa, Setaria italica
  Transcript Sequence Number=SeqID_16528
AGVELPRPGCRGGGEPLWAGREGCGQEPRQLAGEGCREPSQVVRADGGDEFPGWVAQAAPSPGRVATRRRRRRVPPGGLRRRRRSPGRVAEPSGSPWG

SEQ ID NO: 82503 - protein, 66 aa, Setaria italica
  Transcript Sequence Number=SeqID_16529
ETPHQPDAVRAFLAGLSLSTPEIARLVPLVPYVFASPVYVSRLAFFISFFGSFTKLHATTRGTATY

SEQ ID NO: 82504 - protein, 38 aa, Setaria italica
  Transcript Sequence Number=SeqID_16530
  Gene Ontology: Mol. function=hydrolase activity, hydrolyzing O -glycosyl compounds; Biological process=carbohydrate metabolic process
GKWEGIDRLCEPQQPRGSDYRYCIAQSVNAGMDMVYGY

SEQ ID NO: 82505 - protein, 498 aa, Setaria italica
  Transcript Sequence Number=SeqID_16531
  Gene Ontology: Mol. function=hydrolase activity, hydrolyzing O -glycosyl compounds; Cellular component=vacuole; Biological process =carbohydrate metabolic process
  Homolog annotation: Hit_ID=B9SHX7; Match level="QueryCoverage=99%, HitCoverage=81%, E-value=0.0, Identity=67%"; Hit description =Hydrolase, hydrolyzing O-glycosyl compounds, putative
  Pfam annotation: Domain name=Glyco_hydro_3; Domain location=1-242; Score=310.0; E_value=4.9e-90; Accession=PF00933.13; Description =Glycosyl hydrolase family 3 N terminal domain
  Pfam annotation: Domain name=Glyco_hydro_3_C; Domain location=314 -498; Score=106.4; E_value=9.4e-29; Accession=PF01915.14; Description= Glycosyl hydrolase family 3 C terminal domain
  Pfam module annotation: Pfam domain module=Glyco_hydro_3::Glyco_hydro_ 3_C; Domain location=1-242::314-498
HALASRLGVPILYGTDAVHGHNNVYGATVFPHNVGIGATRDTELARRIGEATALEVRATGIHWTFAPCVAVCRDPRWGRCYESYSEDPEIVRSMTTIVSGLQGQPPADHPHGYPFLASVRENVLACAKHFVGDGGTDKGVNEGNAICSYEDLEAIHMTPYPDCIAQGVATVMASYSKWNGEPLHSSRYLLTDVLKGKLGFKGFVISDWEGIDRLCEPQQPRGSDYRYCIAQSVNAGMDMIMIPHRFEKFLEDIVFLVETGEIPMSRIDDAVERILRVKFISGVFEHPFSDQSLLDTVGCKEHRLLAREAVCKSLVLLKNGKDQKAPFLPLAKNAKRILVAGTHADDIGYQCGGWTIAWHGDSGKITLGTSILEAVQESMGVQTEVVYEKCPTEATIENGDFSYAVVVVGEVPYAEWTGDRTDLGIPFNGSELITRVASKIPTLVIVISGRPLVIESQVLEKIEALVAAWLPGSECTGITDCLFGDHDFIGTLPVTWYR

SEQ ID NO: 82506 - protein, 152 aa, Setaria italica
  Transcript Sequence Number=SeqID_16532
  Gene Ontology: Mol. function=carbohydrate binding; Biological process= carbohydrate metabolic process
  Homolog annotation: Hit_ID=Q69VM1; Match level="QueryCoverage=100%, HitCoverage=69%, E-value=1e-71, Identity=84%"; Hit description=MYST1- like protein
SWDGSDPTMLWEDAKVQMMIEKESWPYSFALSEDFQKTEQRGCISGRLLVRDRYIDDEDLYASGAYVGLALPGEVGSWQRECKGYQFWCRADVDGSFYIRSIVTGNYNLYAWVPGFIGDYRLDATLTIASGDDIYLGDLVYEPPRDGPTMWE

SEQ ID NO: 82507 - protein, 63 aa, Setaria italica
  Transcript Sequence Number=SeqID_16533
LEFFLRGKMMAKIKHSRFYVQKFSFLWHRVFFKDGIKILSVVLYLSELLNTTVHKLDITQCVN

SEQ ID NO: 82508 - protein, 208 aa, Setaria italica
  Transcript Sequence Number=SeqID_16534
  Gene Ontology: Mol. function=transferase activity, transferring glycosyl groups; Biological process=metabolic process
  Homolog annotation: Hit_ID=B6TR02; Match level="QueryCoverage=99%, HitCoverage=44%, E-value=5e-76, Identity=64%"; Hit description =Indole-3-acetate beta-glucosyltransferase
  Pfam annotation: Domain name=DUF2346; Domain location=103-184; Score=- 7.6; E_value=0.026; Accession=PF09803.1; Description=Uncharacterized conserved protein (DU
GIHLHTPKTFETKAWLDAHPSLSVVYVAFGSIASLSSKQMTEVAEGLYNSDKPFLWVVRAKETSKLPATFADKAKGRGLIVPWCSQLEVLAHPSIGCFVTHCGWNSTLEAISSGVPIVAMPHWSDQPTNAKYVQDVWRVGVRVPPDSQGVMRREEIEVCVRQVMEGELREEFKIRALEWSKKAKKAMSKGGSSDINISDFLSKFGHHK

SEQ ID NO: 82509 - protein, 109 aa, Setaria italica
  Transcript Sequence Number=SeqID_16535
  Gene Ontology: Mol. function=serine-type endopeptidase activity; Cellular component=cell wall; Biological process=negative regulation of catalytic activity
  Homolog annotation: Hit_ID=B9RBY4; Match level="QueryCoverage=97%, HitCoverage=13%, E-value=1e-22, Identity=53%"; Hit description=Xylem serine proteinase 1, putative
  Pfam annotation: Domain name=PA; Domain location=1-76; Score=57.2; E _value=6e-14; Accession=PF02225.14; Description=PA domain
GAGSLDGLDVEGKIVLCYRGGGTGRGRKGEVVKRAGGAGMILANGASDGYSTFADAHALPASHVSYAAGEAIKEYISTTAKPVAKIVFRGTVLGAKPAPAMASFSSRGP

SEQ ID NO: 82510 - protein, 813 aa, Setaria italica
  misc_feature (396)..(396): Xaa can be any naturally occurring amino acid
  Transcript Sequence Number=SeqID_16536
  Gene Ontology: Cellular component=vacuole
  Homolog annotation: Hit_ID=Q7XXC5; Match level="QueryCoverage=85%, HitCoverage=47%, E-value=0.0, Identity=77%"; Hit description =OSJNBa0027O01.13 protein
MHRDTHLAAFIRKFNRFGSHIAYLLSFYVVDIKIFVGVLMNMLKKCSMFCSITLYNVDFVFLKYNKKDNLSNTFKGGVGGGSGGSILLFLQWLLLEKNSSLSASGGNGGVYGGGGGGGGRIHFHWSNIATGDEYVQIASVNGTVASSGGSGNNDGHFGQDGTITGKKCPMGLYGTFCTECPVGTYKNVTGSNSSLCSPCSVVSLPNRADFVYVRGGVTEPPCPYKCISDKYKMPNCYTPLEELMYTFGGPWSFAIILSFTIILLALILSALRIKIGESDITYRATNAIHNDGCSSFPFLLSLAEVPGASRAEETQSHVHRMYFMGPNTFREPWHLPYSPPDAIIRIVYEDAFNRFIDEINLVAAYEWWEGSIHSILSVLAYPCAWSWKQWRRRKKXHRLQEYVKSEYDHSCLRSCRSRALYKGLKVGSTPDLMVAYIDFFLGGDEKRLDVASTIQKRFPMCLIFGGDGSYMSPYYLHSDTLLSNLLGQYVSTAIWNRLVAGLNAQLRTVRQGGIRSTLSPVVTWINSHGNPQLERHGVRVELGWFQSTASGYYQLGIVVAVNENFYKSLHPHEHGPEFGERSRKNIAVLLQDFNQANQDQPCTSYAVSRKRLTGGVNGGIINEGTLESLDYKRDYLFPFSLLLQNSRPIGYAETLQLLICILLLGDFSITLLMLVQYYWISVGAFLAVLLIPPLALLSPFLAGLNALFSRGPKRSSVTRIFALWNITSVINIIVSMIYGALYFWLSSLAVSSVHHVYNAKSFKSREDNEWWILPVILFLIKSLQAGLVNWHVANLEIQDYTLFSPDPDRFWAM

SEQ ID NO: 82511 - protein, 285 aa, Setaria italica
  misc_feature (13)..(13): Xaa can be any naturally occurring amino acid
  Transcript Sequence Number=SeqID_16537
  Gene Ontology: Mol. function=nucleic acid binding
EGRRKVGGSGNWXRGGGGMGSRGPVGNMRNRMGPAGGGRGIMGNGGMVAPPPPMMPPGGMLGQGFDPTGYGAMGRMGGGFGGFPGGPGAMPFPGLMQPFPPVVAPHVNPAFFGRGGMGAGGMWPDPNMGAWGGEEQSSYGDDAASDQQHGEGGSHGKERPPEREWSGAPERRRERERDVPPAQEWPERRHRDERDMDRERNHDYDRGRERDRDRERDRDRDRERDRDRERERDRHRDDRDRYGDYHRHRDRDSERNEDWDRGRSSGVRSRSREADHSKRRRMTPQ

SEQ ID NO: 82512 - protein, 81 aa, Setaria italica
  Transcript Sequence Number=SeqID_16538
  Gene Ontology: Mol. function=peptidyl-prolyl cis-trans isomerase activity; Cellular component=thylakoid lumen; Biological process =protein folding
  Homolog annotation: Hit_ID=B4FK23; Match level="QueryCoverage=100%, HitCoverage=34%, E-value=8e-40, Identity=100%"; Hit description =FK506 binding protein
  Pfam annotation: Domain name=FKBP_C; Domain location=1-75; Score =10.5; E_value=0.00038; Accession=PF00254.20; Description=FKBP-type peptidyl-prolyl cis-trans isomer
VGSGQVIPAFEEAISGMAPGGVRRIIVPPDLGYPDNDYNKLGPKPTTFSGQRALDFVLRNQGLIDKTLLFDIELLKIIPNQ

SEQ ID NO: 82513 - protein, 218 aa, Setaria italica
  Transcript Sequence Number=SeqID_16539
  Gene Ontology: Mol. function=protein serine/threonine kinase activity; Biological process=protein amino acid phosphorylation
  Homolog annotation: Hit_ID=B9V0L1; Match level="QueryCoverage=100%, HitCoverage=26%, E-value=4e-67, Identity=60%"; Hit description=S -domain receptor-like protein kinase
  Pfam annotation: Domain name=PAN_1; Domain location=65-140; Score =13.3; E_value=0.0095; Accession=PF00024.18; Description=PAN domain
  Pfam annotation: Domain name=PAN_2; Domain location=59-127; Score =111.6; E_value=2.6e-30; Accession=PF08276.3; Description=PAN-like domain
  Pfam module annotation: Pfam domain module=PAN_1::PAN_2; Domain location=65-140::59-127
AQPSSFCSAYAVCGPFTVCNGNSGPLFCDCMETFSRKSPRDWDLGDRTGGCVRNTALDCIGSNKSKTSSTDVFHPISRVTLPYDEQRIEDAATQTDCAEACLNNCSCTAYSYENSKCSVWHGELLNVNLDDGIGISSQDVLYLRLAATDFQSLSKNNKRKPRAIIAASIVSFGLLMLMLLLLVWRTRFKRFNASLHDIPGSGGIIAFRYTDLVHATKN

SEQ ID NO: 82514 - protein, 90 aa, Setaria italica
  Transcript Sequence Number=SeqID_16540
  Pfam annotation: Domain name=TFIIB_Zn_Ribbon; Domain location=10-52; Score=10.0; E_value=0.028; Accession=PF08271.4; Description=TFIIB zinc-binding
LHKLRKTATRRCRNCSNPYRDQNPGGGKFMCSYCGHVSKRPVLDLNSAGKAPTGWPCAQDCGYWLDMRCSSGNNNSFLAFSWRLLSSFCS

SEQ ID NO: 82515 - protein, 357 aa, Setaria italica
  Transcript Sequence Number=SeqID_16541
  Gene Ontology: Mol. function=electron carrier activity; Biological process=metabolic process
  Homolog annotation: Hit_ID=B6TF82; Match level="QueryCoverage=39%, HitCoverage=39%, E-value=6e-68, Identity=90%"; Hit description=Src2 -like protein
  Pfam annotation: Domain name=C2; Domain location=6-90; Score=54.9; E _value=3.1e-13; Accession=PF00168.22; Description=C2 domain
  Pfam annotation: Domain name=XYPPX; Domain location=159-163; Score =1.6; E_value=1.2e+02; Accession=PF02162.9; Description=XYPPX repeat
  Pfam annotation: Domain name=XYPPX; Domain location=165-169; Score =1.9; E_value=1e+02; Accession=PF02162.9; Description=XYPPX repeat
  Pfam annotation: Domain name=XYPPX; Domain location=174-178; Score =1.2; E_value=1.7e+02; Accession=PF02162.9; Description=XYPPX repeat
  Pfam annotation: Domain name=XYPPX; Domain location=180-184; Score =1.9; E_value=1e+02; Accession=PF02162.9; Description=XYPPX repeat
  Pfam annotation: Domain name=XYPPX; Domain location=189-193; Score =1.2; E_value=1.7e+02; Accession=PF02162.9; Description=XYPPX repeat
  Pfam annotation: Domain name=XYPPX; Domain location=195-199; Score =1.9; E_value=1e+02; Accession=PF02162.9; Description=XYPPX repeat
  Pfam annotation: Domain name=XYPPX; Domain location=210-214; Score =1.6; E_value=1.2e+02; Accession=PF02162.9; Description=XYPPX repeat
  Pfam annotation: Domain name=XYPPX; Domain location=223-227; Score =3.7; E_value=31; Accession=PF02162.9; Description=XYPPX repeat
  Pfam annotation: Domain name=XYPPX; Domain location=229-233; Score =2.2; E_value=83; Accession=PF02162.9; Description=XYPPX repeat
  Pfam annotation: Domain name=XYPPX; Domain location=268-272; Score =4.0; E_value=25; Accession=PF02162.9; Description=XYPPX repeat
  Pfam annotation: Domain name=XYPPX; Domain location=278-282; Score =1.6; E_value=1.2e+02; Accession=PF02162.9; Description=XYPPX repeat
  Pfam annotation: Domain name=XYPPX; Domain location=291-295; Score =4.0; E_value=25; Accession=PF02162.9; Description=XYPPX repeat
  Pfam module annotation: Pfam domain module=C2::XYPPX::XYPPX::XYPPX::XY PPX::XYPPX::XYPPX::XYPPX::XYPPX::XYPPX::XYPPX::XYPPX::XYPPX; Domain location=6-90::159-163::165-169::174-178::180-184::189-193::195 -199::210-214::...
  Pfam module annotation: Domain location=223-227::229-233::268 -272::278-282::291-295
MATRTLELTLISAKDLKEVNLLSKMEVYAVVSLSGDPRSRQRIQADRTGGRNPTWNATLRFTVPASGAGSLHVLLRAERALGDRDVGEVHIPLSELLSGAPDGPVPAKFVAYQVRKISSAKPQGVLNFSYKLGEVTQSAGGYAPTPAQSAYTQPPPAAAYPPSSAYPPAGKADAYPPPSAYPPAAKADAYPPPSAYPPAAKADAYSPPTAYPPTGKADAPATAYPPQSGYPPASGKPAKAGEPVTAYPAAGPSTAAPYAAPQPQYGYGYPPQQPAGYGYPPPPPQAGYGYGYPPQAGYGYQQQAVKPQKKKNNFGMGLGAGLLGGAVGGLLIGDMMSDASAYDAGYDAGFDDGGFDF

SEQ ID NO: 82516 - protein, 89 aa, Setaria italica
  Transcript Sequence Number=SeqID_16542
MVAVEPKAAAHQFTVVIDGVETAVHEGVLRCSGGGTVAVVGPGVLEVTRLQHVVVRGGGGGDVRFSRCVYAAAEDCGAASFHRCGAVRA

SEQ ID NO: 82517 - protein, 130 aa, Setaria italica
  Transcript Sequence Number=SeqID_16543
  Gene Ontology: Mol. function=protein kinase activity; Cellular component=plasma membrane; Biological process=protein amino acid phosphorylation
  Homolog annotation: Hit_ID=Q9LRT1; Match level="QueryCoverage=60%, HitCoverage=7%, E-value=5e-19, Identity=54%"; Hit description =Leucine-rich repeat receptor-like protein kinase
  Pfam annotation: Domain name=LRRNT_2; Domain location=52-92; Score =51.1; E_value=4.4e-12; Accession=PF08263.4; Description=Leucine rich repeat N-terminal domain
ETFCTRQLPAAEMATTSPALLLLQQLFPLMLLLLLFIGAAPAARAADMPMPVNEEVLGLVVFKSALSDPTGALATWTESDATPCGWRRVECDPATSRVLRLSLDGLALSGPMPRGLDRLPALQELTLARH

SEQ ID NO: 82518 - protein, 75 aa, Setaria italica
  Transcript Sequence Number=SeqID_16544
MGSGMSSFRRPGDFAFDPMKGVIPLLGLQVAFAYGRPDSARPPVTAALLAANVLVFLRPGAPPQDPAQDQRRRPS

SEQ ID NO: 82519 - protein, 328 aa, Setaria italica
  misc_feature (304)..(304): Xaa can be any naturally occurring amino acid
  Transcript Sequence Number=SeqID_16545
  Gene Ontology: Mol. function=[acyl-carrier-protein] S-malonyltransfera se activity; Cellular component=mitochondrion; Biological process =fatty acid biosynthetic process
  Homolog annotation: Hit_ID=B6TNM0; Match level="QueryCoverage=92%, HitCoverage=82%, E-value=1e-143, Identity=89%"; Hit description =Malonyl CoA-acyl carrier protein transacylase
  Pfam annotation: Domain name=Acyl_transf_1; Domain location=91-328; Score=-107.7; E_value=0.00022; Accession=PF00698.13; Description =Acyl transferase domain
  Subcellular localization annotation: CTP_CleavageSite=68; ConfidenceScore=5.49e-01
MLFDASRLPLQRFPPRRLRLVPGSPMASTLAILRPSAPAPLAGPRGRVAAPATARVALSSRSRYSSARVSLGSEVAVGADALFADYKPTTAFLFPGQGAQTVGMGAEAQSVPAAAKLFNHANDILGYDLLDLCTNGPKEKLDSTVISQPAIYVTSLAAVEVLRARDGGKDVINSVDVTCGLSLGEYTALAFAGAFSFEDGLKLVKLRGEAMQDASDAANSAMVSVIGLDSEKVQQLCDAANEEVDEKERVQIANFLCPGNYAVSGGVKGIEMVEAKAKSFKARMTVRLAVAGAFHTSFMQPAVXRLESALAATEIRTPRIPVISNVDA

SEQ ID NO: 82520 - protein, 178 aa, Setaria italica
  Transcript Sequence Number=SeqID_16546
  Gene Ontology: Mol. function=[acyl-carrier-protein] S-malonyltransfera se activity; Biological process=fatty acid biosynthetic process
  Homolog annotation: Hit_ID=B6TNM0; Match level="QueryCoverage=96%, HitCoverage=46%, E-value=1e-88, Identity=91%"; Hit description =Malonyl CoA-acyl carrier protein transacylase
SRPITLTIALIGLASEKVQQLCDAANEEVDEKERVQIANFLCPGNYAVSGGVKGIEMVEAKAKSFKARMTVRLAVAGAFHTSFMQPAVSRLESALAATEIRTPRIPVISNVDAQPHSDPDTIKQILARQVTSPVQWETTVKTLMGKGLEKSYELGPGKVIAGILKRINKGASIENIGA

SEQ ID NO: 82521 - protein, 96 aa, Setaria italica
  Transcript Sequence Number=SeqID_16547
ARNLHRENISPGETDTRQERRRATATERGARTPGDRTRRGKSVDGRRVCSDRPPRHSAGLGRGAHCVVPCSPRWSACATTHEPAGSRALAVKTHPP

SEQ ID NO: 82522 - protein, 83 aa, Setaria italica
  misc_feature (1)..(30): Xaa can be any naturally occurring amino acid
  Transcript Sequence Number=SeqID_16548
XXXXXXXXXXXXXXXXXXXXXXXXXXXXXXNDALRFRWTSILQFLVQVQEKLSYNGATKSITLCCTMNKYISSIADLSTNYML

SEQ ID NO: 82523 - protein, 165 aa, Setaria italica
  misc_feature (14)..(14): Xaa can be any naturally occurring amino acid
  Transcript Sequence Number=SeqID_16549
  Gene Ontology: Mol. function=protein transporter activity; Cellular component=nuclear pore; Biological process=protein import into nucleus, docking
  Homolog annotation: Hit_ID=UPI0001738FFE; Match level="QueryCoverage =100%, HitCoverage=16%, E-value=2e-41, Identity=52%"; Hit description= binding / protein transporter
NGVRGALRCLALLXSDDLDDTCVPKLVPELFPSLYRIISSPHLYENSLRAKALAIVHSCISMLGSMSGVYKRDTASLMTSMLDPLIEQFSIILNSPLQSQNPDDWSMQMEVLKCLLQLVQNFPRLPEAKISAILPSLWQTFISSFKIYHLSSIQGSEDLDSVDYD

SEQ ID NO: 82524 - protein, 420 aa, Setaria italica
  Transcript Sequence Number=SeqID_16550
  Homolog annotation: Hit_ID=Q7XUM1; Match level="QueryCoverage=99%, HitCoverage=64%, E-value=1e-118, Identity=63%"; Hit description =OSJNBa0074L08.7 protein
  Subcellular localization annotation: CTP_CleavageSite=82; ConfidenceScore=5.11e-01
SSDVAPARGELGTGERGARQQPGKMVSVPARDKGRAPSPVKAASSGKRYPSPTLRSNSPARAAAAGNENALVQPTHGPSLSRSSSRKAEQSPFRRNPMAELDENALDNNHHHNNGNNGKLQKKSADAAVALPQKTVERAKDQIPSSRAVKEKEIVDEAVASDTKASSARMNATHSVSIVAENVTNLKPGSRSSRRSSRDFDHNGNSYASLLLEDIQNYHQQSTSAATATAAPTFALPACVSKACSILEAVADLNSSSSENKSFELERSVNDKESINGRYGGKGPGPSLVVESEVGVKDDLMEPSMHKYVSVRDIRGVGETEPQESAGSNSFAGNAWTCSWEPNSVDSTDRTRTASQSWQYNGDEVEQVTEQSWQSKQKAAASQEPSRRGSTSNVHVQRVRGSAVSGRSDGRGVSASSSVV

SEQ ID NO: 82525 - protein, 55 aa, Setaria italica
  Transcript Sequence Number=SeqID_16551
CQKPPPPPPPCSCSNHGSCGCHGTPPAWPTQPPVWPPPWGSSCNIVTEDNSCSVM

SEQ ID NO: 82526 - protein, 94 aa, Setaria italica
  Transcript Sequence Number=SeqID_16552
  Subcellular localization annotation: CTP_CleavageSite=47; ConfidenceScore=5.20e-01
PGGGWSFAVVRQRQPHKPLAARSPPSGLCFSLLPSKPSCIHHLHLASCFRVQSNGIHGGCSCCSFLLLRLNHLAEPTPNSPFQFHEHAAARRSS

SEQ ID NO: 82527 - protein, 194 aa, Setaria italica
  Transcript Sequence Number=SeqID_16553
  Homolog annotation: Hit_ID=Q9LMB4; Match level="QueryCoverage=97%, HitCoverage=97%, E-value=2e-61, Identity=61%"; Hit description =F14D16.29
  Pfam annotation: Domain name=Cupin_5; Domain location=8-171; Score =242.9; E_value=7.8e-70; Accession=PF06172.3; Description=Cupin superfamily (DUF985)
MASEEMTATEVAALLDLKPHPEGGFYNETFRDGSITLSTSQLPPQYKVNRAVSTAIYFLLPAGSVSRLHRIPCAETWHFYKGEPLTVFELHDDGHIDLTVIGPHLEAGQRPQYTVPPNVWFGSFPTLDVESFASDGSVLVKSRKRDPEQHYSLVGCTCAPGFQYEDFEMATFEDVRSLAPKAEPFLKFLIPCTE

SEQ ID NO: 82528 - protein, 68 aa, Setaria italica
  Transcript Sequence Number=SeqID_16554
ELKNRTSAAASKHSYMTVVGRWIIHMHCSRPSLTPVVGAYWLPVQGVTRLEIMLTTAGHLQMESCSEI

SEQ ID NO: 82529 - protein, 107 aa, Setaria italica
  misc_feature (7)..(7): Xaa can be any naturally occurring amino acid
  Transcript Sequence Number=SeqID_16555
  Gene Ontology: Cellular component=mitochondrial matrix
  Homolog annotation: Hit_ID=B6TNB6; Match level="QueryCoverage=100%, HitCoverage=44%, E-value=4e-34, Identity=72%"; Hit description =Mitochondrial glycoprotein
LHLSLIXVEVTRADRVLGFICSAWPDELAVRHVLTLRAGGGAASSDGARGGRNFEKLGAGEREAVTRFLKEREVDGELAEFLHDYMANKEKMELLRWLKTVESFLDK

SEQ ID NO: 82530 - protein, 123 aa, Setaria italica
  Transcript Sequence Number=SeqID_16556
  Gene Ontology: Mol. function=transferase activity, transferring glycosyl groups; Cellular component=integral to membrane; Biological process=cell wall organization and biogenesis
  Homolog annotation: Hit_ID=Q9LHZ7; Match level="QueryCoverage=99%, HitCoverage=10%, E-value=2e-63, Identity=91%"; Hit description =Cellulose synthase-like protein D2
RDDLDSEVGGIGDFSPEHQEFLSYHVHIPATPDNQPMDPAISARVEEQYVSNSLFTGGFNSVTRAHLMDKVIESEASHPQMAGAKGSSCAINGCDAKVMSDERGEDILPCECDFKICAECFGR

SEQ ID NO: 82531 - protein, 330 aa, Setaria italica
  misc_feature (322)..(322): Xaa can be any naturally occurring amino acid
  Transcript Sequence Number=SeqID_16557
  Gene Ontology: Mol. function=protein serine/threonine kinase activity; Biological process=protein amino acid phosphorylation
  Homolog annotation: Hit_ID=B9SZI2; Match level="QueryCoverage=97%, HitCoverage=88%, E-value=1e-116, Identity=62%"; Hit description =Serine/threonine-protein kinase PBS1, putative
  Pfam annotation: Domain name=Pkinase; Domain location=68-321; Score =122.5; E_value=1.4e-33; Accession=PF00069.17; Description=Protein kinase domain
  Pfam annotation: Domain name=Pkinase_Tyr; Domain location=68-307; Score=71.5; E_value=1.7e-18; Accession=PF07714.9; Description =Protein tyrosine kinase
  Pfam module annotation: Pfam domain module=Pkinase::Pkinase_Tyr; Domain location=68-321::68-307
MEKGGFKMFNIVSSWNKRRRSRSLDQLNPWVYKPAELWQAKEQSPPPKKRNCTMVFTLKEMEEATNMFSDRNLIGKGGFGRVYRGVLKDGQIVAIKKMDLPTSKQADGEREFRVEIDILSRLDHPNLVTLIGYCADGKHRFVVYEFMPKGNLQDILNGIGEVKMDWPLRLRIALGAARALAYLHSSTAVGVPVVHRDFKSSNILLTEHFEAKISDFGLAKLMQQDQDLHTTTRVLGTFGYFDPEYALTGKLTLQSDVYAFGVVLLELLTGRRAIDLSQGPQEQNLIVGIHQVVGDRKRLRRVVDRDIGQGDPTTVESVSMFXAGLAARCV

SEQ ID NO: 82532 - protein, 148 aa, Setaria italica
  Transcript Sequence Number=SeqID_16558
  Gene Ontology: Mol. function=protein serine/threonine kinase activity; Cellular component=plasma membrane; Biological process =protein amino acid phosphorylation
  Homolog annotation: Hit_ID=B9SZI2; Match level="QueryCoverage=97%, HitCoverage=40%, E-value=3e-46, Identity=61%"; Hit description =Serine/threonine-protein kinase PBS1, putative
PTQAKISDFGLAKLMQQDQDLHTTTRVLGTFGYFDPEYALTGKLTLQSDVYAFGVVLLELLTGRRAIDLSQGPQEQNLIVGIHQVVGDRKRLRRVVDRDMAKGSYTVESVSMFAGLAARCVCFDSAARPSMPDCVKELQFIMYANMKI

SEQ ID NO: 82533 - protein, 115 aa, Setaria italica
  Transcript Sequence Number=SeqID_16559
  Gene Ontology: Mol. function=acyltransferase activity; Cellular component=integral to membrane; Biological process=metabolic process
  Homolog annotation: Hit_ID=B6SWK2; Match level="QueryCoverage=98%, HitCoverage=21%, E-value=1e-50, Identity=84%"; Hit description =Glycerol-3-phosphate acyltransferase 8
TNRVGLFHPTTARGWKAMDPIFFFMNPRPVYEVTFLNQLPAEATCAAGKSPVDVANYVQRILAATLGFECTSLTRKDKYRVLAGNDGIVNAAKPAAPGKAAWQGRIKEVLGFLLH

SEQ ID NO: 82534 - protein, 41 aa, Setaria italica
  Transcript Sequence Number=SeqID_16560
TSWNLISSNNPNRNFTSLLASYLILLLWLISFFSPLVPPSR

SEQ ID NO: 82535 - protein, 118 aa, Setaria italica
  Transcript Sequence Number=SeqID_16561
  Gene Ontology: Mol. function=ubiquitin-protein ligase activity; Cellular component=ubiquitin ligase complex; Biological process =protein amino acid phosphorylation
MVCNCREMNTPKSKTALKLMETAVPSCKIWFTCKGHLICTREATESLPAILPSPAKNAPMAPAYSISSQMGSMAPAELEYEVSSSKGYTSSSLVATEMTDWDYLFGGDHPEYIWNDNM

SEQ ID NO: 82536 - protein, 155 aa, Setaria italica
  Transcript Sequence Number=SeqID_16562
  Homolog annotation: Hit_ID=B9S8S4; Match level="QueryCoverage=98%, HitCoverage=10%, E-value=4e-54, Identity=63%"; Hit description=Set domain protein, putative
GDEDHAVALWVKWRGKWQTGIRCCRVDYPLTTVKAKPTHDRKSYIVVFFPRTRSYSWVDMLLVLPIEECPSPLVNGTHRKWRKLVKDLGVPRRYIMQKLAISMLNLSDELHIEAVIDNARKATTWKEFALEASCCTDYTDLGKMLVKLQNMILPD

SEQ ID NO: 82537 - protein, 274 aa, Setaria italica
  Transcript Sequence Number=SeqID_16563
  Gene Ontology: Mol. function=protein binding; Cellular component =cytoplasm; Biological process=ubiquitin-dependent protein catabolic process
  Homolog annotation: Hit_ID=B6TJW6; Match level="QueryCoverage=100%, HitCoverage=78%, E-value=1e-135, Identity=86%"; Hit description =Leucine Rich Repeat family protein
  Pfam annotation: Domain name=LRR_1; Domain location=111-135; Score =3.0; E_value=82; Accession=PF00560.25; Description=Leucine Rich Repeat
  Pfam annotation: Domain name=LRR_1; Domain location=162-185; Score =2.3; E_value=1.1e+02; Accession=PF00560.25; Description=Leucine Rich Repeat
  Pfam annotation: Domain name=LRR_1; Domain location=187-214; Score =3.4; E_value=68; Accession=PF00560.25; Description=Leucine Rich Repeat
  Pfam annotation: Domain name=LRR_1; Domain location=240-263; Score =6.0; E_value=22; Accession=PF00560.25; Description=Leucine Rich Repeat
  Pfam annotation: Domain name=LRR_1; Domain location=33-56; Score=8.1; E_value=8.5; Accession=PF00560.25; Description=Leucine Rich Repeat
  Pfam annotation: Domain name=LRR_1; Domain location=85-108; Score =2.1; E_value=1.2e+02; Accession=PF00560.25; Description=Leucine Rich Repeat
  Pfam module annotation: Pfam domain module=LRR_1::LRR_1::LRR_1::LRR _1::LRR_1::LRR_1; Domain location=111-135::162-185::187-214::240 -263::33-56::85-108
YRHLKLLNLEFAQDIEDRHFVHLKEMSGISLENLEFLNLNACQKISDKGIEAITSLCPNLHGLSIYWIVGLTDSSIGHITKYCRQIVDLNLSGCKNISDKGMRLIANSYQGLKKLNITRCVKLTDDGLKEVLQKCSLVESLNLYALSSFTDKIYKDIGLLSNLTFLDLCGAQNLTDDGLVYISRCGGLTYLNLTWCVRVTDAGVVAIAQGCRSLKLLSLFGIVGVTDACLEALSKSCSHSLTTLDVNGCIGIKRRSRDDLLKLFPLLSCFKVHS

SEQ ID NO: 82538 - protein, 76 aa, Setaria italica
  Transcript Sequence Number=SeqID_16564
HLLEYEITNYRLSICLGGKLMITNQSILFFVSTNLISFPCAECQFIKLMYQLGQASTIHKLNCVITRSRQTDNKLP

SEQ ID NO: 82539 - protein, 145 aa, Setaria italica
  Transcript Sequence Number=SeqID_16565
  Homolog annotation: Hit_ID=Q6H7S8; Match level="QueryCoverage=98%, HitCoverage=3%, E-value=9e-29, Identity=53%"; Hit description =Putative LvsC
DVSQISLSISLAYWEQCARWIIKVLSTVFPCIKACASETELPNHIRILANTLQHYMLCTFRKVLISAPALLKSFREEGLWDLIFSEKFFYFGSSVNYIHQIIHETWNDQLIDAPKSTDSKSFNETDVNILQAEAISFLEFAATLN

SEQ ID NO: 82540 - protein, 88 aa, Setaria italica
  Transcript Sequence Number=SeqID_16566
  Subcellular localization annotation: CTP_CleavageSite=52; ConfidenceScore=5.27e-01
AAGRWRSSASASLRALRGVLPPWKGAAAAAASTARERLRALRGVLPPWKGAAAAAASTARERSCRRRSGARGKEWRATEKKKCANGRR

SEQ ID NO: 82541 - protein, 520 aa, Setaria italica
  misc_feature (507)..(507): Xaa can be any naturally occurring amino acid
  Transcript Sequence Number=SeqID_16567
  Gene Ontology: Mol. function=binding; Cellular component=chloroplast; Biological process=regulation of transcription, DNA-dependent
  Homolog annotation: Hit_ID=B9RNC1; Match level="QueryCoverage=100%, HitCoverage=67%, E-value=1e-169, Identity=36%"; Hit description =Pentatricopeptide repeat-containing protein, putative
  Pfam annotation: Domain name=PPR; Domain location=123-157; Score =43.2; E_value=1e-09; Accession=PF01535.12; Description=PPR repeat
  Pfam annotation: Domain name=PPR; Domain location=158-192; Score =30.8; E_value=5.5e-06; Accession=PF01535.12; Description=PPR repeat
  Pfam annotation: Domain name=PPR; Domain location=17-52; Score=8.6; E_ value=0.87; Accession=PF01535.12; Description=PPR repeat
  Pfam annotation: Domain name=PPR; Domain location=193-227; Score =42.3; E_value=1.9e-09; Accession=PF01535.12; Description=PPR repeat
  Pfam annotation: Domain name=PPR; Domain location=228-262; Score =34.7; E_value=3.6e-07; Accession=PF01535.12; Description=PPR repeat
  Pfam annotation: Domain name=PPR; Domain location=263-297; Score =41.8; E_value=2.6e-09; Accession=PF01535.12; Description=PPR repeat
  Pfam annotation: Domain name=PPR; Domain location=378-412; Score=9.8; E_value=0.62; Accession=PF01535.12; Description=PPR repeat
  Pfam annotation: Domain name=PPR; Domain location=53-87; Score=33.2; E_value=1e-06; Accession=PF01535.12; Description=PPR repeat
  Pfam annotation: Domain name=PPR; Domain location=88-122; Score=38.8; E_value=2.2e-08; Accession=PF01535.12; Description=PPR repeat
  Pfam module annotation: Pfam domain module=PPR::PPR::PPR::PPR::PPR::PP R::PPR::PPR::PPR; Domain location=123-157::158-192::17-52::193 -227::228-262::263-297::378-412::53-87::88-122
MGVLESMKGAGLRPTTVSYNAVIDACGKGGVDLRLTLGYFRQMLQDGLCPDRKTFNSLLAACSRAGHLEDARAVFDEMIHLGSGRDIYTYNTFVDAICKCGNMELAMQVVLDMEAKNVKPNVVTYSTLMDGFSKLEKYDEALKLRGKMKSLGIQLDRVCYNTLLAIYVKTGKYDEIATVCEEMESLGIEKDTVTYNSLINGYGKQGRLDMVALLVQDMRAQGVAPSVLTYSTLIDIYSKAGMHGDAFNVYLDFKESGLKADVVLFSSFIDTLAKNGLVECALSLLDEMMKMGIKPNVVTYNTIIDAFGKSKILPEEDPEIGDLGIVGVYGGQIVRAANPATRGWRSAVDARMRRSQELFFILELFQKMVQQGVRPNVVTFSAILNACSRCNSFEDAALLLEQLRLFDNFVYGVAYGLLMGHREVWSQARSLFNQLGRMDSPTSSAFYNALTDVLWHFGQRQGAQQVVLEGVNRRVWENTWSEFCLDLHLMSCGAAQAMVHAWLLNVXRSIVFEGRAMPEF

SEQ ID NO: 82542 - protein, 207 aa, Setaria italica
  Transcript Sequence Number=SeqID_16568
  Homolog annotation: Hit_ID=B9RNC1; Match level="QueryCoverage=93%, HitCoverage=22%, E-value=7e-78, Identity=67%"; Hit description =Pentatricopeptide repeat-containing protein, putative
EQLRLFDNFVYGVAYGLLMGHREVWSQARSLFNQLGRMDSPTSSAFYNALTDVLWHFGQRQGAQQVVLEGVNRRVWENTWSEFCLDLHLMSCGAAQAMVHAWLLNVRSIVFEGRAMPEFLSILTGWGKHSKIAGSSTLRRVIEALLLSIGAPFQVERFNIGRFVSPSAVVAAWLRESGTINILLLRNERVQHANPPNLVPRLQALQL

SEQ ID NO: 82543 - protein, 75 aa, Setaria italica
  Transcript Sequence Number=SeqID_16569
YTYRSHQPGHICSVEFVAPHDYNTKNRHVLYFSSCELLRAPLVNRAILLYMHSVSLQQLHYTGQLRYWLHRHRKI

SEQ ID NO: 82544 - protein, 45 aa, Setaria italica
  Transcript Sequence Number=SeqID_16570
LDSMIILNISPENWSLKMHVFGTTILSRLVKKTSTATFYNKQLSF

SEQ ID NO: 82545 - protein, 151 aa, Setaria italica
  Transcript Sequence Number=SeqID_16571
  Gene Ontology: Mol. function=2 iron, 2 sulfur cluster binding; Cellular component=chloroplast; Biological process=electron transport chain
  Homolog annotation: Hit_ID=B4FYW4; Match level="QueryCoverage=100%, HitCoverage=98%, E-value=1e-65, Identity=80%"; Hit description =Ferredoxin-3
  Pfam annotation: Domain name=Fer2; Domain location=62-137; Score =114.4; E_value=3.8e-31; Accession=PF00111.19; Description=2Fe-2S iron-sulfur cluster binding domain
  Subcellular localization annotation: CTP_CleavageSite=52; ConfidenceScore=5.53e-01
MATFASPVLCNFLAIAQNNARLLNNSTKRPPNASFPRSTPPLPGFRARQDVRVAAVYKVKLIGPEGQESVIDVPEDSYILDAAEDAGVELPYSCRAGACSTCAGKVLEGSVDQSDQSFLDDAQVGAGYALTCVAYPTSDCVIQTHREADLY

SEQ ID NO: 82546 - protein, 121 aa, Setaria italica
  Transcript Sequence Number=SeqID_16572
  Gene Ontology: Mol. function=transferase activity, transferring glycosyl groups; Cellular component=integral to membrane
  Homolog annotation: Hit_ID=Q67WK4; Match level="QueryCoverage=97%, HitCoverage=23%, E-value=1e-52, Identity=77%"; Hit description =Glycosyl transferase protein A-like
  Pfam annotation: Domain name=Glyco_transf_8; Domain location=1-121; Score=-47.2; E_value=0.0041; Accession=PF01501.12; Description =Glycosyl transferase family 8
TCFGGFRRYGKYLNFSDPVVQGSFSPRACAWSYGVNVFDLQAWRREQCTDRFHRFMEMNENGTLWDPASVLPVGLMTFYGKTKPLDKSWHVMGLGYNPHIRPEDISGAAVIHFNGNMKPIG

SEQ ID NO: 82547 - protein, 93 aa, Setaria italica
  Transcript Sequence Number=SeqID_16573
  Subcellular localization annotation: CTP_CleavageSite=59; ConfidenceScore=5.59e-01
TDYRRIAAAAAAAATATAVGEKRPSPEPAASSDSSSPSSSSSSGTPKRRKRGEAAAATMAMALVPPPPAQAPVQLTLPAHPWFAACPVQQLVS

SEQ ID NO: 82548 - protein, 192 aa, Setaria italica
  Transcript Sequence Number=SeqID_16574
  Gene Ontology: Mol. function=structural constituent of ribosome; Cellular component=ribonucleoprotein complex; Biological process =translation
  Homolog annotation: Hit_ID=Q9XET4; Match level="QueryCoverage=100%, HitCoverage=100%, E-value=4e-99, Identity=91%"; Hit description=40S ribosomal protein S7
  Pfam annotation: Domain name=Ribosomal_S7e; Domain location=6-191; Score=305.2; E_value=1.4e-88; Accession=PF01251.10; Description =Ribosomal protein S7e
MYTARKKIQKDKGLEPSEFETSVAQAFFDLENANQELKSDLRDLYINSAFQMDVAGSRKAVVIHVPYRLRKAFKKIHVRLVRELEKKFSGKDVVIVATRRIVRPPKKGSAVVRPRTRTLTAVHDGILEDVVYPAEIVGKRVRYHLDGSKIIKIFLDPKERNNTEYKLETFSAVYRRLCGKDVVYEYPVTDTA

SEQ ID NO: 82549 - protein, 321 aa, Setaria italica
  Transcript Sequence Number=SeqID_16575
  Gene Ontology: Mol. function=nucleic acid binding; Cellular component= intracellular; Biological process=embryonic development ending in birth or egg hatching
  Homolog annotation: Hit_ID=B9S0D2; Match level="QueryCoverage=65%, HitCoverage=64%, E-value=3e-90, Identity=75%"; Hit description =Splicing factor 3A subunit, putative
  Pfam annotation: Domain name=CactinC_cactus; Domain location=104-219; Score=-57.0; E_value=0.1; Accession=PF09732.1; Description=Cactus -binding C-terminus of cactin pr
MDREWGSKPGSGGAASAQNEAIDRRERLRRLALETIDLAKDPYFMRNHLGSYECKLCLTLHNNEGNYLAHTQGKRHQTNLAKRAAREAKDAPAQPQPNKRKLAPRKSVKIGRPGYRVTKQYDPDTKQHSFLFEIGYPEIEDNTKPRHRFMSSYEQKVETWDKRYQYLLFAAEPYEIIGFKIPSTEIDKSADKFFSYWDPDKKEYLLQLYFKPRPPEVNKPPPAPPGTLPNGTGGPGAPPPRPPGQAPPPPPQVPPPPHAPPPAPMGMPPRIPPPPIGGAQPPPPPPPANGPPRPMIPPPPNFTPGAPPPRPPMQGFPGQQQ

SEQ ID NO: 82550 - protein, 78 aa, Setaria italica
  Transcript Sequence Number=SeqID_16576
  Homolog annotation: Hit_ID=B6TWI7; Match level="QueryCoverage=98%, HitCoverage=19%, E-value=3e-15, Identity=62%"; Hit description=GATA zinc finger family protein
MPSLAHHHSPLDDGRTDALKCNNSFAPEETAEDAAAAAAAGALVEKDGFSVEDLLDLEEFGEPDKDGADNEEAPLPPP

SEQ ID NO: 82551 - protein, 162 aa, Setaria italica
  misc_feature (151)..(151): Xaa can be any naturally occurring amino acid
  Transcript Sequence Number=SeqID_16577
  Gene Ontology: Mol. function=sequence-specific DNA binding; Cellular component=nucleus; Biological process=regulation of transcription, DNA-dependent
  Homolog annotation: Hit_ID=B6TWI7; Match level="QueryCoverage=90%, HitCoverage=36%, E-value=7e-33, Identity=63%"; Hit description=GATA zinc finger family protein
MCAYACFSGPAVKDDGRTDALKCNNSFAPEETAEDAAAAAAAGALVEKDGFSVEDLLDLEEFGEPDKDGADNEEAPLPPPPAAAAEEKSNGDSQPLSVVTYELPPPPPEMVDLPAHDVEELEWVSRIMDDSLSELPPQPHPPAALVASLAXRPPLAQQRAGA

SEQ ID NO: 82552 - protein, 185 aa, Setaria italica
  Transcript Sequence Number=SeqID_16578
  Homolog annotation: Hit_ID=Q013M6; Match level="QueryCoverage=61%, HitCoverage=8%, E-value=9e-10, Identity=36%"; Hit description=[S] KOG4386 Uncharacterized conserved protein
GQYVRLFEQGDTVSVLPLSDTEYTSYALSEAERFQDSYEIIALFRKAYESFQSLGATRMASSCSRGMAIEYYAAGDFSNAKQLFDGVAGLYRQEGWTTLLWENLGYLRECSRKLNFPKDFISYSLEMAALPLFSGSVEETRENKIKSGPAGSPTISRRENILQEVVNVLERKQPPERMMMGLVMQ

SEQ ID NO: 82553 - protein, 562 aa, Setaria italica
  Transcript Sequence Number=SeqID_16579
  Homolog annotation: Hit_ID=Q9FZE6; Match level="QueryCoverage=49%, HitCoverage=33%, E-value=7e-18, Identity=29%"; Hit description =T1K7.1 protein
  Pfam annotation: Domain name=DUF863; Domain location=1-553; Score =222.5; E_value=1.1e-63; Accession=PF05904.3; Description=Plant protein of unknown function (DUF863)
  Subcellular localization annotation: CTP_CleavageSite=33; ConfidenceScore=5.45e-01
MGSCTADPRSSVINNPALIARFNGSSAVNSYTSLSAVTQSIGTSTPKLKNVDNLDGRYPGFPLDPFSGSHSRHQVAISSDLEQKNSQKFEHSDRQSHGKGMKNFNLNDALSDCQEDSLVEQEGRCAGSFQHSKDGGSVFGISWLKNKGRCADPIALEKPGKLFGHSFGTAVELKNTKDQNELGQTIRNLSDSASTSLGCGIKKDGPSEDIIARTLLVCNKAQETAARLPLSCQKHVPKDGQAAEGVIKKSGAPIRNFIDLNDDVPNEDNSEESVVSHECQVAPLQNNQPKRAFVIDLEVPACEDGAAWTFDQECAHPGKLDAYQEIDSTSVTAAMAAAENIVALSMDIPTAAEVSDDMLQWFADLAVSNINDLAEQVELQACTNDTSDDELDSFESLTLKLEETKIDEYWSRPLEPAITTDEQAVSTAHLLTKPRRGQQRRRRQKRDFQKDILPGLSSLSRPEIIEDVQLLEGLVQASGGSWESSLTRRGRYGGRTRGRKPRKTVVTVTVEEEEVDVRLGPPKPAGTGDLEADERGMIGWGRTTRRCRRTRCPSGNNIAAAS

SEQ ID NO: 82554 - protein, 77 aa, Setaria italica
  Transcript Sequence Number=SeqID_16580
LLIGQLSRCKADLSGCYYSILYSLQMLVGRYTEKKIVYAQQNNEWCKNTMIHSHIRFECFINYISDLMKFNQKKKTR

SEQ ID NO: 82555 - protein, 225 aa, Setaria italica
  Transcript Sequence Number=SeqID_16581
  Gene Ontology: Mol. function=sequence-specific DNA binding; Cellular component=nucleus; Biological process=regulation of transcription, DNA-dependent
  Homolog annotation: Hit_ID=Q0J8G8; Match level="QueryCoverage=100%, HitCoverage=100%, E-value=1e-117, Identity=91%"; Hit description =MADS-box transcription factor 26
  Pfam annotation: Domain name=K-box; Domain location=82-175; Score =14.6; E_value=3e-05; Accession=PF01486.9; Description=K-box region
  Pfam annotation: Domain name=SRF-TF; Domain location=9-59; Score =90.3; E_value=6.6e-24; Accession=PF00319.10; Description=SRF-type transcription factor (DNA-binding and dimerisation domain)
  Pfam module annotation: Pfam domain module=K-box::SRF-TF; Domain location=82-175::9-59
MARGKVQLRRIENPVHRQVTFCKRRAGLLKKARELSVLCDAHIGIIIFSAHGKLYDLATTGTMEELIERYKTASGEAALQGDGGGDHRMDPKQETMVLQQEINLLQKGLRYIYGNRANEHMTVEELNALERYLEIWMYNIRSAKMQIMIQEIQALKSKEGMLKAANEVLQEKIVEQSGLLDVGVMVADQQNGHFSTVPLIEEITNPLTILSGYSNCRGSEMGYSF

SEQ ID NO: 82556 - protein, 210 aa, Setaria italica
  misc_feature (19)..(19): Xaa can be any naturally occurring amino acid
  misc_feature (200)..(200): Xaa can be any naturally occurring amino acid
  Transcript Sequence Number=SeqID_16582
  Gene Ontology: Mol. function=kinase activity; Cellular component =chloroplast; Biological process=carbohydrate metabolic process
  Homolog annotation: Hit_ID=Q10H44; Match level="QueryCoverage=99%, HitCoverage=36%, E-value=1e-103, Identity=84%"; Hit description=PfkB- type carbohydrate kinase family protein, putative, expressed
CFTYNSSALLEPTTQSSLXKAVDVSKKFGGIIFFDLNLPLPLWSSSKVTKSLIKEAWEAADIIEVTKQELEFLCDIKPSEKFDTNDNDKSKFTHYSPEAIKKLWHDNLKVLFVTNGTSKIHYYTRKHSGWVRGTEDAPITPFTSEMSQSGDAIVAALMRMLAINPHLVTDKVYLHKAVKYAIKCGVLDQWVLARERGFLXQKERADPTSE

SEQ ID NO: 82557 - protein, 165 aa, Setaria italica
  misc_feature (95)..(96): Xaa can be any naturally occurring amino acid
  Transcript Sequence Number=SeqID_16583
  Gene Ontology: Mol. function=oxidoreductase activity; Biological process=cellular amine metabolic process
  Homolog annotation: Hit_ID=B7ZYE7; Match level="QueryCoverage=100%, HitCoverage=23%, E-value=6e-83, Identity=89%"; Hit description =Copper amine oxidase
  Pfam annotation: Domain name=Cu_amine_oxid; Domain location=1-165; Score=-120.0; E_value=1.1e-10; Accession=PF01179.12; Description =Copper amine oxidase, enzyme domain
TGGAATPRRSYWTVRREVAETEADGQVEVDAGPADLLFVNPGKKTRMGNEVGYRLIPAGATAASVLADDDYPQRRASYTKKQVWVTPYSKAEKWXXPGMYADQSTGDDGLAAWSRRNRGIRDEDIVLWYTVGLHHIPYQEDFPVMPTLSGGFELRPSNFFERNPI

SEQ ID NO: 82558 - protein, 214 aa, Setaria italica
  Transcript Sequence Number=SeqID_16584
  Gene Ontology: Mol. function=microtubule motor activity; Cellular component=microtubule associated complex; Biological process =microtubule-based movement
  Homolog annotation: Hit_ID=Q01IZ0; Match level="QueryCoverage=95%, HitCoverage=17%, E-value=6e-84, Identity=79%"; Hit description =OSIGBa0102D10.3 protein
RDSKLTRLLQSSLSGHGRISLICTVTPASSNSEETHNTLKFAHRSKHVEIKASQNKIIDEKSLIKKYQKEISCLKEELQQLRRGMMGNGCILPTDQEDLVNLKLQLEAGQVKLQSRLEQEEEAKAALMGRIQRLTKLILVSTKSSISSNVSGKTNLRRRHSFGEDELVYLPDRKREYFVDDDDISLDSELSLEGKLDSNNPDESARFDRRIVNV

SEQ ID NO: 82559 - protein, 268 aa, Setaria italica
  misc_feature (87)..(87): Xaa can be any naturally occurring amino acid
  Transcript Sequence Number=SeqID_16585
  Homolog annotation: Hit_ID=Q4JQF9; Match level="QueryCoverage=100%, HitCoverage=10%, E-value=1e-118, Identity=80%"; Hit description =Aberrant pollen transmission 1
LHQRDKGIRVKNLDLILGPIVVNLEEKLLTKKKQSASTVADQKDEPSVDNKSSARSEGGKLASLNKKISLLPEKVSFNMSKLDLKFXLPKDHGLSVNNEIGSISLRCTRLQPQHDFGENTTHLRLETDVTEIHLLMDGATSVLEVAKVSTVVSANIPTQPALPVQAEVDVKISGFQCNLIISRIKPLIRINSDKKKPLVLRESPQQEKAPKEKLALALACTLSAPDFTLVLHSLDDVPLYHLSFSIQLSVSASKLVDQGTQLHVKLGE

SEQ ID NO: 82560 - protein, 360 aa, Setaria italica
  Transcript Sequence Number=SeqID_16586
  Gene Ontology: Mol. function=FMN binding
  Homolog annotation: Hit_ID=B6TNA5; Match level="QueryCoverage=98%, HitCoverage=98%, E-value=0.0, Identity=86%"; Hit description =Pyridoxamine 5-phosphate oxidase-related
  Pfam annotation: Domain name=Pyridox_oxidase; Domain location=117 -216; Score=22.6; E_value=0.0015; Accession=PF01243.12; Description =Pyridoxamine 5'-phosphate oxidase
  Subcellular localization annotation: CTP_CleavageSite=38; ConfidenceScore=5.05e-01
MEALTGTASSSILPVRHPPSRLAPQSLALRPSRCGPIRAAAGGGGKDEAHPAPAANGSPVLKLKSDSSQNGVIPIAADKLQKASSTNTGSDSSGSRAGLFRTPISGGVQSATFAHGLPPPALAVRNLMEQARFAHLCSVMSGMHHRRTGYPFGSLVDFANDSMGHPIFSLSPLAIHTRNLLSDPRCTLVVQVPGWSGLSNARVTIFGDVYPLPADQQEWAHKQYVAKHQQWASQQWGNFYYYRMHNISDIYFIGGFGTVAWVDVNEYETTQPDKVAVDGAEKSLKELNAIFSKPLRELLSSEGEVDDAAVISVDSKGIDIRVRQGAQFNIQRLAFDVPEKVLTLEEAKRALHKIIKTSSK

SEQ ID NO: 82561 - protein, 733 aa, Setaria italica
  misc_feature (686)..(686): Xaa can be any naturally occurring amino acid
  misc_feature (723)..(723): Xaa can be any naturally occurring amino acid
  Transcript Sequence Number=SeqID_16587
  Gene Ontology: Mol. function=nucleoside-triphosphatase activity; Cellular component=integral to membrane; Biological process=transport
  Homolog annotation: Hit_ID=Q84K47; Match level="QueryCoverage=100%, HitCoverage=74%, E-value=0.0, Identity=63%"; Hit description=ABC transporter A family member 2
  Pfam annotation: Domain name=ABC_tran; Domain location=555-733; Score= 132.3; E_value=1.5e-36; Accession=PF00005.19; Description=ABC transporter
  Subcellular localization annotation: CTP_CleavageSite=56; ConfidenceScore=5.19e-01
MELLSGGALAWQQYRSLLRKNATLTWRHRRSAALQLFSSLVFIFLIFCIDRAVRSRFSSTTAYRNVPDPEALVAPPIPPCEDKFFIKSPCYDFLWSDGGSARVKGLVDAIRRNNPGRPIPAEKVLGFRTPDDVDAWLFQNPMRCPGALHFQDINATQIKYGIQTNSTPVARRGTYEDPTFKFQIPLQVAAEREMARLLIGDPNFSWTVGFKEFAHPATETFSTIAQAGPTFFLAIAMFGFVFQISALVTEKELKLRQAMSTMGLYESAYWLSWFTWEALLTTLSALFTVLFGMMFQFDFFLNNSFGILFLLFFLFQLNMLSFAFMISTFVAKAASATTVGFAIFIIGFLTQLVTTFGFPYSADYKKLYRTLWSLFPPDVFAKALNILGKATATPEDKGISWNQRGKCPSFETDCVITIDDIYKWLISTFFLWFVLAIYFDNILPNVNGVRKSVFYFLIPSYWTGKGGKMQEGGLFSCFGSSRPADDAAPTDEDVLAEENLVKEQAANNEVDPGTAVQIHGLRKTYPGTFSMGCCKCSTTKPFHSVKGLWVNLEKDQLFCLLGPNGAGKTTTISCLTGITPITGGDAFIYGQSVRSAVGMTNIRRMIGVCPQFDILWDALTAKEHMELFASIKGLPPSAIVSVAEESLAKVKLSQVTNVRAGSYSGGMKRRLSVAIALIGDPKLVFXDEPTTGMDPITRRHVWDIIEEAKKGRAIVLTTHSMEXADILSDRIAI

SEQ ID NO: 82562 - protein, 119 aa, Setaria italica
  Transcript Sequence Number=SeqID_16588
  Gene Ontology: Mol. function=hydrolase activity, hydrolyzing O -glycosyl compounds; Cellular component=cell wall; Biological process= carbohydrate metabolic process
  Homolog annotation: Hit_ID=B6TX02; Match level="QueryCoverage=76%, HitCoverage=30%, E-value=4e-28, Identity=61%"; Hit description =Xyloglucan endotransglucosylase/hydrolase protein 23
  Pfam annotation: Domain name=Glyco_hydro_16; Domain location=21-119; Score=17.0; E_value=5.5e-08; Accession=PF00722.13; Description =Glycosyl hydrolases family 16
PGPSLLLLALTAVAAARDHDFRRDFDVTWGEGNARFRDGGRQVELSLDRRSGARLQSKERYLFGRFDIEIKLVPGESAGTITSFYICTGGARHDEVDFEFLGNASGEPYLLHTNILHRR

SEQ ID NO: 82563 - protein, 42 aa, Setaria italica
  Transcript Sequence Number=SeqID_16589
CLFPNLVTGPFLFTTVCQDDDFDEASYVPVQLALIFAHTEKY

SEQ ID NO: 82564 - protein, 247 aa, Setaria italica
  Transcript Sequence Number=SeqID_16590
  Gene Ontology: Mol. function=protein binding
  Homolog annotation: Hit_ID=B9RQ64; Match level="QueryCoverage=99%, HitCoverage=97%, E-value=3e-82, Identity=61%"; Hit description=Rwd domain-containing protein, putative
  Pfam annotation: Domain name=RWD; Domain location=3-122; Score=121.1; E_value=3.6e-33; Accession=PF05773.14; Description=RWD domain
MADYEQEQEMEVEALQAILMDDIKEIDPSESGIATTARCFQILLSPQDDDFDEASYVPVQLALIFAHTEKYPDEPPLLNVKSMRGIKPDDLASLKEKLDQEATENLGMAMVYTLVSSAQEWLCEKYGQNGGDEEPEETEEKEEEVIVPHGEAVTVESFLAWRERFEAELALQRAKLMPDSALTAPKEKRLTGRQYFESGRHAVKGASTVVDEDEEEEEDIEFDDDFEDDEEDMLEHYLAEQSGKSTA

SEQ ID NO: 82565 - protein, 81 aa, Setaria italica
  misc_feature (1)..(41): Xaa can be any naturally occurring amino acid
  Transcript Sequence Number=SeqID_16591
XXXXXXXXXXXXXXXXXXXXXXXXXXXXXXXXXXXXXXXXXFSRKEIHKIADSFSTVTTGNGNKNCIYITHSNQGWCFPAN

SEQ ID NO: 82566 - protein, 202 aa, Setaria italica
  misc_feature (111)..(111): Xaa can be any naturally occurring amino acid
  Transcript Sequence Number=SeqID_16592
  Gene Ontology: Mol. function=protein binding; Cellular component =plasma membrane; Biological process=vesicle-mediated transport
  Homolog annotation: Hit_ID=Q9LM16; Match level="QueryCoverage=96%, HitCoverage=50%, E-value=2e-87, Identity=74%"; Hit description =F16L1.7 protein
MDGLLSKLRNLDAYPKVNEDFYSRTLSGGIITLASSVVMLLLFVSELRLYLHAVTETTLRVDTSRGEKLRINFDVTFPALQCSIISLDAMDISGQEHLDVKHDIFKQRIDXQGNVIATIQDAVGGMKMEKPLQHHGGRLEHNETYCGSCYGAQESNDQCCNTCEDVREAYRKKGWGVSNPDLLDQCKREGFNETINIASFTF

SEQ ID NO: 82567 - protein, 245 aa, Setaria italica
  misc_feature (35)..(35): Xaa can be any naturally occurring amino acid
  misc_feature (193)..(193): Xaa can be any naturally occurring amino acid
  misc_feature (228)..(228): Xaa can be any naturally occurring amino acid
  Transcript Sequence Number=SeqID_16593
  Gene Ontology: Mol. function=protein binding; Cellular component =plasma membrane; Biological process=vesicle-mediated transport
  Homolog annotation: Hit_ID=Q9SKW6; Match level="QueryCoverage=99%, HitCoverage=66%, E-value=1e-107, Identity=65%"; Hit description =F5J5.4
  Pfam annotation: Domain name=DUF1692; Domain location=47-228; Score =331.1; E_value=2.2e-96; Accession=PF07970.4; Description=Protein of unknown function (DUF1692)
YEHNETYCGSCYGAQESDDQCCNTCEDVREAYRKXGWGVSNPDLLDQCKREGFLQSIKDEEGEGCNIYGFIEVNKVAGNFHFAPGKSFQQSNVHVHDLLPFQKDSFNVSHKINKLSFGEHFPGVVNPLDRAQWVQHSSYGMYQYFIKVVPTVYTDINDRIILSNQFSVTEHFRSSEGGRIQALPGVFFFYDLXPIKVTFTEQHVSFLHFLTNVCAIVGGVFTVSGIYXISFVYHGQRAIKKKMEI

SEQ ID NO: 82568 - protein, 63 aa, Setaria italica
  Transcript Sequence Number=SeqID_16594
  Gene Ontology: Mol. function=metal ion binding
  Homolog annotation: Hit_ID=B9T4W3; Match level="QueryCoverage=96%, HitCoverage=11%, E-value=2e-20, Identity=75%"; Hit description=Zinc ion binding protein, putative
GYQGHHHLPETRGLCLSEEQTVSTILRRPRMAGNKIMEMITEPYRLTRRCEVTAILILYGLPR

SEQ ID NO: 82569 - protein, 84 aa, Setaria italica
  Transcript Sequence Number=SeqID_16595
  Gene Ontology: Mol. function=metal ion binding
  Homolog annotation: Hit_ID=B9T4W3; Match level="QueryCoverage=77%, HitCoverage=12%, E-value=1e-23, Identity=73%"; Hit description=Zinc ion binding protein, putative
  Pfam annotation: Domain name=LIM; Domain location=18-69; Score=29.9; E_value=2e-06; Accession=PF00412.14; Description=LIM domain
GNAYQPLPFMFSSGFRACAGCHREIGHGRFLSCMGAVWHPECFRCHACSQPIYDYEFSMSGNHPYHPLPAKGSIVARKDVPYIQ

SEQ ID NO: 82570 - protein, 150 aa, Setaria italica
  Transcript Sequence Number=SeqID_16596
  Gene Ontology: Mol. function=metal ion binding
  Homolog annotation: Hit_ID=B9T4W3; Match level="QueryCoverage=95%, HitCoverage=27%, E-value=2e-65, Identity=78%"; Hit description=Zinc ion binding protein, putative
  Pfam annotation: Domain name=LIM; Domain location=24-80; Score=42.0; E_value=2.4e-09; Accession=PF00412.14; Description=LIM domain
  Pfam annotation: Domain name=zf-C3HC4; Domain location=51-87; Score =5.7; E_value=0.023; Accession=PF00097.17; Description=Zinc finger, C3HC4 type (RING finger)
  Pfam module annotation: Pfam domain module=LIM::zf-C3HC4; Domain location=24-80::51-87
MAPQNGGNAYQPLPFMFSSGFRACAGCHREIGHGRFLSCMGAVWHPECFRCHACSQPIYDYEFSMSGNHPYHKTCYKEQFHPKCDVCKQFIPTNMNGLIEYRAHPFWLQKYCPSHEVDGTPRCCSCERMEPRESRYVLLDDGRKLCLECL

SEQ ID NO: 82571 - protein, 71 aa, Setaria italica
  Transcript Sequence Number=SeqID_16597
  Gene Ontology: Mol. function=metal ion binding
  Homolog annotation: Hit_ID=B9T4W3; Match level="QueryCoverage=61%, HitCoverage=8%, E-value=5e-16, Identity=84%"; Hit description=Zinc ion binding protein, putative
MHHLTVPYFQIPTNMNGLIEYRAHPFWLQKYCPSHEVDGTPRCCSCERMEVCSVTMFCFCILVLWPYFMVR

SEQ ID NO: 82572 - protein, 54 aa, Setaria italica
  Transcript Sequence Number=SeqID_16598
  Gene Ontology: Mol. function=metal ion binding
  Homolog annotation: Hit_ID=B6SPK3; Match level="QueryCoverage=98%, HitCoverage=10%, E-value=2e-21, Identity=84%"; Hit description=Zinc ion binding protein
IPTNMNGLIEYRAHPFWLQKYCPSHEVDGTPRCCSCERMEPRESRYVLLDDGRT

SEQ ID NO: 82573 - protein, 307 aa, Setaria italica
  misc_feature (67)..(67): Xaa can be any naturally occurring amino acid
  Transcript Sequence Number=SeqID_16599
  Gene Ontology: Mol. function=metal ion binding
  Homolog annotation: Hit_ID=B9T4W3; Match level="QueryCoverage=96%, HitCoverage=58%, E-value=1e-125, Identity=71%"; Hit description=Zinc ion binding protein, putative
MHHLTVPYFQIPTNMNGLIEYRAHPFWLQKYCPSHEVDGTPRCCSCERMEPRESRYVLLDDGRKLCXLECLDSAVMDTSECQPLYLEIQEFYEGLNMKVEQQVPLLLVERQALNEAMEGEKAGHHHLPETRGLCLSEEQTVSTILRRPRMAGNKIMEMITEPYRLTRRCEVTAILILYGLPRLLTGSILAHEMMHAWLRLRGYRTLSPDVEEGICQVLAHMWIESEIMAGSGSSAASSSSGSSTSASSKKGGRSQFERKLGDFFKHQIESDTSTAYGDGFRAGNRAVMQYGLKRTLEHIRLTGTFPF

SEQ ID NO: 82574 - protein, 173 aa, Setaria italica
  Transcript Sequence Number=SeqID_16600
  Gene Ontology: Mol. function=methyltransferase activity; Cellular component=nucleus; Biological process=rRNA processing
  Homolog annotation: Hit_ID=B6TN81; Match level="QueryCoverage=100%, HitCoverage=59%, E-value=5e-82, Identity=83%"; Hit description =Cerebral protein 1
  Pfam annotation: Domain name=Methyltransf_11; Domain location=26-103; Score=40.5; E_value=6.7e-09; Accession=PF08241.4; Description =Methyltransferase domain
  Pfam annotation: Domain name=Methyltransf_8; Domain location=1-173; Score=177.6; E_value=3.6e-50; Accession=PF05148.7; Description =Hypothetical methyltransferase
  Pfam module annotation: Pfam domain module=Methyltransf _11::Methyltransf_8; Domain location=26-103::1-173
MSRWPEQPVNVIINWLKSHKTSWTVADFGCGNAAVAKNVKNKVFSIDLVSDDPSVIACDMAHTPLESSSVDVAIFCLSLMGTNYPNYLEEANRVLKPSGWLVIAEVRSRLDPNNGGADPEKFSKAIIQLGFSLVSKDMKNKMFVLFYFRKKEKSKVAKRIDWPQLKACMYKRR

SEQ ID NO: 82575 - protein, 238 aa, Setaria italica
  Transcript Sequence Number=SeqID_16601
  Gene Ontology: Mol. function=phosphotransferase activity, phosphate group as acceptor; Cellular component=cytoplasm; Biological process =nucleobase, nucleoside, nucleotide and nucleic acid metabolic process
  Homolog annotation: Hit_ID=B6TE58; Match level="QueryCoverage=93%, HitCoverage=90%, E-value=1e-118, Identity=92%"; Hit description =Adenylate kinase
  Pfam annotation: Domain name=ADK; Domain location=59-212; Score =229.7; E_value=7.2e-66; Accession=PF00406.14; Description=Adenylate kinase
  Pfam annotation: Domain name=Thymidylate_kin; Domain location=59-229; Score=-29.8; E_value=0.0035; Accession=PF02223.9; Description =Thymidylate kinase
  Pfam module annotation: Pfam domain module=ADK::Thymidylate_kin; Domain location=59-212::59-229
  Subcellular localization annotation: CTP_CleavageSite=70; ConfidenceScore=5.31e-01
LLLRSPPSSSSTAASSCQSRRHHLLPSEEPLALNRLARLFTSQAGSDGGHSRKPFVAFVLGGPGSGKGTQCSKIASDFGFTHLSAGDLLRHEIASGSEKGQLILDIIKEGRIVSSEITVELIRKAMETSNADKVLIDGFPRCEENRIAFERIVGTEPDIVVFFDCPEDEMVKRLLGRNQGRVDDNIETIKKRLKVFESLNIPVVDYYSSRGKVHKINATGTADEIFEAVRRLFSSLRF

SEQ ID NO: 82576 - protein, 137 aa, Setaria italica
  Transcript Sequence Number=SeqID_16602
WVVAELDYGDTAAWASLARDVLDDPIYFDRVEWEHAHRFLRGDADYDYTYDDGDGPLQEMAERFGWDLSDEEGWGRLDLRLIGTSYGGRIPRKGARKQSTSRSNSNSSTGSAKNGSLFDVGADPDGARGKRDERRER

SEQ ID NO: 82577 - protein, 47 aa, Setaria italica
  Transcript Sequence Number=SeqID_16603
SLEVCVNPYDSHYSISLSFNQSLFHSIPFFLLFDILEFPIFFPLHLT

SEQ ID NO: 82578 - protein, 192 aa, Setaria italica
  misc_feature (3)..(3): Xaa can be any naturally occurring amino acid
  misc_feature (16)..(16): Xaa can be any naturally occurring amino acid
  misc_feature (36)..(36): Xaa can be any naturally occurring amino acid
  Transcript Sequence Number=SeqID_16604
  Gene Ontology: Mol. function=protein binding
  Homolog annotation: Hit_ID=B9S586; Match level="QueryCoverage=45%, HitCoverage=14%, E-value=2e-14, Identity=49%"; Hit description =Protein binding protein, putative
APXPSLLSLCLDAVAXHLTRDSAGVGAAENGWGRRXCSGGGPGEFAEEVAEEAYDEHLGPEQVAEALPWELLHRLASRLPPAALESLHHAAHAGCCSSANTTAGLGGQNGDRRGIKRSRCEDFNTAWQSLFKLRWPLGVNAGHDSVAIVDWQQQYWEKHLQECLDEAAESAFLPSFCGGISESSISAKIMNF

SEQ ID NO: 82579 - protein, 249 aa, Setaria italica
  misc_feature (16)..(16): Xaa can be any naturally occurring amino acid
  misc_feature (228)..(228): Xaa can be any naturally occurring amino acid
  Transcript Sequence Number=SeqID_16605
  Gene Ontology: Mol. function=carboxypeptidase activity; Cellular component=integral to membrane; Biological process=proteolysis
  Homolog annotation: Hit_ID=B6SWE3; Match level="QueryCoverage=98%, HitCoverage=35%, E-value=1e-111, Identity=82%"; Hit description =Glutamate carboxypeptidase 2
  Pfam annotation: Domain name=CPSase_sm_chain; Domain location=34-142; Score=-91.8; E_value=0.049; Accession=PF00988.14; Description =Carbamoyl-phosphate synthase small chain, CPSase domain
  Pfam annotation: Domain name=PA; Domain location=65-167; Score=66.5; E_value=9.8e-17; Accession=PF02225.14; Description=PA domain
  Pfam module annotation: Pfam domain module=CPSase_sm_chain::PA; Domain location=34-142::65-167
SPPHSFPTRLTPYSVXSLSYPAHRSLSLTASGRDTVHFALEQEIYPGDPYAAVSAEAVPTFLAYAASGSVTAEVVYANYGRAEDFAYLAARGVNITGKVAVARYGKVFRGDIVRNARDAGAAAAVIYNDAKDYAAGNAFPDGPWMPPTGVQVGSTFKGVGDPTTPMWASSEGCQRLSIAEAMASDDMPGIPALPVSGMDGEAILQLIGGDVAPEDWQGGAGAPAYRLXGPGPAVLNLTYIGNETMATIQ

SEQ ID NO: 82580 - protein, 82 aa, Setaria italica
  Transcript Sequence Number=SeqID_16606
ERITKSCLEDRISRVHSSAVWFRKFSRVPDMAMAFLNGRCKTTCSFLSYGNHKLQAEQGMKTLQLNSQMRVMLSQQKKTFQL

SEQ ID NO: 82581 - protein, 51 aa, Setaria italica
  Transcript Sequence Number=SeqID_16607
  Gene Ontology: Cellular component=integral to membrane
  Homolog annotation: Hit_ID=Q10SJ5; Match level="QueryCoverage=68%, HitCoverage=12%, E-value=4e-09, Identity=80%"; Hit description =Tobamovirus multiplication protein 3, putative, expressed
LIWCEFCQVQLIRIECRVPEYGWTTQRVFHFLNFIVNSDEFIIVLTHLGTP

SEQ ID NO: 82582 - protein, 79 aa, Setaria italica
  misc_feature (61)..(61): Xaa can be any naturally occurring amino acid
  Transcript Sequence Number=SeqID_16608
  Gene Ontology: Cellular component=integral to membrane
  Homolog annotation: Hit_ID=Q10SJ5; Match level="QueryCoverage=94%, HitCoverage=26%, E-value=1e-13, Identity=53%"; Hit description =Tobamovirus multiplication protein 3, putative, expressed
  Pfam annotation: Domain name=DUF1084; Domain location=1-79; Score= -109.4; E_value=0.00086; Accession=PF06454.3; Description=Protein of unknown function (DUF1084)
LVKFQIVLWLLMWWKPVQAVVILSKLFFAATSLFAAFGFLLYGGRLFLMLQRFHVESKGRXKKLNEVGYVTTICFGCFL

SEQ ID NO: 82583 - protein, 53 aa, Setaria italica
  Transcript Sequence Number=SeqID_16609
  Gene Ontology: Mol. function=nucleoside-triphosphatase activity
AWNADPNFLYPEIKAWYQDKFHSQFDLKWEQMHQEVLLEGHELFPKRSKKVKG

SEQ ID NO: 82584 - protein, 186 aa, Setaria italica
  Transcript Sequence Number=SeqID_16610
  Gene Ontology: Mol. function=nucleoside-triphosphatase activity
MEDSNALILPCKRKNKGQGKAKDGKKAKKEDPKMSKTKLKKLQKLEEEKRKKLLQAQSIEILQKHKISEDAYSLLHASGTIGQVETLKEKCRRAMQLSKAGLDVPEELSLFKRNDDQKFSENSDPVEHILPPKFVEPVKSEDPGRVHEKNMKNDSKKAMECQPKMDVGVSIPEPKTEEPSDNGHLL

SEQ ID NO: 82585 - protein, 95 aa, Setaria italica
  misc_feature (46)..(46): Xaa can be any naturally occurring amino acid
  Transcript Sequence Number=SeqID_16611
  Gene Ontology: Cellular component=integral to membrane
  Homolog annotation: Hit_ID=Q10SJ5; Match level="QueryCoverage=87%, HitCoverage=27%, E-value=2e-19, Identity=58%"; Hit description =Tobamovirus multiplication protein 3, putative, expressed
VVEILVQGTKLIRIECRVPEYGWTTQRVFHFLNFIVNSDDCVCSVXRNVQVVHPEIFQHVLIDLPGLAFFIVRSQGTCSYIISSDFVANIFFPNT

SEQ ID NO: 82586 - protein, 284 aa, Setaria italica
  Transcript Sequence Number=SeqID_16612
  Gene Ontology: Cellular component=integral to membrane
  Homolog annotation: Hit_ID=Q10SJ5; Match level="QueryCoverage=94%, HitCoverage=95%, E-value=1e-113, Identity=73%"; Hit description =Tobamovirus multiplication protein 3, putative, expressed
  Pfam annotation: Domain name=DUF1084; Domain location=1-284; Score =770.8; E_value=9.5e-229; Accession=PF06454.3; Description=Protein of unknown function (DUF1084)
MAASSSAAAAAALDAWWDDVNNSPLWQDRTFHALAALYGVVALVALVQLIRIECRVPEYGWTTQKVFHFLNFIVNSVRSTVFVLRRNVQVVHPEIFQHVLIDLPGLAFFTTYALLVLFWAEIYYQARALPTNGLRPAFYTINGVVYAIQIVLWLLMWWKPVQAVVILSKLFFAATSLFAAFGFLLYGGRLFLMLQRFPVESKGRRKKLNEVGYVTTICFGCFLIRCIMMCFSAFDKEADLDVLNHPILNFFYYLLVEIVPSSLVLFILRKLPPKRGIAQYHPIH

SEQ ID NO: 82587 - protein, 372 aa, Setaria italica
  Transcript Sequence Number=SeqID_16613
  Gene Ontology: Mol. function=nucleoside-triphosphatase activity; Cellular component=ribonucleoprotein complex; Biological process =ribosome biogenesis
  Homolog annotation: Hit_ID=Q9C813; Match level="QueryCoverage=95%, HitCoverage=26%, E-value=3e-72, Identity=45%"; Hit description=RNA helicase, putative; 27866-23496
  Pfam annotation: Domain name=DEAD; Domain location=175-361; Score= -26.1; E_value=0.0032; Accession=PF00270.21; Description=DEADDEAH box helicase
SIYRCISNYSVIQVETLKEKRRRAMQLSKAGLDVPEELSLFKRNGDQKFSENSDPVEHILPPKFVEPVKSEDPGRLHEKNMKNDPRKAMECQPKMDVGVSIPEPKTEEPSDNGHLLANQKIQSSIPSCSGSELNLQDKEPGQGEAAMQECINPPIVVPVSRPHEVEKARRDLPIIMMEQEIMEAIYENSIVILCGETGCGKTTQVPQFLYEAGFGTSDRADRRGMIGITQPRRVAVLATARRVSYELGLKLGREVGFQVRHDKLVGSNCSIKFMTDGILLRELQGDFLLKRYSVIILDEAHERSLNTDILIGMLSRIIKGRKNLYVDQQDKIRSGVKIKPEDMISQLKVVLMSATLQLKDFISNRRLFDVIP

SEQ ID NO: 82588 - protein, 804 aa, Setaria italica
  Transcript Sequence Number=SeqID_16614
  Gene Ontology: Mol. function=nucleoside-triphosphatase activity
  Homolog annotation: Hit_ID=Q9C813; Match level="QueryCoverage=100%, HitCoverage=62%, E-value=0.0, Identity=47%"; Hit description=RNA helicase, putative; 27866-23496
  Pfam annotation: Domain name=DUF1605; Domain location=543-680; Score =77.8; E_value=3.8e-20; Accession=PF07717.8; Description=Domain of unknown function (DUF1605)
  Pfam annotation: Domain name=HA2; Domain location=376-509; Score =52.7; E_value=1.4e-12; Accession=PF04408.15; Description=Helicase associated domain (HA2)
  Pfam annotation: Domain name=Helicase_C; Domain location=220-313; Score=65.0; E_value=2.8e-16; Accession=PF00271.23; Description =Helicase conserved C-terminal domain
  Pfam module annotation: Pfam domain module=DUF1605::HA2::Helicase_C; Domain location=543-680::376-509::220-313
FDVIPPAVKVPVRQFPVTVHFSKRTHDDYLGQAYKKVMSIHKRLPPGGILVFVTGQREVDYLCKKFRRASKVQTAKKPEKVDGDDNGPFPEVDDKEILEAYDIDRNKSEHPDDIFYSYDDDDDMDPGPNSFSSDNETESEMDTDTDDEESVTYETTEEDAPVLSFWKDAENSSVLKASFGALSGISGVPESVEKSSDATSEEKSSPSVSCFSKCTERMPVSHGRLRVLPLYAMLPASQQLQVFQDIPKGERLVVVATNVAETSLTIPGIQYVVDTGKEKVKNYDHATGMSSYEVQWISKASASQRAGRAGRTGPGHCYRLYSAAAYGKDDLFPEFAEPEIKKIPVEGIVLMLKFMGIHKVVNFPFPTPPNKESLVEAERCLKALEALYSHDDYDGKLTPMGKAMAQYPMSPRHSRLLLTVIKILKSQQGFARSNFILGYAAAAASVLSFTNPFLKQLDECDINGESEEHNTNPEANDPCERKRRKKHNAMVREAQEKFSNPSSDALTIARALQFFELSENPVEFCRINSLHLKTMEEMSKLRKQLLRLIFHHSKFCKEFAWNYGDSDDVEQAWRNESSKRPLQMNEEELLGQGICAGWADRVARRNHTYSRASGDDRKVRAIRYQSCALNDTIYLHRSSSVAQVAPELVVYSELLSTKRLYMHGVTTIKPGWLLKYAGSLCTFSAPLEDPKPYYDPMNDQVYCYVSPVFSRHNWQLPLHSLPIKDNTSRLQVFVCALLKGDVLPCLRNAKDFLALSPSFAFGPASQRRVGDLLDRMHIKQKSKIGKKLIDSRAALRDAWNCLYS

SEQ ID NO: 82589 - protein, 907 aa, Setaria italica
  Transcript Sequence Number=SeqID_16615
  Gene Ontology: Mol. function=nucleoside-triphosphatase activity; Biological process=embryonic development ending in birth or egg hatching
  Homolog annotation: Hit_ID=Q9C873; Match level="QueryCoverage=96%, HitCoverage=70%, E-value=0.0, Identity=47%"; Hit description =Helicase, putative
  Pfam annotation: Domain name=DUF1605; Domain location=600-737; Score =78.4; E_value=2.6e-20; Accession=PF07717.8; Description=Domain of unknown function (DUF1605)
  Pfam annotation: Domain name=HA2; Domain location=433-566; Score =54.5; E_value=3.9e-13; Accession=PF04408.15; Description=Helicase associated domain (HA2)
  Pfam annotation: Domain name=Helicase_C; Domain location=277-370; Score=64.8; E_value=3.3e-16; Accession=PF00271.23; Description =Helicase conserved C-terminal domain
  Pfam module annotation: Pfam domain module=DUF1605::HA2::Helicase_C; Domain location=600-737::433-566::277-370
SKSALLTFGTCQNLYVDQQDKIRSGVKIKPEDMISQLKVVLMSATLQLKDFISNRRLFDVIPPAVKVPVRQFPVTVHFSKRTHDDYLGLAYKKVMSIHNRLPPGGILVFVTGQREVDYLCKKFRRASKVQTAKKPEKVDGDDNGPFPEVDDKEIFEAYDIDRNKSEHPDDIFSSYHDDDDMDPGPNSFSSDNETESELDTDTDDEESFTYETTEEDAPVLSFLKDAENSSVLKASFGALSGISGVPESVEKSSDATSEEKSSPSVSCFGKCTERMPVSHGRLRVLPLYAMLPASQQLQVFQDIPKGERLVVVATNVAETSLTIPGIKYVVDTGKEKVKNYDRATGMSSYEVQWISKASASQRAGRAGRTGPGHCYRLYSAAAYGKDDLFPEFAEPEIKKIPVEGIVLMLKFMGIHKVVNFPFPTPPNKESLVEAERCLKALEALYSHDDYDGKLTPMGKAMAQYPMSPRHSRLLLTVIKILKSQQGFARSNFILGYAAAAASALSFTNPFLKQLDESDINGESEEHNTNPEANDPCERKRRKKHNAMVREAQEKFSNPSSDALTIARALQFFELSENPVEFCRINSLHLKTMEEMSKLRKQLLRLIFHHSKFCKEFAWNSGDSDDVEQAWRNESSKRPLQMNEEELLGQGICAGWADRVARRNHTYSRASGDDRKVRAIRYQSCALNDTIYLHRSSSVAQVAPELVVYSELLSTKRLYMHGVTTIKPGWLLKYASSLCTFSAPLEDPKPYYDPVNDQVYCYVSPVFSRHNWQLPLHSLPIKDNTSRLQVFVCALLKGDVLPCLRNAKDFLALSPSFVFGPASQRRVGDLLDRMHIKQKSKIGKKLIDSRAALRDAWNADPNFLYPEIKAWYQDKFHSQFDLKWEQMHQEVLLEGHELFPKRSKKVKG

SEQ ID NO: 82590 - protein, 227 aa, Setaria italica
  misc_feature (139)..(139): Xaa can be any naturally occurring amino acid
  Transcript Sequence Number=SeqID_16616
  Gene Ontology: Mol. function=protein serine/threonine kinase activity; Cellular component=integral to membrane; Biological process=protein amino acid phosphorylation
  Homolog annotation: Hit_ID=B9SE04; Match level="QueryCoverage=90%, HitCoverage=33%, E-value=3e-83, Identity=73%"; Hit description =Kinase, putative
  Pfam annotation: Domain name=Pkinase; Domain location=2-208; Score= -9.7; E_value=6.5e-08; Accession=PF00069.17; Description=Protein kinase domain
  Pfam annotation: Domain name=Pkinase_Tyr; Domain location=1-208; Score=-88.1; E_value=7.2e-08; Accession=PF07714.9; Description =Protein tyrosine kinase
  Pfam module annotation: Pfam domain module=Pkinase::Pkinase_Tyr; Domain location=2-208::1-208
LEQPLMVYEFIPNGTLADHLYGGKSRPPLPWRQRLAIAQQTAEGIAYLHFAAMPPIYHRDIKSSNILLDDRLDGKVSDFGLSRLAEQGLSHVSTCAQGTLGYLDPEYYRNYQLTDKSDVYSFGVVLLELLTSKRAIDLXRGADDVNLAVHAQRAADDERLMDVVDPAMKEGATQLELDTMKALGFLALGCLEERRQNRPSMKEVAEEIEYIINIEAGGHPIEQQHST

SEQ ID NO: 82591 - protein, 134 aa, Setaria italica
  Transcript Sequence Number=SeqID_16617
NLFFFVSLAAGRRNKKARKQGEGGGRPAEHSIIKLACSARPGHSRANHPLSVTPLQNTASCGAPEPKSRDRSQSHHHPGSQSHRIPPPLWLAGRPRALTRPPPGSGAALIKTPRPGACSSHSFGCSALSPRGLR

SEQ ID NO: 82592 - protein, 501 aa, Setaria italica
  Transcript Sequence Number=SeqID_16618
  Gene Ontology: Mol. function=protein serine/threonine kinase activity; Cellular component=cell surface; Biological process =protein amino acid phosphorylation
  Homolog annotation: Hit_ID=O82103; Match level="QueryCoverage=93%, HitCoverage=55%, E-value=1e-127, Identity=49%"; Hit description=S -domain receptor-like protein kinase
  Pfam annotation: Domain name=PAN_1; Domain location=28-102; Score =3.3; E_value=0.092; Accession=PF00024.18; Description=PAN domain
  Pfam annotation: Domain name=PAN_2; Domain location=28-89; Score =77.4; E_value=5.1e-20; Accession=PF08276.3; Description=PAN-like domain
  Pfam annotation: Domain name=Pkinase; Domain location=186-458; Score =188.0; E_value=2.7e-53; Accession=PF00069.17; Description=Protein kinase domain
  Pfam annotation: Domain name=Pkinase_Tyr; Domain location=187-458; Score=106.6; E_value=8.3e-29; Accession=PF07714.9; Description =Protein tyrosine kinase
  Pfam module annotation: Pfam domain module=PAN_1::PAN_2::Pkinase::Pkin ase_Tyr; Domain location=28-102::28-89::186-458::187-458
RDPTPQSQGEWALGNTASGCARRTVLECPSDGFLKMPYAVQLPNGSAEAAAGARSDKACAVACQRDCSCTAYLYDGAKCLVWNGELVNLRRLPSNDQGDQGVAGAVLHLRVAASEAPPPAAVAHSWRKSMVILSSSVSVVVLLLACLIIFVAVAVVLRKRRGKGKVTAVQGSLLLFDYQAVKAATRDFTEKLGSGSFGSVYKGVLPDKTLVAVKKLDGLRQGDKQFRAEVVTLGMIHHINLVRLRGFCSEGNKRALVYDYMPNGSLDAYLFKNSSGSKFLSWSQRFGIAVGVARGLAYLHEKCRECIIHCDIKPENILLDEELGAKLADFGMAKLVGHEFSRVLTTMRGTMGYLAPEWLAGAPVTAKADVYSFGLLLFELVSGRRNNGSSEEGGRSAVYFPVHAAVKLHAGDVVGLLDEKLAGDAYVEELERVCKVACWCIQDDEGDRPTMGLVVQQLEGVTDVGLPPIPSRLHMLATANGCAGGVAEDEPKNGSKLATEV

SEQ ID NO: 82593 - protein, 182 aa, Setaria italica
  misc_feature (16)..(16): Xaa can be any naturally occurring amino acid
  Transcript Sequence Number=SeqID_16619
  Gene Ontology: Mol. function=hydrolase activity; Biological process =metabolic process
  Homolog annotation: Hit_ID=B6TNR9; Match level="QueryCoverage=100%, HitCoverage=74%, E-value=9e-87, Identity=90%"; Hit description =Isochorismatase hydrolase
  Pfam annotation: Domain name=Isochorismatase; Domain location=12-178; Score=-43.5; E_value=0.0047; Accession=PF00857.12; Description =Isochorismatase family
RIPFQTDGELVLPPRXAGLVLVDLCNGFCTVGAGNLAPVAPNKQIEKMVGEAARLSKVFCDRNWPIFAFLDTHYTDKPEPPYPPHCIIGNGEENFVPDLEWLEKEPNVTVKRKSCIDGYISCIEKDGSSVFADWIGKYQIKTVLVLGICTDICVLDFASSTLAARNIDRVRPLQDVVIYSEG

SEQ ID NO: 82594 - protein, 44 aa, Setaria italica
  Transcript Sequence Number=SeqID_16620
TVVLDECYTVLKDYRGKIETELTKICDGILKLLESHLGLGAVEG

SEQ ID NO: 82595 - protein, 124 aa, Setaria italica
  Transcript Sequence Number=SeqID_16621
  Gene Ontology: Mol. function=protein domain specific binding; Cellular component=cytoplasm; Biological process=response to stress
  Homolog annotation: Hit_ID=Q7XTE8; Match level="QueryCoverage=86%, HitCoverage=40%, E-value=3e-56, Identity=98%"; Hit description=14-3 -3-like protein GF14-B
  Pfam annotation: Domain name=14-3-3; Domain location=1-119; Score =85.3; E_value=2.1e-22; Accession=PF00244.12; Description=14-3-3 protein
YLKMKGDYYRYLAEFKTGSERKDAAENTMVAYKAAQDIALAELSPTHPIRLGLALNFSVFYYEILNSPDRACNLAKQAFDEAISELDTLSEESYKDSTLIMQLLRDNSPLGASLISSAASSVMS

SEQ ID NO: 82596 - protein, 57 aa, Setaria italica
  Transcript Sequence Number=SeqID_16622
  Gene Ontology: Mol. function=protein domain specific binding; Cellular component=cytoplasm; Biological process=negative regulation of ubiquitin-protein ligase activity during mitotic cell cycle
  Homolog annotation: Hit_ID=Q7XTE8; Match level="QueryCoverage=75%, HitCoverage=16%, E-value=9e-15, Identity=95%"; Hit description=14-3 -3-like protein GF14-B
MLMLPPLQLQAFDEAISELDTLSEESYKDSTLIMQLLRDNLTLWTSDISVRPSISQI

SEQ ID NO: 82597 - protein, 97 aa, Setaria italica
  Transcript Sequence Number=SeqID_16623
  Gene Ontology: Mol. function=protein domain specific binding; Cellular component=cytoplasm; Biological process=response to stress
  Homolog annotation: Hit_ID=Q7XTE8; Match level="QueryCoverage=48%, HitCoverage=17%, E-value=3e-18, Identity=89%"; Hit description=14-3 -3-like protein GF14-B
NQDIALAELPPTHPIRLGLALNFSVFYYEILNSPDRACSLAKQVCFSAQFDVWLVYFLCGSGMFVYGIAGLLSMICCNCMIICHKTIVNCAVRKTWA

SEQ ID NO: 82598 - protein, 262 aa, Setaria italica
  Transcript Sequence Number=SeqID_16624
  Gene Ontology: Mol. function=protein domain specific binding; Cellular component=cytoplasm; Biological process=response to stress
  Homolog annotation: Hit_ID=Q43470; Match level="QueryCoverage=100%, HitCoverage=100%, E-value=1e-143, Identity=94%"; Hit description=14 -3-3-like protein B
  Pfam annotation: Domain name=14-3-3; Domain location=9-246; Score =507.6; E_value=1.7e-149; Accession=PF00244.12; Description=14-3-3 protein
MSQPAELSREENIYMAKLAEQAERYEEMVEFMEKVAKAVDSEELTVEERNLLSVAYKNVIGARRASWRIISSIEQKEEGRGNEDRVTLIKDYRSKIEVELTKICDGILKLLDSHLVPSSTAPESKVFYLKMKGDYYRYLAEFKTGSERKDAAENTMVAYKAAQDIALAELSPTHPIRLGLALNFSVFYYEILNSPDRACNLAKQAFDEAISELDTLSEESYKDSTLIMQLLRDNLTLWTSDITEDAAEEIKEAPKGESGDGQ

SEQ ID NO: 82599 - protein, 265 aa, Setaria italica
  misc_feature (21)..(21): Xaa can be any naturally occurring amino acid
  misc_feature (67)..(67): Xaa can be any naturally occurring amino acid
  misc_feature (205)..(205): Xaa can be any naturally occurring amino acid
  misc_feature (254)..(254): Xaa can be any naturally occurring amino acid
  Transcript Sequence Number=SeqID_16625
  Gene Ontology: Mol. function=protein domain specific binding; Cellular component=cytoplasm; Biological process=response to stress
  Homolog annotation: Hit_ID=Q7XTE8; Match level="QueryCoverage=99%, HitCoverage=99%, E-value=1e-129, Identity=90%"; Hit description=14-3- 3-like protein GF14-B
  Pfam annotation: Domain name=14-3-3; Domain location=8-248; Score =483.9; E_value=2.3e-142; Accession=PF00244.12; Description=14-3-3 protein
MASAELSREENVYMAKLAEQXAERYEEMVEFMEKVAKTVDSEELTVEERNLLSVAYKNVIGARRASXWRIISSIEQKEEGRGNEDRVTLIKDYRGKIETELTKICDGILKLLESHLVPSSTAPESKVFYLKMKGDYYRYLAEFKTGAERKDAAENTMVAYKAAQDIALAELPPTHPIRLGLALNFSVFYYEILNSPDRACSLDKXRAFDEAISELDTLSEESYKDSTLIMQLLRDNLTLWTSDISEDPAEEIRXRAPKHDSSEGQ

SEQ ID NO: 82600 - protein, 68 aa, Setaria italica
  Transcript Sequence Number=SeqID_16626
MATAAAAAETTGSAPEKEVVQKKVELMKEAVYQKAGNIFFRKSVKSVVTTEQKQLDLAKARLSKLNQA

SEQ ID NO: 82601 - protein, 86 aa, Setaria italica
  Transcript Sequence Number=SeqID_16627
MATAAAAAETTGSAPEKEVVQKKVELMKEIRAHEVAIAELDNLHPSRAVYQKAGNIFFRKSVKSVVTTEQKQLDLAKARLSKLNQA

SEQ ID NO: 82602 - protein, 61 aa, Setaria italica
  misc_feature (31)..(61): Xaa can be any naturally occurring amino acid
  Transcript Sequence Number=SeqID_16628
LVLVKWCPPVFDESMGGKSCQLIPKKKKKKXXXXXXXXXXXXXXXXXXXXXXXXXXXXXXX

SEQ ID NO: 82603 - protein, 53 aa, Setaria italica
  Transcript Sequence Number=SeqID_16629
MCCSGDNCCLLKCCGKLLLFLLSAGLFVLIYWAIFQPHQIRATVGSATLSNLT

SEQ ID NO: 82604 - protein, 47 aa, Setaria italica
  Transcript Sequence Number=SeqID_16630
HPSTPSGSTTILRILPVSNHYPRPSYALTNYRDAYFLIRSGTITLDV

SEQ ID NO: 82605 - protein, 142 aa, Setaria italica
  misc_feature (80)..(80): Xaa can be any naturally occurring amino acid
  Transcript Sequence Number=SeqID_16631
  Gene Ontology: Cellular component=exocyst; Biological process=vesicle docking during exocytosis
  Homolog annotation: Hit_ID=B9RRM4; Match level="QueryCoverage=88%, HitCoverage=18%, E-value=2e-41, Identity=68%"; Hit description =Exocyst componenet sec8, putative
DKKAKKLLGRKNKHLGQLWYRSLTLRHVLSLLDQVEDVAKVPARIENLMAEKQLYAAVQLHVQSMLMLEREGLQAQYHTXKTLKVGALQDVRSDLTKLRGVLFYKILEELHGHLYNNGEYSSVTLSMADSEDVPASTAAGRV

SEQ ID NO: 82606 - protein, 252 aa, Setaria italica
  Transcript Sequence Number=SeqID_16632
  Gene Ontology: Cellular component=exocyst; Biological process=vesicle docking during exocytosis
  Homolog annotation: Hit_ID=Q93YU5; Match level="QueryCoverage=65%, HitCoverage=16%, E-value=2e-42, Identity=52%"; Hit description =Probable exocyst complex component 4
FSVAFSLSVVQSECQQLLCEILRATPEAATADAAVQTARLANKDPVKEKRDGSEGLSFAFRITDSATSVPNEGQGWRRNSNVPQEGYGTASVIPDQGIFLAASVYRPVFEFMNKIGSMLPQKYSQLGSDGLLAFVDNFLKEHFLPAIFVDYRKCVQQAISRDPRFMSIRREKKIYKEEVKSSPPTHPHPPPGYKAVTCSPARRTQCFNDQNSLTEAHRVHGLQLSTTRCSHLLLIGRQTRMRSVCAELILRP

SEQ ID NO: 82607 - protein, 117 aa, Setaria italica
  Transcript Sequence Number=SeqID_16633
  Gene Ontology: Cellular component=exocyst; Biological process=vesicle docking during exocytosis
  Homolog annotation: Hit_ID=B9RRM3; Match level="QueryCoverage=96%, HitCoverage=29%, E-value=1e-24, Identity=56%"; Hit description =Exocyst componenet sec8, putative
KLQAVLEKQSYILLSRNDVESLMRLEPANIYLQNSTSQPDNNVTDAEAVEVEIELSDLLLDMCPIKQENLIHDDQKLILLASLSDSLEYLADSVERLGESFISPPTANHSQHGQHTR

SEQ ID NO: 82608 - protein, 84 aa, Setaria italica
  misc_feature (16)..(16): Xaa can be any naturally occurring amino acid
  Transcript Sequence Number=SeqID_16634
  Gene Ontology: Cellular component=exocyst; Biological process=vesicle docking during exocytosis
TLCRSDGLLAFVDNFXLKEHFLPAIFVDYRKCVQQAISRDPRFMSIRREKNLQRRGQKFPPTHPHPPPGYKAVTCSPDSTATTN

SEQ ID NO: 82609 - protein, 1056 aa, Setaria italica
  Transcript Sequence Number=SeqID_16635
  Gene Ontology: Mol. function=PDZ domain binding; Cellular component =exocyst; Biological process=vesicle docking during exocytosis
  Homolog annotation: Hit_ID=Q93YU5; Match level="QueryCoverage=99%, HitCoverage=99%, E-value=0.0, Identity=59%"; Hit description =Probable exocyst complex component 4
  Pfam annotation: Domain name=Sec8_exocyst; Domain location=2-158; Score=27.9; E_value=1.7e-07; Accession=PF04048.6; Description=Sec8 exocyst complex component specific domain
MSRSGHRRGIFDGLPIPADKSYLKEGLSRIDEGWAAARFDSLPHVVHILTSKDRDGEIQFLKEQSDLIEDVVDEVVHAYHHGFNKAIQNYSQILRLFSESADSITGLKGEMAEAKKLLGRKNKHLGQLWYRSLTLRHVLSLLDQVEDVAKVPARIENLMAEKQLYAAVQLHVQSMLMLEREGLQAVGALQDVRSDLTKLRGVLFYKILEELHGHLYNNGEYSSVTLSMADSEDVPASTAAGRVLNSMQPLSRRTRSIKGDNHISGAVAADGFPKTSSIDGGSSFDGPDDDSSLDMRESDGRSRKDSKSISRQIPIFLSCAAPDEFIDSMIKADAPLNVKYLRTLVQCLSMLGKVAAAGAVICQRVRPTIHDVITSKIKAYSEEASKSSTDKAAKRTSDASHSDGPIPRFQMLKQKTKNGASVMAAQLVVSPISPAMAPTGDAQRAATQLLRSIFECLLDILENHIIVGDLLEQKSTSEVDNINTPHIVNGDASWNPDSESSQATGGFSVAFSLSVVQSECQQLLCEILRATPEAATADAAVQTARLANKDPVKEKRDGSEGLSFAFRITDSATSVPNEGQGWRRNSNVPQEGYGTASVIPDQGIFLAASVYRPVFEFMNKIGSMLPQKYSQLGSDGLLAFVDNFLKEHFLPAIFVDYRKCVQQAISSPAAFRPRVHATSVYDSLVELGRPVLQGLLAVDIIAKEVLGWVQLMPNYATELVEYVRTFLERTHERCRASYMEAVLEKQSYILLSRNDVESLMRLEPANIYLQNSTSQPDNNVTDAEAVEVEIELSDLLLDMCPIKQENLIHDDQKLILLASLSDSLEYLADSVERLGESFISPPTANHSQHGQHTRSSSAIPKGLASLANEYRRLAIDCVRVLRLEMQLEAVYHMQEMTKREYIEDQDAEDPDDFIISLTTQIARRDEEMAPYITESKRNYVFGGISSVAANASIKALAQMKSINLLGVQQICRNSIALEQALAAIPSIDSEAVQQRLDRVRTFYELLNLPFESLLGFIAEHEYLFSAKEYLSVLKVNVPGREIPMDAERRISQILGH

SEQ ID NO: 82610 - protein, 125 aa, Setaria italica
  Transcript Sequence Number=SeqID_16636
  Gene Ontology: Mol. function=sucrose synthase activity; Biological process=sucrose metabolic process
  Homolog annotation: Hit_ID=B9T3H2; Match level="QueryCoverage=93%, HitCoverage=14%, E-value=6e-31, Identity=57%"; Hit description =Sucrose synthase, putative
LVFQNSTYEYESVIKLNFNKGRAQDDNSLEVDFGALDDLSTPRLTLPSSIGNGMHFVSRFMSSKLAGTTMSMKPLLDYLLALTHRGHDLMVNATLDTVSKLQTALLHADVFLAGLHGDTPYQKFE

SEQ ID NO: 82611 - protein, 85 aa, Setaria italica
  Transcript Sequence Number=SeqID_16637
MAEPTLHAPAAPDPFADLPFPEFQAPVDGDDFAFEDFDLEDLDLDVDFDLDLFASDGQLSQPPPLATSSSSAGSPEGGSSSSGGG

SEQ ID NO: 82612 - protein, 111 aa, Setaria italica
  Transcript Sequence Number=SeqID_16638
  Subcellular localization annotation: CTP_CleavageSite=90; ConfidenceScore=5.24e-01
ISSSSWETDSSNFSVGHLHPLSHTNHFLLFCFLCSPSGRAAAVAGLASFQIHITPRHLPPYFSPSSRTPRRRRTLMDAAELPLVYHIGLVLAALWAAGALGIRHSFLFLLA

SEQ ID NO: 82613 - protein, 247 aa, Setaria italica
  misc_feature (208)..(208): Xaa can be any naturally occurring amino acid
  misc_feature (233)..(233): Xaa can be any naturally occurring amino acid
  misc_feature (244)..(244): Xaa can be any naturally occurring amino acid
  Transcript Sequence Number=SeqID_16639
  Gene Ontology: Mol. function=ATPase activity, coupled to transmembrane movement of substances; Cellular component=integral to membrane; Biological process=transport
  Homolog annotation: Hit_ID=Q6UC91; Match level="QueryCoverage=99%, HitCoverage=64%, E-value=1e-102, Identity=53%"; Hit description=P -glycoprotein 1
EKQTYNIHYMATFVAGFVVGFTAAWQLALVTLAVVPLIAVIGGLSAAALSKLSARSQDALSGASAIAEQALAQIRIVQAFVGEDRAMRAYSAALAVAQKIGYRSGVAKGLGLGGTYFTVFCCYGLLLWYGGHLVRAHRTNGGLAIATMFSVMIGGIALGQSAPSMAAFAKARVAAAKIFRIIDHKPGISRDGQVELESVTGRVEMRGXDFAYPTRPDVPILRAFSLTVPAGKXIALVGSSGSGXAPS

SEQ ID NO: 82614 - protein, 96 aa, Setaria italica
  Transcript Sequence Number=SeqID_16640
  Gene Ontology: Mol. function=serine-type endopeptidase activity; Cellular component=cell wall; Biological process=negative regulation of catalytic activity
  Homolog annotation: Hit_ID=Q9ZUF6; Match level="QueryCoverage=98%, HitCoverage=12%, E-value=1e-14, Identity=47%"; Hit description =Putative subtilisin serine protease
  Subcellular localization annotation: CTP_CleavageSite=71; ConfidenceScore=5.65e-01
YFRDTVAVGAFGAAAAGVFVSCSAGNSGPSGATVSNSAPWVATVGAGTLDRDFPAYVTLPTGARLAGVSLYAGTSPSPRPAMLPLVYGGGRDNASK

SEQ ID NO: 82615 - protein, 129 aa, Setaria italica
  misc_feature (10)..(10): Xaa can be any naturally occurring amino acid
  Transcript Sequence Number=SeqID_16641
  Gene Ontology: Mol. function=magnesium ion binding; Biological process=metabolic process
  Homolog annotation: Hit_ID=B6SHD2; Match level="QueryCoverage=99%, HitCoverage=23%, E-value=9e-32, Identity=55%"; Hit description =Terpene synthase 6
  Pfam annotation: Domain name=Terpene_synth; Domain location=9-129; Score=3.9; E_value=1.2e-08; Accession=PF01397.13; Description =Terpene synthase, N-terminal domain
PRPYHPSPWXDFFLGHQPCTPAELLAMMEEARTKEEELRRAVLAAAASPDLAVKLELVDALQRIGVDYRFGEEINGLLGAVVHDADEDDGGGDLYLTSLRFYLLRKHGFNVTSDVFAKFRDEEGNFATG

SEQ ID NO: 82616 - protein, 81 aa, Setaria italica
  Transcript Sequence Number=SeqID_16642
  Gene Ontology: Mol. function=protein serine/threonine kinase activity; Cellular component=plasma membrane
  Homolog annotation: Hit_ID=Q7XUH4; Match level="QueryCoverage=100%, HitCoverage=7%, E-value=6e-28, Identity=77%"; Hit description =OSJNBa0020J04.8 protein
LKRQLQRGAVAELLEPGLLELDPESSEWEEFLLGIKVGLLCTAQDPLDRPAMGDVVFMLEGCRVGPDIPSSADPTSQPSPA

SEQ ID NO: 82617 - protein, 54 aa, Setaria italica
  Transcript Sequence Number=SeqID_16643
  Gene Ontology: Mol. function=lipid binding; Biological process=lipid transport
  Homolog annotation: Hit_ID=B6TLU5; Match level="QueryCoverage=100%, HitCoverage=45%, E-value=8e-12, Identity=68%"; Hit description=Lipid binding protein
MELQARCLCVVAMLVVAGLAGMETAHGAGECGRVPVDQVALKLAPCAAATQNPR

SEQ ID NO: 82618 - protein, 50 aa, Setaria italica
  Transcript Sequence Number=SeqID_16644
  Homolog annotation: Hit_ID=B6T589; Match level="QueryCoverage=78%, HitCoverage=9%, E-value=3e-11, Identity=82%"; Hit description =Calmodulin binding protein
MRSLRSAFHLDQRQAGSKQQKSTNLQGPELDDNHWGSNWLDRWMAVRPWE

SEQ ID NO: 82619 - protein, 419 aa, Setaria italica
  Transcript Sequence Number=SeqID_16645
  Homolog annotation: Hit_ID=B6T589; Match level="QueryCoverage=99%, HitCoverage=96%, E-value=1e-161, Identity=69%"; Hit description =Calmodulin binding protein
  Pfam annotation: Domain name=IQ; Domain location=104-124; Score=25.1; E_value=0.00029; Accession=PF00612.19; Description=IQ calmodulin -binding motif
  Pfam annotation: Domain name=IQ; Domain location=126-146; Score=18.7; E_value=0.025; Accession=PF00612.19; Description=IQ calmodulin -binding motif
  Pfam annotation: Domain name=IQ; Domain location=152-172; Score=5.3; E_value=8.3; Accession=PF00612.19; Description=IQ calmodulin-binding motif
  Pfam module annotation: Pfam domain module=IQ::IQ::IQ; Domain location=104-124::126-146::152-172
MGISSKWIKSLVGIRKQEKGHNAEKQQKGQNAESSETRSSSDQSLHKRKHSLDPEGALAVEEIPVQSEALTDGNGIQTISNTICPNSTSLDVHVSQAEHESKEDMAATVIQSAFRAFLAKRALRALKGIVLLQALVRGHAVRRQTEETLQCMQALVKAQARVRARQVRVALENQVARKKIPEQDDHENHVREVEGGWCGSIGSMEEMQAKALKRQEAAAKRERAMAYALTHQRQAGSKQQKSTNLQGPELDDNHWGSNWLDRWMAVRPWENRLLDSNAKESMPNHEDKQDEETKSQITPKGKVPTLNTPPGPSKKKCVNHKKSYSDVSCTSFARPANVLPSTSLGSSKQKAKVTDEVFEEVSSQPTDVASKAMRNPKDKLEQANTPAKKRLSLPNNVGREAGKGPTRRNSMNRSDPKAS

SEQ ID NO: 82620 - protein, 103 aa, Setaria italica
  Transcript Sequence Number=SeqID_16646
  Homolog annotation: Hit_ID=Q67UK6; Match level="QueryCoverage=87%, HitCoverage=47%, E-value=1e-22, Identity=71%"; Hit description=NHL repeat-containing protein-like
WSELVAGPRWKTFIRRFGRSGPPTRPHHHFGGRKLNYDALSYALNFDEGHGASPEGDYTGYRDFSARFVGPPASAKSSMDLGGRDAPPLFNPPPPSHDGAGRA

SEQ ID NO: 82621 - protein, 77 aa, Setaria italica
  Transcript Sequence Number=SeqID_16647
  Gene Ontology: Cellular component=plasma membrane
  Homolog annotation: Hit_ID=B6T0Q4; Match level="QueryCoverage=63%, HitCoverage=54%, E-value=3e-12, Identity=68%"; Hit description =Negatively light-regulated protein
  Pfam annotation: Domain name=Lg106; Domain location=20-77; Score =23.2; E_value=3.1e-05; Accession=PF07844.3; Description=Lg106-like protein
MAGGDGAKSSASMEEEACVEKKYGGIAPKKPLISKDHERAYFDSADWVLGKVREEENKMLTPIFRRGTLHRQSSSCI

SEQ ID NO: 82622 - protein, 194 aa, Setaria italica
  Transcript Sequence Number=SeqID_16648
  Subcellular localization annotation: CTP_CleavageSite=47; ConfidenceScore=5.49e-01
FTPTIPDQPSIYPSSASSPSCLRAVPPAAAMRSLHERLRWKRRSACEGAAGGEGFSSAWASETQQQPLCCYLQLACRAPSLLNRSRRARGPWISKASWVQFLRTSSQRMPLPPWRPMTWLHRRLPSRALALLPFQSPLPATCGALCRKTERKEARVLQRGKPVYIELVRGSGGIRKTSRAAAQNARTTARRFPS

SEQ ID NO: 82623 - protein, 156 aa, Setaria italica
  Transcript Sequence Number=SeqID_16649
  Gene Ontology: Mol. function=potassium ion transmembrane transporter activity; Cellular component=integral to membrane; Biological process=potassium ion transport
  Homolog annotation: Hit_ID=Q84MS3; Match level="QueryCoverage=100%, HitCoverage=19%, E-value=1e-62, Identity=74%"; Hit description =Probable potassium transporter 16
IAKAHEICVVLVMVITTLLMTIVMLLVWKVNIWWIAIFFVVFMSTESVYTAAVLYKFTHGPYVPLAISAVLMLIMIVWHYVHVKRYKYELENTVSRDEVKDLLERRDLKRVPGLGLFYTELVQGIPPIFPHLIEKIPTIHSVIVFITVKHLPIPHV

SEQ ID NO: 82624 - protein, 84 aa, Setaria italica
  Transcript Sequence Number=SeqID_16650
GIKLMFLRVLPPNWLLALSQYLALLIANVLKDVSWMDRKRAAPHFFNSNTSRLRKVVWREPIDSWKASYAGVIKIHTSAKCMTS

SEQ ID NO: 82625 - protein, 558 aa, Setaria italica
  Transcript Sequence Number=SeqID_16651
  Gene Ontology: Mol. function=nucleotide binding; Biological process =defense response
  Homolog annotation: Hit_ID=Q6R2Q1; Match level="QueryCoverage=97%, HitCoverage=43%, E-value=1e-174, Identity=55%"; Hit description=NBS -LRR-like protein B
  Pfam annotation: Domain name=NACHT; Domain location=194-345; Score= -28.0; E_value=0.012; Accession=PF05729.4; Description=NACHT domain
  Pfam annotation: Domain name=NB-ARC; Domain location=174-455; Score =202.8; E_value=9.3e-58; Accession=PF00931.14; Description=NB-ARC domain
  Pfam module annotation: Pfam domain module=NACHT::NB-ARC; Domain location=194-345::174-455
MATILFSFAGSCIQKLQELIIEEAIQILGVKQELSDLQRTMTQIQCFLKDADRRRIEDLAVSNWIGELKDAMYDADDIIDMVRFKGSNLLGENSSSLSRKLITCNGFATFSCFSNLKTRHEIAVQIRGLNKRIEMIKELGTNFKFETEPIDRVLVSNMRKTSHLVEPNLVGKEIIHATNRLVGLVLEHRDKKAYKMAIVGTGGVGKTTLAQKIYNDQRVKGNFKKYAWICVSQQYSQVALLNEILRNVGVDKKNCESIGELQAKLAEAIEGDSFFLVLDDLWEFDVWTNLLRTPLNASTQVTIVTTARHDTVAKAIGVEHMHRVELMSEEVGWELLWKSMNISDEKEVHNVQDKGMEIVRKCGGLPLAIRTMASVLAVKETTESEWQKILDNDAWSMSKLPAELRGALYLSYDQLPQNLKQCFLYCALYPEDWTLCRDDLVRLWVAEGFIEKQKNQLLEDTAEEYFYELVSRNLLLPDPQYADSYRCKMHDLLRQLAQHLSREECFFGDPQSLEGRSISKLRRVSVVTGNDMISLPIVDRHQLKVRISINFCGKSLVV

SEQ ID NO: 82626 - protein, 161 aa, Setaria italica
  misc_feature (106)..(106): Xaa can be any naturally occurring amino acid
  misc_feature (135)..(135): Xaa can be any naturally occurring amino acid
  Transcript Sequence Number=SeqID_16652
  Gene Ontology: Mol. function=nucleotide binding; Biological process =defense response
  Homolog annotation: Hit_ID=Q2QZS8; Match level="QueryCoverage=91%, HitCoverage=15%, E-value=2e-37, Identity=55%"; Hit description=NB -ARC domain containing protein
  Pfam annotation: Domain name=LRR_1; Domain location=119-141; Score =13.5; E_value=0.78; Accession=PF00560.25; Description=Leucine Rich Repeat
  Pfam annotation: Domain name=LRR_1; Domain location=96-117; Score =9.8; E_value=4.1; Accession=PF00560.25; Description=Leucine Rich Repeat
  Pfam module annotation: Pfam domain module=LRR_1::LRR_1; Domain location=119-141::96-117
LTKNTFSNRQENNTCKMYDLLRQLAQHLSREECFFGDPQSLEGRTITKLRRVSVITGNDMISLPIVDSYQLKVRISINFCGKSLVDESSIFKQFPYIRVLDLSGSXVENIPDYIGSLIHLRLLNLNDTSITCLPXESIGSLKNLEVPVLTCSLILQNNSVI

SEQ ID NO: 82627 - protein, 86 aa, Setaria italica
  Transcript Sequence Number=SeqID_16653
  Gene Ontology: Mol. function=tetracycline:hydrogen antiporter activity; Cellular component=integral to membrane; Biological process=response to antibiotic
  Homolog annotation: Hit_ID=B6SKE4; Match level="QueryCoverage=89%, HitCoverage=15%, E-value=1e-21, Identity=63%"; Hit description =Carbohydrate transporter/ sugar porter/ transporter
DYFFLFNQLTQDQRATANGLATTLMSFCKALGPVGGGIVFSWAQKCQHAFFLQGDQMLFFVMDIITFLVLIWTFKPFLALPEQSSY

SEQ ID NO: 82628 - protein, 53 aa, Setaria italica
  Transcript Sequence Number=SeqID_16654
VPVLTCSLILQNNSVIFFLFNQLTQDQRATANGLATTLMSFCKALGPVGGGIV

SEQ ID NO: 82629 - protein, 521 aa, Setaria italica
  Transcript Sequence Number=SeqID_16655
  Gene Ontology: Mol. function=nucleotide binding; Biological process =defense response
  Homolog annotation: Hit_ID=Q2QZS8; Match level="QueryCoverage=98%, HitCoverage=52%, E-value=1e-134, Identity=50%"; Hit description=NB -ARC domain containing protein
  Pfam annotation: Domain name=LRR_1; Domain location=114-136; Score =9.1; E_value=5.5; Accession=PF00560.25; Description=Leucine Rich Repeat
  Pfam annotation: Domain name=LRR_1; Domain location=138-159; Score =7.1; E_value=13; Accession=PF00560.25; Description=Leucine Rich Repeat
  Pfam annotation: Domain name=LRR_1; Domain location=281-302; Score =7.0; E_value=14; Accession=PF00560.25; Description=Leucine Rich Repeat
  Pfam annotation: Domain name=LRR_1; Domain location=304-326; Score =5.1; E_value=32; Accession=PF00560.25; Description=Leucine Rich Repeat
  Pfam annotation: Domain name=LRR_1; Domain location=395-414; Score =3.7; E_value=59; Accession=PF00560.25; Description=Leucine Rich Repeat
  Pfam annotation: Domain name=LRR_1; Domain location=420-441; Score =2.1; E_value=1.2e+02; Accession=PF00560.25; Description=Leucine Rich Repeat
  Pfam annotation: Domain name=LRR_1; Domain location=68-89; Score =10.6; E_value=2.9; Accession=PF00560.25; Description=Leucine Rich Repeat
  Pfam annotation: Domain name=LRR_1; Domain location=91-112; Score =13.0; E_value=1; Accession=PF00560.25; Description=Leucine Rich Repeat
  Pfam module annotation: Pfam domain module=LRR_1::LRR_1::LRR_1::LRR _1::LRR_1::LRR_1::LRR_1::LRR_1; Domain location=114-136::138-159::281- 302::304-326::395-414::420-441::68-89::91-112
LERSSFFGDPQSLEGRSISKLRRVSVVTGNDMISLPIVDRHQLKVRTSINFCGKSLVVESSIFKRFPYIRVLDLSGSSVENIPDYIGSLIHLRLLNLNDTSITCLPESIGSLKNLEVLELNKCDSLHSLPLAFCRLFNLRSLGLKGSAINKVPKGIGGLKYLNYIEGFPICGRSDYSTAMQDGWNLEELGPLLQLRQLLITKLEASVCSIDSLLTNKKHLKELYLYCTECAEEPYSEEVITNIEKVFDQLMPPKNLQHLYLKGFCGRRFPFWLGTARHLPSLKYLTLKNCKSCVHLPAIRHLPNLKFLRIQGATAVTKIGPEFIGLGVGNFGSPEAVAFPKLEMLSIGYMPNWEEWTFVVEEEEATAAGKEGGEDGAAAKQKGEAPPPRMQLLPRLKGLELYRCPKLRALPRQLGQEATSLKELGLAFMDNINVVENFPFLSEKLSVSYCECLERISNIPQMKLLHVELCPALRCVEGLDKLHQLFLTEDMEDVSSQWLAGLQERHQQLHGEDLDVDTWDE

SEQ ID NO: 82630 - protein, 122 aa, Setaria italica
  misc_feature (7)..(7): Xaa can be any naturally occurring amino acid
  misc_feature (103)..(103): Xaa can be any naturally occurring amino acid
  Transcript Sequence Number=SeqID_16656
  Gene Ontology: Mol. function=4 iron, 4 sulfur cluster binding; Cellular component=nucleus; Biological process=base-excision repair
  Homolog annotation: Hit_ID=B3W6G6; Match level="QueryCoverage=100%, HitCoverage=7%, E-value=1e-31, Identity=52%"; Hit description =Putative transcriptional activator DEMETER
  Subcellular localization annotation: CTP_CleavageSite=37; ConfidenceScore=5.12e-01
DPKDYSXSISSINQRNVQSQSACHAGWTTSSVYTHANQMANAQLLPAHNMQKGVLIDLNNSSLNQIPNEHTNFADSPAQFFQYRVREMVEPNPLLELHDGIPXKNVPDINSSIILLQSIPTD

SEQ ID NO: 82631 - protein, 98 aa, Setaria italica
  Transcript Sequence Number=SeqID_16657
HHDNKTKPLKQKVTYILWSCYSKMPPSLLRFMHSSIVLDAAKPLPMIPKHSGIAFSYLIVHSLSCSTAHKTLQKTKHSSWHLALCQLSEMETFQQLIM

SEQ ID NO: 82632 - protein, 445 aa, Setaria italica
  Transcript Sequence Number=SeqID_16658
  Gene Ontology: Mol. function=nucleic acid binding; Cellular component= ribonucleoprotein complex
  Homolog annotation: Hit_ID=B9SQV8; Match level="QueryCoverage=44%, HitCoverage=40%, E-value=8e-77, Identity=69%"; Hit description =Heterogeneous nuclear ribonucleoprotein 27C, putative
  Pfam annotation: Domain name=RRM_1; Domain location=116-185; Score =80.3; E_value=6.8e-21; Accession=PF00076.14; Description=RNA recognition motif. (a.k.a. RRM, RBD, o
  Pfam annotation: Domain name=RRM_1; Domain location=8-76; Score=86.7; E_value=8e-23; Accession=PF00076.14; Description=RNA recognition motif. (a.k.a. RRM, RBD, o
  Pfam module annotation: Pfam domain module=RRM_1::RRM_1; Domain location=116-185::8-76
MESDQGKLFIGGISWETTEEKLSEHFSSYGEVTQAAVMRDKLTGRPRGFGFVVFADPAVVDRALQDPHTLDGRTVDVKRALSREEQQATKSANPTGGRNSGGGGGGDAGGARTKKIFVGGLPSTLTEEGFRQYFQTYGVVTDVVVMYDQNTQRPRGFGFITFDSEDAVDRVLHKTFHDLGGKMVEVKRALPREANPGGGGGRSGGGGGYQSNNGHSTNSGGYDGRSDGRYGQAQQGGGGYPGYGAGGYGTGAAGYGYGANPGAGYGNYGAGAYGGVPATYGGPYGNPSAAGSGYQGGPPGSNRGPWGSQAPSAYGAGGYGGNAGYSAWNNSSGGGNAPTSQAPGGAAGYGSQGYGYGGYGGDASYASHGGYGAYGARSDGAGNPATGGASGYGAGYGSGSGNSGYASAWSDPSQGGGFGGSVNGGPEGQSNYGSGYGSVQPRVAQ

SEQ ID NO: 82633 - protein, 110 aa, Setaria italica
  Transcript Sequence Number=SeqID_16659
  Gene Ontology: Mol. function=binding; Cellular component =intracellular; Biological process=RNA processing
  Homolog annotation: Hit_ID=Q9FJ37; Match level="QueryCoverage=100%, HitCoverage=16%, E-value=6e-12, Identity=38%"; Hit description=Cell cycle control crn (Crooked neck) protein-like
PRADAFMRYAGFEEKRGELERARRVFERAADVLADDEEEAGTLLVAFGEFEEEFREVERARAIYQYALDRVPKRRAEQIYGKLLAWEKQFGDPKGIEDAIVARRRLECQD

SEQ ID NO: 82634 - protein, 68 aa, Setaria italica
  Transcript Sequence Number=SeqID_16660
  Gene Ontology: Mol. function=transcription regulator activity; Cellular component=nucleus; Biological process=regulation of transcription
  Homolog annotation: Hit_ID=B6TPF3; Match level="QueryCoverage=88%, HitCoverage=23%, E-value=1e-22, Identity=85%"; Hit description =Protein SPATULA
MNFCLLGQVIGKASVLDEIINYIQSLQCQVEFLSMKLEAVNAHANNGEAFPSKDFAAQTYNTAPGLTI

SEQ ID NO: 82635 - protein, 222 aa, Setaria italica
  Transcript Sequence Number=SeqID_16661
  Gene Ontology: Mol. function=transcription regulator activity; Cellular component=nucleus; Biological process=regulation of transcription
  Homolog annotation: Hit_ID=B6TPF3; Match level="QueryCoverage=92%, HitCoverage=80%, E-value=2e-94, Identity=83%"; Hit description =Protein SPATULA
  Pfam annotation: Domain name=HLH; Domain location=100-150; Score =41.2; E_value=4.2e-09; Accession=PF00010.18; Description=Helix-loop -helix DNA-binding domain
KSGGGRGGGSAGRRKQREAPASEDDSSRIVSTSGGGGGQDLTDSGAKRFKTNKSNDNNGNQRTEAETQTRSAGKGVSKNPPAPEPPKQDYIHVRARRGQATDSHSLAERARREKISERMKVLQDLVPGCNKVIGKASVLDEIINYIQSLQCQVEFLSMKLEAVNAHANNGEAFPSKDFAAQTYNTAPGLTFDTQTPREYAQGTSASEWLHMQIGGGAYERVS

SEQ ID NO: 82636 - protein, 133 aa, Setaria italica
  Transcript Sequence Number=SeqID_16662
LLSTAQIGDRILNNLHRVISDVHTYECIPDQISGIYMGWARSKVHGFSKVVIGTGWDFSQQTVERVMVVEFLDSTGKIETEPVKLLVIGYIRKLQSTDDMLQALSVTDEDRSIARDGLDLPTFSEYAHDLHFP

SEQ ID NO: 82637 - protein, 161 aa, Setaria italica
  misc_feature (14)..(14): Xaa can be any naturally occurring amino acid
  Transcript Sequence Number=SeqID_16663
  Homolog annotation: Hit_ID=Q9LY33; Match level="QueryCoverage=88%, HitCoverage=30%, E-value=2e-24, Identity=39%"; Hit description=BZIP protein
EWQLAIDRIQDKVXASEGIKTLLTVIHAVVIQQAEEQKLKKKSESAFKEFEKKAEELRSLESKYGPYIGAEGYREMSRKSPVADKRAKVEALRSRADEEKSKYEKSIGVTRAMTLNNLQTGLPNVFQAMTGFASVCMEAFQMVYNFKRSSDRILDAKRLLT

SEQ ID NO: 82638 - protein, 111 aa, Setaria italica
  Transcript Sequence Number=SeqID_16664
  Homolog annotation: Hit_ID=Q9SRW5; Match level="QueryCoverage=75%, HitCoverage=49%, E-value=3e-14, Identity=41%"; Hit description =F20H23.7 protein
  Pfam annotation: Domain name=DUF1639; Domain location=34-83; Score =119.5; E_value=1.1e-32; Accession=PF07797.6; Description=Protein of unknown function (DUF1639)
  Subcellular localization annotation: CTP_CleavageSite=16; ConfidenceScore=5.06e-01
SRSSQQQQQAGGAGASSSAKPTPKLELPRIYTTLSRKEKEEDFMAMKGTKLPQRPKRRPKNVEKAVNFICPGTWLTDVTRSRYEVREKKCPKKQQKHRGLKGMESMDSDSD

SEQ ID NO: 82639 - protein, 61 aa, Setaria italica
  Transcript Sequence Number=SeqID_16665
HIDRRESCATIPLCTNGHRCHNIICNYYTVSVQHRQMILWQKRCPFVQRGMVAHIDRRESC

SEQ ID NO: 82640 - protein, 1224 aa, Setaria italica
  Transcript Sequence Number=SeqID_16666
  Gene Ontology: Mol. function=microtubule motor activity; Cellular component=microtubule associated complex; Biological process =microtubule-based movement
  Homolog annotation: Hit_ID=Q7XPJ0; Match level="QueryCoverage=99%, HitCoverage=98%, E-value=0.0, Identity=88%"; Hit description =OSJNBa0087O24.20 protein
  Pfam annotation: Domain name=FERM_M; Domain location=343-459; Score =75.0; E_value=2.7e-19; Accession=PF00373.10; Description=FERM central domain
  Pfam annotation: Domain name=FERM_N; Domain location=242-341; Score =65.1; E_value=2.6e-16; Accession=PF09379.2; Description=FERM N -terminal domain
  Pfam annotation: Domain name=Kinesin; Domain location=854-1170; Score= 531.0; E_value=1.5e-156; Accession=PF00225.15; Description=Kinesin motor domain
  Pfam annotation: Domain name=MyTH4; Domain location=119-233; Score =160.9; E_value=3.8e-45; Accession=PF00784.9; Description=MyTH4 domain
  Pfam annotation: Domain name=Spc7; Domain location=530-801; Score= -141.0; E_value=0.071; Accession=PF08317.3; Description=Spc7 kinetochore protein
  Pfam module annotation: Pfam domain module=FERM_M::FERM _N::Kinesin::MyTH4::Spc7; Domain location=343-459::242-341::854 -1170::119-233::530-801
YDSDGYSFAPPTPSTLSMSIPPELAGAIPLIDRFQVEGFLKAMQKQIHSAGKRGFFSKKSVGPQAREKFTLEDMLCFQKDPIPTSLLKISSDLVSRSIKLFQVILKYMGIDSPAIISLEERIELVAKLYKHTLKRSELRDELFAQISKQTRNNPDRGWSIRAWELMYLCASSMPPSKDIGAYLSEYVHYIAHGATTDSDVRVLALNTLNALKRSVKAGPRVTIPAREEIEALLTSRKLTTIVFFLDETFEEITYDMATTVADAVEELAGIIKLSVYSSFSLFECRKVVNGSKSSEVGNEEYIGLDDNKYIGDLLSEFKSAKDRNKGEILHCKLVFKKRLFRESDEAVTDPMFIQLSYVQLQHDYILGNYPVGRDDAAQLSALQILVEIGFIDNPESCVEWISLLERFLPRQVAITRAKRDWELDIISRYQLMEHLSKDDARQQFLRILRNLPYGNSVFFSVRKIDDPIGLLPGKIILGINKRGVHFFRPVPKEYLHSAELRDIMQFGSSNTAVFFKMRVAGVLHIFQFETKQGEEICVALQTHINDVMLRRYSKARSATSVTSQNDGNQSYKPPNTEMYEKRVQELTKTVEESQKKVDRLREDLQLKTKQETEMQEELEGLRDTLQSERHSLKEVKSELDKIKSLCDEKENALQAALMEKGRLETRLTSGQSRERDTLTTVGSVNSDIEMLTKLKEELKSCQKELDASKEVSKKLMSEKNLLDQKVQRLERMKSEEKSTMEKVYAEECRKLKSQIAELEQKLEVATRSLNMAESNLAVRNSEVDNLQNSLKELDELREFKADVDRKNQQTAEILKRQGAQLVELENLYKQEQVLRKRYYNTIEDMKGKIRVFCRLRPLNDKELSLEEKNIVCSPDEFTIAHPWKDDKSKQHIYDRVFDANTTQEEVFEDTKYLVQSAVDGYNVCIFAYGQTGSGKTFTIYGSDNNPGLTPRATSELFRVIKRDGNKYSFSLKAYMVELYQDNLVDLLLPKNAKQQKLEIKKDSKGVVTVENATVVSISSIEELRAIISRGSERRHTAGTNMNDESSRSHLILSIIIESTNLQTQSYARGKLSFVDLAGSERVKKSGSAGKQLKEAQSINKSLSALADVIGALSSDGQHIPYRNHKLTMLMSDSLGGNAKTLMFVNVSPAESNLEETYNSLMYASRVRCIINDTSKHVAPKEIMRLKKLVAYWKEQAGKRSDEDELEEIQEERASKEKADNRLPG

SEQ ID NO: 82641 - protein, 119 aa, Setaria italica
  Transcript Sequence Number=SeqID_16667
WTHTAAATISDHEIKTASRSHDEDDDFHPTTPIRSNAPESHEETSEKNSSPPPHRAALPSLFDYPPCYLGSPLEHTKNKSAEKKRKKIPKFPDRFLFFNIWPSPSELVSAASARDRGGE

SEQ ID NO: 82642 - protein, 203 aa, Setaria italica
  Transcript Sequence Number=SeqID_16668
  Pfam annotation: Domain name=ENTH; Domain location=1-69; Score=-13.2; E_value=0.00046; Accession=PF01417.12; Description=ENTH domain
REAYKALLLLEHLLTHGPRSVAAEFQKDRDAIDRMASFQHIDEKGFNWGVTVKSKSERVLKLLERGPFLEEERERARKIAREIKGFGSFNLSSASRALEQPQPGEEDGSRGYGRSNSQYEERWRRQDDDCDGDGGRGYGRSNPSQVEERWRQEEGDDGDKENLITRPEPPRVAREVEAEEPHHRHPFHGFGQQRPEAMLLLSQ

SEQ ID NO: 82643 - protein, 93 aa, Setaria italica
  Transcript Sequence Number=SeqID_16669
CPLVSHLKDRLSATELQRCTNFIEHRVQHYKNRPIIYIYTLIRAVTSLASWCHTLSRISMLPLNMGNHTHHRTWQGWLAEIQKYTIKARDKIR

SEQ ID NO: 82644 - protein, 342 aa, Setaria italica
  Transcript Sequence Number=SeqID_16670
  Homolog annotation: Hit_ID=B9RY35; Match level="QueryCoverage=99%, HitCoverage=80%, E-value=1e-114, Identity=56%"; Hit description=Cgi -62, putative
QQQTSSPFDILTPQDVLPIEMARSRFLDLVVDYFISEHVVETVECSSSDFSQVDDKSSKRKQQGVRYEGDPMIALPLMYIANLYETLVSDVNVRLASLIGFREKSIGLALEASGGLYRKLIQRFPKKGPCSFKRRELATSHSTRTKFPELVVQEEKRVRFVVINGLAIIERPDNMRMEDAEWFKRLTGRSEVAICSRDYKFYSPRHKFRRSPQAAFDIPETSIQNQHQSTSKRHIEQLENQPYLHLFHQSEDDTIQQVQHCTQFPPVHQCTSAPHLSDNPQNQQQAYLSQHISCLQVGQGHLGGRMHIIPTSPAKFCDECGSPYLRATSKFCSECGTKRLGM

SEQ ID NO: 82645 - protein, 174 aa, Setaria italica
  Transcript Sequence Number=SeqID_16671
  Homolog annotation: Hit_ID=B6TNU9; Match level="QueryCoverage=99%, HitCoverage=99%, E-value=1e-70, Identity=78%"; Hit description=BSD domain containing protein
  Pfam annotation: Domain name=BSD; Domain location=67-127; Score=63.4; E_value=8.5e-16; Accession=PF03909.9; Description=BSD domain
MAFSAFSWPFRRRGSGSGGGGGASKPAAAAAEECEELGVTPQLLDFLRTLSPDAFKAAALQLQGGYAEATAGDLTSWQERHAVLVLSKAKELAKIRYDLCPRHMKDKQFWRIYFLLAKSYISPYELRAIQKEKIRRMETGNGKSKEVITVEVEMQESKGSRGSQPSEFDLESQS

SEQ ID NO: 82646 - protein, 400 aa, Setaria italica
  Transcript Sequence Number=SeqID_16672
  Gene Ontology: Cellular component=exocyst; Biological process =exocytosis
  Homolog annotation: Hit_ID=B6SVR8; Match level="QueryCoverage=99%, HitCoverage=58%, E-value=1e-162, Identity=70%"; Hit description =Protein binding protein
  Pfam annotation: Domain name=Exo70; Domain location=12-386; Score =568.3; E_value=8.7e-168; Accession=PF03081.7; Description=Exo70 exocyst complex subunit
DNSKWRHLNDKMKKWVHGVKTVVRSLLTGERRLCDQVLAASDDLRDECFVESTKGCIMQIRNFGDAVAVCTRSPEKLSRILDMYEALAEVIPELKELFFGSYGDDVIHDLEGVLERLGDAVKGTLLEFGKVLQQESSRRPMMAGEIHPMTRYVMNYLRLLVVYSDTLDTLLDDTGAGDVDHNPLHNGTDEDEEYLKSLTPLGRRMVKLICYLEANLDEKSKLYEDPALQCIFSMNNILYIVQKVKDSELGRILGDHWIRRRRGKIRQNSKSYLRVSWTRVLSYLRDDGHGSSGSGSFGSSGSSSSRIKEKIKNFNLAFDEIYRSQTLWKVPDPQLREELKISISENVIPAYRAFTGRYGSLVDSGRNSGKYIKYTPEDLENHLSDLFEGSLGSANHSRRR

SEQ ID NO: 82647 - protein, 366 aa, Setaria italica
  Transcript Sequence Number=SeqID_16673
  Gene Ontology: Mol. function=galactinol-sucrose galactosyltransferase activity; Cellular component=chloroplast
  Homolog annotation: Hit_ID=B6ST00; Match level="QueryCoverage=99%, HitCoverage=46%, E-value=0.0, Identity=92%"; Hit description =Stachyose synthase
  Pfam annotation: Domain name=Raffinose_syn; Domain location=1-366; Score=360.0; E_value=4.5e-105; Accession=PF05691.4; Description =Raffinose synthase or seed imbibition protein Sip1
GDDPFELVREAVRVVRAHLGTFRTMDEKSPPPIVDKFGWCTWDAFYLKVHPEGVWEGVRRLADGGCPPGMVLIDDGWQSICHDDDDPASGAEGMNRTSAGEQMPCRLIKFQENHKFREYKQGGMGAFVREMKAAFPTVEQVYVWHALCGYWGGLRPGTSGLPPAKVVPPRLSPGLQRTMEDLAVDKIVNNGVGLVDPDRAHELYEGLHSHLEASGIDGVKVDVIHLLEMLCEEYGGRVELAKAYFSGLTASVRRHFGGNGVIASMEHCNDFMLLGTEAVALGRVGDDFWCTDPSGDPNGTFWLQGCHMVHCAYNSLWMGNFIHPDWDMFQSTHPCAAFHAASRAVSGGPIYVSDSVGQHDLRRTKN

SEQ ID NO: 82648 - protein, 128 aa, Setaria italica
  Transcript Sequence Number=SeqID_16674
  Subcellular localization annotation: CTP_CleavageSite=48; ConfidenceScore=5.84e-01
VVVASIPSSSSSPMAPAAAAVAGARPSSLPRPSSPRRGRLVRACSFPRAAPSARPTTTLVSSVSQLPKRTGILSTLIFSPRHSVLCCRYPMSWPWHLARSCSSGVNLKFSYRKSFYRCTANSLYELAS

SEQ ID NO: 82649 - protein, 319 aa, Setaria italica
  Transcript Sequence Number=SeqID_16675
  Gene Ontology: Mol. function=hydrolase activity
  Homolog annotation: Hit_ID=B9S718; Match level="QueryCoverage=73%, HitCoverage=66%, E-value=2e-62, Identity=53%"; Hit description =Hydrolase, putative
  Pfam annotation: Domain name=DLH; Domain location=102-317; Score =38.6; E_value=7.3e-10; Accession=PF01738.10; Description =Dienelactone hydrolase family
  Pfam annotation: Domain name=Peptidase_S9; Domain location=125-309; Score=-78.9; E_value=0.079; Accession=PF00326.13; Description=Prolyl oligopeptidase family
  Pfam module annotation: Pfam domain module=DLH::Peptidase_S9; Domain location=102-317::125-309
  Subcellular localization annotation: CTP_CleavageSite=70; ConfidenceScore=5.90e-01
MAPAAAAVAGARPSSLPRPSSPRRGRLVRACSFPRAAPSARPTTTLVSSKPFCAAGHPLTRRRQGRPLCSQAEVAGTTVDDDEACELVSGSDLVIGEGDDSVSAYLLKAVKNNNGTGILLLSDVFGFEDSATRDFAYRVACNGYNVLVPDLFRGNPWKQSPPFDDDLFARWLAGQAPARVSSDIDACTRWLVDEFKAAGVSRKLGVVGFCYGGGRLVEALARDAEGCFSAGVCFYGSRMDASLGDRIAAPVLFVCGDGDPLCPVETVRELGRRARGARAAVYAGRGHGFAHRPQSVEDDADAEDAFNAMRGWLHDHLLA

SEQ ID NO: 82650 - protein, 112 aa, Setaria italica
  misc_feature (22)..(22): Xaa can be any naturally occurring amino acid
  misc_feature (79)..(79): Xaa can be any naturally occurring amino acid
  Transcript Sequence Number=SeqID_16676
  Gene Ontology: Mol. function=electron carrier activity; Biological process=oxidation reduction
MMQARIVESLYRYLSDHAARGXPVAIRNAVMDPILSLLLGLLYSIDLEPKERAMFRDTIEEIVEILGTGNVSDMFPAIXAPLDLEGLRRRTKTLLGIVYHPFDEQVVLRRRS

SEQ ID NO: 82651 - protein, 102 aa, Setaria italica
  misc_feature (18)..(18): Xaa can be any naturally occurring amino acid
  Transcript Sequence Number=SeqID_16677
  Gene Ontology: Mol. function=protein serine/threonine kinase activity; Biological process=protein amino acid phosphorylation
  Homolog annotation: Hit_ID=C0LGJ1; Match level="QueryCoverage=79%, HitCoverage=7%, E-value=3e-19, Identity=55%"; Hit description =Leucine-rich repeat receptor-like protein kinase (Fragment)
WRATTKGDVYSYGVLLMXLATGRRAVDGGEEECLVEWARRMDKEGWRSRKEAAAAGGTVSWELLTLGMRCTADAPPERPDMLEVLAALVDVAKAAGVRLEFT

SEQ ID NO: 82652 - protein, 383 aa, Setaria italica
  Transcript Sequence Number=SeqID_16678
  Gene Ontology: Mol. function=RNA polymerase II transcription elongation factor activity; Cellular component=DNA-directed RNA polymerase II, holoenzyme; Biological process=regulation of transcription from RNA polymerase II promoter
  Homolog annotation: Hit_ID=UPI0000EB32BC; Match level="QueryCoverage =43%, HitCoverage=12%, E-value=5e-17, Identity=31%"; Hit description =Elongator complex protein 1 (ELP1) (IkappaB kinase complex -associated protein) ...
  Homolog annotation: Hit description=(IKK complex-associated protein) (p150).
KVWTKVIFESALRNVVSAGNEYHEDCMKLLNSNPQLFPLALQLFNKPDKRNEILEAWGDHLSEEKCFGDAALTYQCCSSYQKSLKAYRACGDWKGVFTVAGLLELEKEEITQLAHELCDEFQALGKPGDAARVALEYCSDAERGVNYYIMAREWEEALRVAYMLTRHDLVGTVRDAASECAVSLISEYQEGLLKVGKYIARYLAVRQRRLSLAAKLQSEDRFMDVEDDSISEVSTSFSEMSAYTTRSTKESTASVISSKASKSRGARRQKKGGKIRAGSPGEEMALVEHLKGMALTGSAENELKSLLVVLIQLGKEESARQVQQAADNFVVSQTAAVKLAEDTVCNDKVDENAHTLEHYVRMLRAHGSGHSETGSWRIKALSP

SEQ ID NO: 82653 - protein, 167 aa, Setaria italica
  misc_feature (141)..(141): Xaa can be any naturally occurring amino acid
  Transcript Sequence Number=SeqID_16679
  Gene Ontology: Mol. function=DNA photolyase activity; Cellular component=cytoplasm; Biological process=DNA repair
  Homolog annotation: Hit_ID=Q8H6B3; Match level="QueryCoverage=97%, HitCoverage=23%, E-value=2e-76, Identity=87%"; Hit description =Cryptochrome 2 apoprotein
  Pfam annotation: Domain name=DNA_photolyase; Domain location=16-167; Score=198.2; E_value=2.3e-56; Accession=PF00875.10; Description=DNA photolyase
MSVSSSPMCGGGDTGMRIVVWFRRDLRVEDNPALAAAARAGGEVVPAYVWSPEEDGPYYPGRVSRWWISQSLQHLDASLRRLGAGKLVTRRSDDAVVALLQLVRDTGATHVYFNHLYDPISLVRDHRLKEMLTAEGIVVQXFNADLLYEPWEVVDDEGQPFTMFAPL

SEQ ID NO: 82654 - protein, 68 aa, Setaria italica
  Transcript Sequence Number=SeqID_16680
LVISGVSVVQGRVDGKQGGRRARPQRWIPVTSIHFFGVNDLAVLLIMLSKYVFYKLKNIIKIIFYSYS

SEQ ID NO: 82655 - protein, 184 aa, Setaria italica
  Transcript Sequence Number=SeqID_16681
  Gene Ontology: Mol. function=oxidoreductase activity, acting on single donors with incorporation of molecular oxygen, incorporation of two atoms of oxygen; Cellular component=chloroplast; Biological process=DNA integration
  Homolog annotation: Hit_ID=Q1EP33; Match level="QueryCoverage=100%, HitCoverage=32%, E-value=3e-66, Identity=64%"; Hit description =Dioxygenase-related protein
NERKVLGRVHCRGGLAPGWVHSFAVTENYIIVPEMPLRYSVTGVLKSELTPWYIFDWVPESGSYMHVVCRSTGKTVASVEVPPFMALHFINAYEQRDDDGGTGVIIADCCEYYADPAIIEALALHRLRSPGINKDAFPDARVARFRIPLDGSARGELETVVDPDAHGRGVELCSINPAYQGKEY

SEQ ID NO: 82656 - protein, 90 aa, Setaria italica
  misc_feature (81)..(81): Xaa can be any naturally occurring amino acid
  Transcript Sequence Number=SeqID_16682
IDDDKEKAAVAFGGLGQEGSSGLISEKDAFYDNRTLSSGVGTSPPKRPMEENAGSNEYGITGIQEGLKTDEAKSSADPDLXLRLPDDSNT

SEQ ID NO: 82657 - protein, 68 aa, Setaria italica
  Transcript Sequence Number=SeqID_16683
  Gene Ontology: Mol. function=zinc ion binding; Cellular component =COPII vesicle coat; Biological process=ER to Golgi vesicle-mediated transport
  Homolog annotation: Hit_ID=B9SKJ9; Match level="QueryCoverage=98%, HitCoverage=8%, E-value=9e-27, Identity=77%"; Hit description =Protein transport protein sec23, putative
MSEFLDLEAQDGIRMPWNVIPGTKQEALNCVIPVSAIYTPLKSIPDIPVLPYSPLRCRMCRSVLNSFL

SEQ ID NO: 82658 - protein, 92 aa, Setaria italica
  Transcript Sequence Number=SeqID_16684
ETKPNEGSSGGSSRRLRGVSTPYIYRAEGRMASALMGQNSMRAAHSYGPKGSVRFAAGLLLLLPDTTFACWLLSWLPDAAFAWWLLQHVDPA

SEQ ID NO: 82659 - protein, 77 aa, Setaria italica
  Transcript Sequence Number=SeqID_16685
CLLPCFLLPPSSSGSVCRGSEGGLPNLLAPLGYLFVRCSEQTKIKGDHARSSPTENLTIYFPFSQCFRDCLRRKRRA

SEQ ID NO: 82660 - protein, 255 aa, Setaria italica
  Transcript Sequence Number=SeqID_16686
  Gene Ontology: Mol. function=transferase activity; Cellular component= cytoplasm; Biological process=pyridoxine biosynthetic process
  Homolog annotation: Hit_ID=B6SNW4; Match level="QueryCoverage=100%, HitCoverage=100%, E-value=1e-131, Identity=89%"; Hit description =Glutamine amidotransferase subunit pdxT
  Pfam annotation: Domain name=GATase_3; Domain location=33-147; Score=- 33.8; E_value=0.00073; Accession=PF07685.6; Description=CobBCobQ-like glutamine amidotransfera
  Pfam annotation: Domain name=SNO; Domain location=6-222; Score=195.4; E_value=1.6e-55; Accession=PF01174.11; Description=SNO glutamine amidotransferase family
  Pfam module annotation: Pfam domain module=GATase_3::SNO; Domain location=33-147::6-222
MAVVGVLALQGSYNEHLAALRRIGVRGVEVRKPEQLLGLDSLIIPGGESTTMAKLANYHNLFPALREFVSGGKPVWGTCAGLIFLANKAVGQKTGGQELVGGLDCTVHRNFFGSQLQSFETELSVPKLAEKEGGNDTCRGVFIRAPAILEAGSDVEILADCPVPADRPSITISSGEGAEEEVYSKDRVIVAVRQGNILATAFHPELTSDSRWHRYFLDMDKESHAKAFSTLSLSSSSTDAEDLPKNKPLDLPIFE

SEQ ID NO: 82661 - protein, 616 aa, Setaria italica
  Transcript Sequence Number=SeqID_16687
  Gene Ontology: Cellular component=nucleus; Biological process =regulation of transcription, DNA-dependent
  Homolog annotation: Hit_ID=A7YJG7; Match level="QueryCoverage=99%, HitCoverage=84%, E-value=1e-137, Identity=48%"; Hit description=ELF3 protein
  Subcellular localization annotation: CTP_CleavageSite=85; ConfidenceScore=5.09e-01
RESGRMPTQTKNNDVYASKSIAESTSQHRVGNINKNSSGKKVANNDEFMVPSICSPRFSRYSTQEHAGVQDKSNPLSATNPHKSPSAMPKSSAECYSAVNRHLERIDESDMRSMSSSKVKEKESVQGSKIVEVEEKSLPVQAFKEKFKNKDAKACQMGDNANNIDSYDNPHFGNSRRQPTSMNGSSMEAKNPTTTRNTVSCKPCTDLNDCNKNSNLLDRSLREAGSKRKRGHQDVEQNDDLSDSSVECIPGWEVSPDEIVGAIGPKHFWKARKAIQNQQRVFAVQVFELHKLIKVQKLIAASPHLLIEGDPVLGSALVGKKTKLPKGNLKVQTLSIANKDDIQPTPEQPELSKQNTEGNPPSPCRDDGLGGNGHDQAATNETFTSNPPVMPAAPDNKQNNWCMNPPQNQWLVPVMSPSEGLVYKPYAGPCPPVGSLLAPFYANCTPLKLPSTPYGVPMPHQPQHMAPPGAPAMHMNYFPPFSVPVMNPGAPASAVEQGSHAAVPQPHGRAEQQSLISCNMSHPSGIWRFHASRDSEPQASSASSPFDRIQVQGDGSGPVSVFPSAPAQNAQPQPSSGSRDQQNHVIRVVPHNAQTASESAARIFRSIQMERRQNDP

SEQ ID NO: 82662 - protein, 73 aa, Setaria italica
  Transcript Sequence Number=SeqID_16688
SKDHVWFRRHRSHLTHDGWLCSYLGSSLQGQHQPLGTLLLQLCDGPKPKAFLAQRGSQARLQGKLPRVKKTPL

SEQ ID NO: 82663 - protein, 146 aa, Setaria italica
  Transcript Sequence Number=SeqID_16689
  Subcellular localization annotation: CTP_CleavageSite=10; ConfidenceScore=5.67e-01
MSSPTPTPPVAPAPQAPTTPVAPTTPVTPPVTAPVPPTAQPPTTPPTALPPTTPPTVQPPVSPPTSTPSPPPPPPPVTPSPPPPVIVPTPSPPPPATVPTPSPPPPAAIVPTPSPPPPVPRPPPPSGVPASPPPPDDVPTSPPPPT

SEQ ID NO: 82664 - protein, 259 aa, Setaria italica
  Transcript Sequence Number=SeqID_16690
  Gene Ontology: Mol. function=ATPase activity, coupled to transmembrane movement of ions, phosphorylative mechanism; Cellular component=integral to membrane; Biological process=phospholipid transport
  Homolog annotation: Hit_ID=B9I2N3; Match level="QueryCoverage=84%, HitCoverage=18%, E-value=1e-102, Identity=78%"; Hit description =Aminophospholipid ATPase (Fragment)
  Subcellular localization annotation: CTP_CleavageSite=59; ConfidenceScore=5.50e-01
LTVIAIWAFTAQTTHVYAAAPSAALSATSPPRRNASCPSDTKAMFLDLAIGCGSVICCRSSPKQKALVTRLVKTGTGKVTLAIGDGANDVGMIQEADIGVGISGAEGMQAVMASDVSIAQFRFLDRLLLVHGHWCYSRISSMICYFFYKNITFGVTLFLYEAYTSFSGQAFYNDWALACYNVFFTSLPVVAMGVFDQDVSARFCLKFPMLYQEGPQNLLFRWRRILGWVAYGVVSAVIIFFLTTASLGHEAFRRGGEVA

SEQ ID NO: 82665 - protein, 60 aa, Setaria italica
  misc_feature (10)..(10): Xaa can be any naturally occurring amino acid
  Transcript Sequence Number=SeqID_16691
  Gene Ontology: Mol. function=electron carrier activity; Cellular component=integral to membrane; Biological process=oxidation reduction
  Homolog annotation: Hit_ID=B6T0I8; Match level="QueryCoverage=95%, HitCoverage=10%, E-value=9e-23, Identity=89%"; Hit description =Cytochrome P450 CYP90D10.b
PLPAAGQRLXPGLDLARLEASIFLHHLVTDFRWVAEEDAVVNFPTVRLRRGMPIAVTPRT

SEQ ID NO: 82666 - protein, 300 aa, Setaria italica
  Transcript Sequence Number=SeqID_16692
  Gene Ontology: Mol. function=DNA binding; Cellular component=nucleus
  Homolog annotation: Hit_ID=B6TJV6; Match level="QueryCoverage=93%, HitCoverage=69%, E-value=1e-110, Identity=75%"; Hit description=AT -hook protein 1
  Pfam annotation: Domain name=DUF296; Domain location=92-212; Score =219.7; E_value=7.6e-63; Accession=PF03479.7; Description=Domain of unknown function (DUF296)
QQQHPGAGGGGAVAGGSSGELVKKKRGSARKYGPDGTIGLGLKPAAATGAEAGGQSGGGGSNSNPDGKRRGRPPGSGKKKQLDALGSSGTSFTPHIITVKPNEDVASKIMAFSQQGPRTTCIISANGALCTATLRQPATSGGIVTYEGHFDILSLSGSFLLAEDGDTRSRTGGLSVALAGSDGRIVGGCVAGMLMAATPVQVVVGSFIAEGKKPKEEQQPKREPTSVPLHAPGFGATSTASPPSDGTSSEHSDDPGSPMGPNGSTFANTGHPLHSTFAPVGWSLSGNQGRYDPDLKMMTD

SEQ ID NO: 82667 - protein, 99 aa, Setaria italica
  Transcript Sequence Number=SeqID_16693
YSCGVNVPICELLLLNIVVNLHKYFISNGNIVCFVLLILVHYLDIRHPNCSFSILAVWKSVALWTVIREKNSQQISGLYLCSLYSVFQPYVFSFCSYYR

SEQ ID NO: 82668 - protein, 55 aa, Setaria italica
  Transcript Sequence Number=SeqID_16694
SAYHFIGELLIRADNEAILQARIGRNVDGLDLNLYQQSLLIRRKHEAKLRSSRRA

SEQ ID NO: 82669 - protein, 130 aa, Setaria italica
  Transcript Sequence Number=SeqID_16695
EKKLVEYIYQRTRKGAVVDKIEKKVIIKEEKVEVKKEVKKDEKKEEKKEVKKEEKKVTEVVAPYFIPCTHPRFVDFSHPFHRGGGGGYGSPCGDGGYGYGGCGGYPYGVSYTHSELTGYRDTAFLHCTHH

SEQ ID NO: 82670 - protein, 91 aa, Setaria italica
  misc_feature (52)..(52): Xaa can be any naturally occurring amino acid
  misc_feature (81)..(81): Xaa can be any naturally occurring amino acid
  Transcript Sequence Number=SeqID_16696
  Homolog annotation: Hit_ID=B6TUY9; Match level="QueryCoverage=39%, HitCoverage=9%, E-value=9e-10, Identity=91%"; Hit description =Chaperone protein dnaJ 49
  Pfam annotation: Domain name=TPR_2; Domain location=8-41; Score=19.4; E_value=0.015; Accession=PF07719.9; Description=Tetratricopeptide repeat
MEGNKDDAVKCLRIGRGALEAGDRARAIKFLSKAKRLDPSLPIDDLLAPLLXNPQDDSPASSSSSPPPPPPQPAAAGAAEXAEADGLRERK

SEQ ID NO: 82671 - protein, 161 aa, Setaria italica
  Transcript Sequence Number=SeqID_16697
  Gene Ontology: Mol. function=glutathione transferase activity
  Homolog annotation: Hit_ID=Q9FQ98; Match level="QueryCoverage=100%, HitCoverage=60%, E-value=8e-78, Identity=88%"; Hit description =Glutathione S-transferase GST 41
  Pfam annotation: Domain name=GST_N; Domain location=14-87; Score =73.6; E_value=7.4e-19; Accession=PF02798.12; Description=Glutathione S-transferase, N-terminal domain
MEKTPKNVSQAAAAPLKLLGSWASSYTHRVQLALRLKGLEFEYAEEDLGNKSVELLRLNPVYKKVPVLVHGGRALPESVIILQYLDDAWPETRPLLPADAFDRALARFWCHFADDKLGPAVGAVFASTGEDQEAAVRQVHENLALIEAELRDGAFKGRRFF

SEQ ID NO: 82672 - protein, 256 aa, Setaria italica
  Transcript Sequence Number=SeqID_16698
  Gene Ontology: Cellular component=plasma membrane
  Homolog annotation: Hit_ID=B6UDP8; Match level="QueryCoverage=100%, HitCoverage=41%, E-value=1e-108, Identity=78%"; Hit description =Protein CYPRO4
MGGSHSREDIDLTSSDEEEEYGEEDYDAPSPISDPAASAGQRDDDLLRTATPASLEAIDAKLRSLDLKYQRPTAAKLYLHVGGATPSARWVLDERRASYAFVDKASDDTSSPRWFLEVGPGPRVSAPVDSALQLKTNPAQRRVDFAAGGSVWALRLPTDAEFRRFRVDYDRCLFENTYGVEATDEGRKEVFGADFAAWARPDEADDAVWADAEESLTPPVAAPARDLLKEFEEEAGDGDSIQSLALGALDNSFLVG

SEQ ID NO: 82673 - protein, 204 aa, Setaria italica
  Transcript Sequence Number=SeqID_16699
  Gene Ontology: Mol. function=transferase activity, transferring pentosyl groups; Cellular component=imidazoleglycerol-phosphate synthase complex; Biological process=histidine biosynthetic process
  Homolog annotation: Hit_ID=Q9SZ30; Match level="QueryCoverage=82%, HitCoverage=28%, E-value=9e-70, Identity=73%"; Hit description =Cyclase
  Pfam annotation: Domain name=GATase; Domain location=39-204; Score =58.4; E_value=2.7e-14; Accession=PF00117.20; Description=Glutamine amidotransferase class-I
  Pfam annotation: Domain name=GATase_3; Domain location=68-185; Score=- 12.4; E_value=1e-05; Accession=PF07685.6; Description=CobBCobQ-like glutamine amidotransfera
  Pfam annotation: Domain name=SNO; Domain location=46-202; Score= -65.0; E_value=0.048; Accession=PF01174.11; Description=SNO glutamine amidotransferase family
  Pfam module annotation: Pfam domain module=GATase::GATase_3::SNO; Domain location=39-204::68-185::46-202
  Subcellular localization annotation: CTP_CleavageSite=40; ConfidenceScore=5.41e-01
HPHRPHAPRAAGPKRSSQRRGSGSGSLSVRASSDANTVTLLDYGAGNVRSVRNAIRHLGFGIRDVRSPEDILAADRLVFPGVGAFGSAMDVLNSTGMADALREYIQRDRPFLGICLGLQLLFDSSEENGPVSGLGVIPGVVRRFDSSKGSSIVPHIGWNALEITKDTQLLQGADGHHVYFVHSYHALPSDANRDWISSICNYGD

SEQ ID NO: 82674 - protein, 100 aa, Setaria italica
  Transcript Sequence Number=SeqID_16700
SYLITTCKRITTAYVVALWLKHITIVKHRYDTLYHLLQRFYVIAISFERITTTHSVAIWLKHIMTAHTSLRYLVRLLRRFLAVAISIEYIATTHISLGYG

SEQ ID NO: 82675 - protein, 101 aa, Setaria italica
  Transcript Sequence Number=SeqID_16701
  Gene Ontology: Mol. function=catalytic activity
MCIISPRYSYYYCQLKKNFLLDMCEKHLDKGNSIGSSVDLSIGIFHTRKGKHGTIKMTVNVSDDVEVIAEGTYPVTTADCTSGDDDDSGIIQGECLFAFSC

SEQ ID NO: 82676 - protein, 76 aa, Setaria italica
  Transcript Sequence Number=SeqID_16702
RLDKIVTIFDVYYITSIFLLLLSAREFLVGYVREASGQRNSIGSSVDLSVSVVVLRRGLMSTLCAFISLITKYCYK

SEQ ID NO: 82677 - protein, 534 aa, Setaria italica
  Transcript Sequence Number=SeqID_16703
  Gene Ontology: Mol. function=catalytic activity
  Homolog annotation: Hit_ID=A9ZN27; Match level="QueryCoverage=59%, HitCoverage=34%, E-value=2e-53, Identity=40%"; Hit description =Putative ankyrin repeat protein
MAPTTKEEEGGEAWESRLLRRRTPAGSPTPPAGTAPSPPPSQRGKRERPGSSRGRKRARATGREDEKDAEAAAASASPPAGHASSGASSGTSSPLRWPELPRAVLGEDSYGEQILEPFHEIDPAIVRAHGKLKTKYFAKLDRQLKLVSLDQRIPSSCMVDPRLLSVRKAATNSILQIAKVTVGLSSYIDDKMLGRTSGFLIDWDVENRIGTVLTSALVIQSKSPSLDEWSATDEYATHAEVRVHFMDKAATTVVANLLHYDKHYNLALFKVSMDLSAQIPSFTSELKFAEEVFVLGRDEGRYLTIDHGNVAYEGPSRLQRHHYMFITRRINKLGIGGPVINHGGQVAGMYSHPGLAFTPSSIILRCLQMWKSFNCILRLHVGMKFSAISLLDLPHREVIACKCDIDDGLIVTQVSEGSIAEKLGVRHGDIIKSWNGENISTTIELENFLLDMCEKHLDKGNSIGSSVDLSIGIFHTRKGKHGTIKMTVNVSDDVEVIAEGTYPVTTADCTSGDDDDSGIIQGYSAMMKLAMTTV

SEQ ID NO: 82678 - protein, 129 aa, Setaria italica
  Transcript Sequence Number=SeqID_16704
  Gene Ontology: Mol. function=oxidoreductase activity, acting on the CH-NH2 group of donors, NAD or NADP as acceptor; Cellular component =chloroplast; Biological process=nitrogen compound metabolic process
  Homolog annotation: Hit_ID=A7VKB1; Match level="QueryCoverage=100%, HitCoverage=5%, E-value=3e-58, Identity=85%"; Hit description=NADH -glutamate synthase 2
  Pfam annotation: Domain name=Glu_syn_central; Domain location=1-129; Score=-10.7; E_value=3.2e-16; Accession=PF04898.6; Description =Glutamate synthase central domain
GPEGDLSETTEHQCHRLKLEGPLLHIHEMEAIKKMNFRDWRSKVLDITYPKKYGRKGLEQTLDKLCAQAREAIHEGYTILVLSDRGFSLDRVPVSPLLAVGAVHQHLVSNLERTRIGLLVDSAEPREVH

SEQ ID NO: 82679 - protein, 367 aa, Setaria italica
  Transcript Sequence Number=SeqID_16705
  Gene Ontology: Mol. function=nucleic acid binding; Biological process= embryonic development ending in birth or egg hatching
  Homolog annotation: Hit_ID=Q7XQJ0; Match level="QueryCoverage=99%, HitCoverage=42%, E-value=0.0, Identity=91%"; Hit description =OSJNBa0005N02.1 protein
  Pfam annotation: Domain name=Helicase_C; Domain location=227-305; Score=88.7; E_value=2e-23; Accession=PF00271.23; Description =Helicase conserved C-terminal domain
LLEFMMPDIFATGDIDLKKLLNAEDHELISRIKSILGPFILRRLKSDVMQQLVPKIQHVKFVTMDTEQSKTYINAIDEYRSACQARSAKSSVDMTNNVVGLIPKRQISNYFTQFRKIANHPLLIRRVYSDKDVDRIARLLYPKGAFGFECSLERAIQELKNYNDFNIHQLLISYGDAGTKGALTDEHVFASAKCQALAELLPSLANDGHRVLIFSQWTTMLDILEWALEIIGVTYRRLDGGTPVTERQTIVDTFNNDRSIFACLLSTRAGGQGLNLIGADTVIIHDMDFNPQMDRQAEDRCHRIGQQKPVTVYRLVTKGSVDENIYEIARRKLILDAAILQPGAELDNSTDVPEQTMGEILASLLLA

SEQ ID NO: 82680 - protein, 198 aa, Setaria italica
  Transcript Sequence Number=SeqID_16706
  Gene Ontology: Mol. function=serine O-acetyltransferase activity; Cellular component=cytoplasm; Biological process=cysteine biosynthetic process from serine
  Homolog annotation: Hit_ID=B6TFX8; Match level="QueryCoverage=100%, HitCoverage=63%, E-value=7e-82, Identity=77%"; Hit description =Serine acetyltransferase 3
  Pfam annotation: Domain name=Hexapep; Domain location=124-141; Score =14.9; E_value=0.34; Accession=PF00132.16; Description=Bacterial transferase hexapeptide (th
  Pfam annotation: Domain name=Hexapep; Domain location=142-159; Score =7.7; E_value=19; Accession=PF00132.16; Description=Bacterial transferase hexapeptide (th
  Pfam annotation: Domain name=Hexapep; Domain location=98-115; Score =18.6; E_value=0.026; Accession=PF00132.16; Description=Bacterial transferase hexapeptide (th
  Pfam annotation: Domain name=SATase_N; Domain location=1-44; Score= -6.8; E_value=7.1e-05; Accession=PF06426.6; Description=Serine acetyltransferase, N-terminal
  Pfam module annotation: Pfam domain module=Hexapep::Hexapep::Hexapep:: SATase_N; Domain location=124-141::142-159::98-115::1-44
SLAAHPSIRAAAVADLIAARSRDPACAGFAHCLLNYKGFLAVQAHRVAHVLWAQSRRALALALQSRVAEVFAVDIHPAAAIGKGILLDHATGVVIGETAIVGDNVSILHHVTLGGTGKAVGDRHPKIGDGVLIGAGATILGNVRIGAGAKVGAGSVVLIDVPPRSTAVGNPARLIGGKKGEDVMPGESMDHTSFIQQW

SEQ ID NO: 82681 - protein, 227 aa, Setaria italica
  Transcript Sequence Number=SeqID_16707
  Gene Ontology: Mol. function=sugar:hydrogen symporter activity; Biological process=carbohydrate transport
  Homolog annotation: Hit_ID=Q69M22; Match level="QueryCoverage=86%, HitCoverage=57%, E-value=2e-85, Identity=79%"; Hit description =Integral membrane protein-like
  Pfam annotation: Domain name=TPT; Domain location=6-157; Score=-31.2; E_value=0.043; Accession=PF03151.8; Description=Triose-phosphate Transporter family
VMTDSAFSLTAYSWALAYLVTITTEMVYIKHIVTNLGLNTWGFVLYNNLLSLMLAPIFWLVTGEHKVVFAAIESRGEGLFQLGAFVAVALSCVFGLLISFFGFAARKAVSATAFTVTGVVNKFLTVAINVMIWDKHASAFGLVCLLFTIVGGVLYQQSVTTKGNSAVPRGPVSEQPKEGNDSIEFDNEKQSLVSSAKCPVRELLTSIVLNFADILFGLELGFLCLTL

SEQ ID NO: 82682 - protein, 234 aa, Setaria italica
  misc_feature (221)..(221): Xaa can be any naturally occurring amino acid
  Transcript Sequence Number=SeqID_16708
  Gene Ontology: Mol. function=aspartic-type endopeptidase activity; Biological process=DNA integration
  Homolog annotation: Hit_ID=Q2QQP6; Match level="QueryCoverage=100%, HitCoverage=16%, E-value=2e-99, Identity=75%"; Hit description =Retrotransposon protein, putative, Ty1-copia subclass
SNGVAERKNRTLTDLVNAMLDTSGLSKAWWGKAVLTSCHVLNKILMKNKEKTPYEEWIGRKPSLLYLRTWGCLAKVSVPINKKRKLGPKTVDCVFLGYAHHSIAYRFLVVKSEVPDVHVNTLMESRDVTFFENIFPMKQLHSMSRLSSDMIAETTPEPIVLPDHAEQTLEPVHEEVNSEAPKKSKRQRTAKSFGDDFTVYLVDDTPKTISEAFASPDADDXKEAIHSEMDSILS

SEQ ID NO: 82683 - protein, 49 aa, Setaria italica
  Transcript Sequence Number=SeqID_16709
  Gene Ontology: Mol. function=hydrogen ion transporting ATP synthase activity, rotational mechanism; Cellular component=chloroplast ribulose bisphosphate carboxylase complex; Biological process=carbon utilization by ...
  Gene Ontology: Biological process=fixation of carbon dioxide
  Homolog annotation: Hit_ID=Q0JIM3; Match level="QueryCoverage=93%, HitCoverage=2%, E-value=2e-15, Identity=80%"; Hit description =Photosystem I P700 chlorophyll A apoprotein
YLSFKDSIKRQLAGLFVCLVRKEEDLMIIRSPEPEVKIVVDRDPVKTSF

SEQ ID NO: 82684 - protein, 622 aa, Setaria italica
  misc_feature (238)..(238): Xaa can be any naturally occurring amino acid
  Transcript Sequence Number=SeqID_16710
  Gene Ontology: Mol. function=transferase activity, transferring hexosyl groups; Cellular component=plasma membrane; Biological process=carbohydrate metabolic process
  Homolog annotation: Hit_ID=B6SKE1; Match level="QueryCoverage=93%, HitCoverage=93%, E-value=0.0, Identity=88%"; Hit description=Sterol 3-beta-glucosyltransferase
  Pfam annotation: Domain name=Glyco_transf_28; Domain location=174 -317; Score=149.7; E_value=9.1e-42; Accession=PF03033.12; Description= Glycosyltransferase family 28 N-terminal domain
  Pfam annotation: Domain name=UDPGT; Domain location=175-599; Score= -162.8; E_value=0.011; Accession=PF00201.10; Description=UDP -glucoronosyl and UDP-glucosyl transferase
  Pfam module annotation: Pfam domain module=Glyco_transf_28::UDPGT; Domain location=174-317::175-599
MGSNGEVWEGAGVGGGVRRRKGGVESAGAGASSSFAEGNGEFVLSSMDARFSGSADDDGLFVSAASSRQPAFGHSKSTAASSGTYKGQEYAFVRSYSDRLLKCDLTLDMLSENEKIKIFEKLVKFQNDGTVEVDVTRSALVTSELSEIDAFGYVPRGIEEVTPGITKSVPKLKIAILVVGTRGDVQPFIALAKRLQEFGHYVRLATHVNFRTFVKSAGIDFYPLGGDPRIMAQYMTKXGFCLAAPTEIYAQRKQLKEIIFSVLPACTEPDLDTGTPFRAQAIIANPPAYGHLHIAEALGIPLHIFFTFPWTPTDEFPHPLARMPQSATYRLSYLILDLIIWWGTRGFINDFRKKLNLPPIAYFSTYHGSISHLPTGYMWSPQLMPKPKDWGPLVDVVGYCFLNLGTKYQPPLELSQWLEQGPKPIYIGFGSMPLDDEKKVTATILDALRETGQRGIISRGWGSLGSSSEVPVDVFILEDCPHDWLFPRCAAVVHHGGAGTTAAGLIAGCPTTVVPFFGDQFFWAERVHARGVGPAPIPIAALTDEALSNAIRFMLDPEVKSRALELAIAIGNEDGVAAAVDAFHRHLPSELPLAPTPVEEEHVDLFQWFSRALEKCCFPFNF

SEQ ID NO: 82685 - protein, 53 aa, Setaria italica
  Transcript Sequence Number=SeqID_16711
  Homolog annotation: Hit_ID=B6TN37; Match level="QueryCoverage=100%, HitCoverage=12%, E-value=6e-16, Identity=75%"; Hit description=F-box domain containing protein
KLSTLESLVRYSVRLRRMIIRISQMKNCHEAADDFFAEICKFTYMNSESVCIE

SEQ ID NO: 82686 - protein, 174 aa, Setaria italica
  Transcript Sequence Number=SeqID_16712
  Gene Ontology: Mol. function=nucleotide binding; Biological process =defense response
  Homolog annotation: Hit_ID=Q2QW36; Match level="QueryCoverage=100%, HitCoverage=12%, E-value=4e-49, Identity=53%"; Hit description=NB -ARC domain containing protein, expressed
SHHAFPSCGLQDDAAFKRTGEQIAKNLRGCPLVTKVVGAHLRDNMRLDYWNEFLTQSLKHFYGGSEDIMDVLKLSYYHLPPVLQTCFRFCSLFPQDYRFGKNQLVEMWVDSGLISQDAFGTQSLVDVGEKYLVQLTRKSFFDLRFRVDLVGQEDRESGYYVMHDLMHDLATNVS

SEQ ID NO: 82687 - protein, 315 aa, Setaria italica
  Transcript Sequence Number=SeqID_16713
  Gene Ontology: Mol. function=nucleotide binding; Biological process =defense response
  Homolog annotation: Hit_ID=Q2QW36; Match level="QueryCoverage=99%, HitCoverage=21%, E-value=3e-61, Identity=41%"; Hit description=NB -ARC domain containing protein, expressed
SLKSYYHLPPVLQTCFRFCSLFPQDYRFEKNQLVEMWVDSGLISQDAFGTQSLVDVGEKYLVQLTRKSFFDLRFRVDLVGQEDRESGYYVMHDLMHDLATNVSFGECLRMVDGGSLENVPSTVRHVRVELIPNFPTEKMKKISCLENLRTIIIVKKFFIVEENIDLLNTVEELVESSKSLRLFQTELRHRSHFASKLAKLKHLRCVMLQYVRDVWGSTAQESMSGVFKLYHLRKLLSYELGSTQVRDVGYLDRLQYLQFGWKCSMVPVARLTSLRVLENYRITRIKGYNMSALKDLGSLRSLSVDTLENVDNQEE

SEQ ID NO: 82688 - protein, 474 aa, Setaria italica
  misc_feature (181)..(181): Xaa can be any naturally occurring amino acid
  misc_feature (234)..(234): Xaa can be any naturally occurring amino acid
  Transcript Sequence Number=SeqID_16714
  Gene Ontology: Mol. function=nucleotide binding; Biological process =defense response
  Homolog annotation: Hit_ID=Q2QW36; Match level="QueryCoverage=95%, HitCoverage=37%, E-value=1e-37, Identity=35%"; Hit description=NB -ARC domain containing protein, expressed
  Pfam annotation: Domain name=LRR_1; Domain location=110-131; Score =10.5; E_value=2.9; Accession=PF00560.25; Description=Leucine Rich Repeat
  Pfam annotation: Domain name=LRR_1; Domain location=167-192; Score =6.4; E_value=18; Accession=PF00560.25; Description=Leucine Rich Repeat
  Pfam annotation: Domain name=LRR_1; Domain location=271-293; Score =3.4; E_value=69; Accession=PF00560.25; Description=Leucine Rich Repeat
  Pfam annotation: Domain name=LRR_1; Domain location=297-320; Score =3.5; E_value=65; Accession=PF00560.25; Description=Leucine Rich Repeat
  Pfam annotation: Domain name=LRR_1; Domain location=322-346; Score =9.0; E_value=5.8; Accession=PF00560.25; Description=Leucine Rich Repeat
  Pfam annotation: Domain name=LRR_1; Domain location=348-369; Score =8.3; E_value=8; Accession=PF00560.25; Description=Leucine Rich Repeat
  Pfam annotation: Domain name=LRR_1; Domain location=371-395; Score =1.3; E_value=1.7e+02; Accession=PF00560.25; Description=Leucine Rich Repeat
  Pfam module annotation: Pfam domain module=LRR_1::LRR_1::LRR_1::LRR _1::LRR_1::LRR_1::LRR_1; Domain location=110-131::167-192::271 -293::297-320::322-346::348-369::371-395
FSVSLVYFVLFFVKGYNMSALKDLGSLRSLSVDTLENVDNQEEAKKAKMKEKKCLVSLRLGWTECDGVRSRTDELILDSLEPHVNLKKLCISHFSGSRIPHWIVESRVENLVKLDFDFCERIEELPSLGKLLKLKDLTLCGLDRLRRIGQPLNASGDGRMELFLPPSLQKLNIAQCLKLRXLPLLPPSLVRLDIQEVGLIRLPRIVKLHISSDESISSKWLHIMVRSCQCYSVXVVSLFEQKQCIQVIREMTIIDCMHLESAPFPFEEMNELQEIRIANCPELRLLSGAGDKLPLPSLKTLVMGRCGELELLLLESLQVFTNLSNLSLSNCSVVESLPSADVFANLTSLRTICLNGCRNLSSLGGLRSLPHLEDLELWNCSKLAEAGLSLTFGVSGCEEEPGSFKQIKDIMIDHPALLLVEPVRSLCPTYRLRIEDGSEMLDAIEPWLLRNCTSLQHLCISKSSNLVIRLSLLC

SEQ ID NO: 82689 - protein, 154 aa, Setaria italica
  Transcript Sequence Number=SeqID_16715
  Gene Ontology: Mol. function=DNA binding
  Homolog annotation: Hit_ID=B9SCC3; Match level="QueryCoverage=66%, HitCoverage=81%, E-value=6e-45, Identity=83%"; Hit description =Sulfiredoxin-1, putative
  Pfam annotation: Domain name=ParBc; Domain location=70-151; Score =46.7; E_value=8.8e-11; Accession=PF02195.10; Description=ParB-like nuclease domain
  Subcellular localization annotation: CTP_CleavageSite=46; ConfidenceScore=5.59e-01
MASSSSLDLAMTSGVLLHRRALPHASFIPGRGRSASGKRSRNLALSASSSNGAAVPSLTSDSDKKGPVIMEIPLDKIRRPLMRTRANDPVKVQELMDSIRVIGLQVPIDVLEVDGVYYGFSGCHRYEAHQRLGLPTIRCKVRRGTKETLRHHMR

SEQ ID NO: 82690 - protein, 374 aa, Setaria italica
  Transcript Sequence Number=SeqID_16716
  Gene Ontology: Mol. function=hydrolase activity, acting on ester bonds; Biological process=lipid metabolic process
  Homolog annotation: Hit_ID=B6TLP8; Match level="QueryCoverage=91%, HitCoverage=89%, E-value=6e-91, Identity=46%"; Hit description=Alpha- L-fucosidase 2
  Pfam annotation: Domain name=Lipase_GDSL; Domain location=39-363; Score=203.2; E_value=7.1e-58; Accession=PF00657.14; Description=GDSL- like LipaseAcylhydrolase
MAPSGNLLPALAAAFLCCALAPVAQCGGGGGAPQNYTSMFSFGDSLTDTGNLLVSSPLSNHIVGRYPYGITYFHRPTGRCSDGRLVVDFLAQAFGLPLLPPYLQSKGKDLRRGVNFAVGGATAMDPPFFQEIGASDKLWTNLSLSVQLGWFEQLKPSLCSSPKKCKEYFSKSLFLVGEIGGNDYNYAFFKGKTLDDAKTYVPTVAGAVTDATERLIKAGATHLVVPGNLPMGCSSAYLTLHPGRNGSDYDAAGCLKTYNEFAQHHNAVLQQKLQALRAKYPQARIMYADYYGAAMSFAKNPKQFGFTQGPLRTCCGGGGPYNFNPKASCGVRGSSVCTDPSAYANWDGVHLTEAAYHAIANSILNGPYTSPRLL

SEQ ID NO: 82691 - protein, 58 aa, Setaria italica
  Transcript Sequence Number=SeqID_16717
  Subcellular localization annotation: CTP_CleavageSite=39; ConfidenceScore=5.60e-01
PSFSAAKGDRASGTSDSFHGKRQLMTPNARRQQRSRKVVNMHLYPVTSCLAPVRLLRF

SEQ ID NO: 82692 - protein, 99 aa, Setaria italica
  Transcript Sequence Number=SeqID_16718
LEPAKLHHHTMTHSIKRPSTDVTIQCRVRRWDITIYYSARRRRGAQKQILRILSPSSASLNDPGDSHPEPALHLLDRWCEFAKAIQLFTRYFVRYFARN

SEQ ID NO: 82693 - protein, 115 aa, Setaria italica
  misc_feature (88)..(88): Xaa can be any naturally occurring amino acid
  Transcript Sequence Number=SeqID_16719
  Gene Ontology: Cellular component=plasma membrane
YRYDYRAGFWGVMGQSCLGMIPPYIPEFNYPMPKNCAGGNTDVFINGRELHQKDLDLLVGRGLPDSPDRSYRVEISGKVSDEVSGEEXLYCLGKLAPTVEKMKRGFGMRVPRVIQ

SEQ ID NO: 82694 - protein, 54 aa, Setaria italica
  Transcript Sequence Number=SeqID_16720
ILLMLEENDSSKNFFVLNASYLEELATSTTFDGYKGIQSTNLMVVCYPNHSSQP

SEQ ID NO: 82695 - protein, 131 aa, Setaria italica
  Transcript Sequence Number=SeqID_16721
  Subcellular localization annotation: CTP_CleavageSite=58; ConfidenceScore=5.03e-01
SSSMNRDDRTEAARRGSPLHGRVTELRPSSRRTRRSSSGDVDVRSDGGSGTDSESDVPAMPYRRRASPLSSQELEVASVLSGLEPTVNLEKSPLSDPAFQKDLLHALDNLRKLIAAVDHPRSIEGHWQGMM

SEQ ID NO: 82696 - protein, 103 aa, Setaria italica
  Transcript Sequence Number=SeqID_16722
  Gene Ontology: Mol. function=transcription regulator activity; Cellular component=nucleus; Biological process=regulation of transcription
  Homolog annotation: Hit_ID=B6U8E0; Match level="QueryCoverage=56%, HitCoverage=21%, E-value=4e-12, Identity=67%"; Hit description=DNA binding protein
  Pfam annotation: Domain name=HLH; Domain location=48-97; Score=32.9; E_value=1.3e-06; Accession=PF00010.18; Description=Helix-loop-helix DNA-binding domain
  Subcellular localization annotation: CTP_CleavageSite=34; ConfidenceScore=5.47e-01
GLQPYDGCDPSVFVGPLLLPRQASSAPPAPPALSSSSGSGRSATEARALKIHSEAERRRRERINAHLTTLRRMVPDTRQMDKATLLARVVDQVKLLKRKASEA

SEQ ID NO: 82697 - protein, 61 aa, Setaria italica
  Transcript Sequence Number=SeqID_16723
MAWRSSQGVRSGHQIMKSGWKFATVVADGRTTCRRDGIVRGFWQNEAALQQHKGMHEIAVT

SEQ ID NO: 82698 - protein, 245 aa, Setaria italica
  misc_feature (136)..(136): Xaa can be any naturally occurring amino acid
  Transcript Sequence Number=SeqID_16724
KLLVSSVLIFVVGTCSNYVDLELCPLDQLEDQAISINQLVLNGETSPSGTEAHLPGEVERVRLVILLIHQRDGLVTLRQVLPAERRWEAQPEASGDMGLGHGLHKDREARAQLFLQLLGLRDGVGPLLVGRVHPVXQILPPRAVRPPNLSPEIQNLLAVLGLIGEVGDPAGPPERLRGGVPRHPRLPLLGRRGLDGGFSDGGGEVVELELLELALVRLHLPPPLLLVRHRLRRHLLPLRLPPHSD

SEQ ID NO: 82699 - protein, 121 aa, Setaria italica
  Transcript Sequence Number=SeqID_16725
  Subcellular localization annotation: CTP_CleavageSite=66; ConfidenceScore=5.31e-01
FFCSGKWYHSIAATRFFKKNLAATSMCNSIIIFVWIASSSSRHASTSQPASAVHRMLHFHPRSFVRLVNGGGQVQVHEPACILGAPTSESSRPPSRHHLPLLVREMVTGFHSSLFPSSLPP

SEQ ID NO: 82700 - protein, 82 aa, Setaria italica
  Transcript Sequence Number=SeqID_16726
GEPEEAPRGYRGRGGRGRGRRGSFGPGRGYGGDGYPMEEAGGYDDGYNAPPMQGYEAGRGRGRGRGRGRGGRGRGRGPPPQE

SEQ ID NO: 82701 - protein, 109 aa, Setaria italica
  misc_feature (6)..(6): Xaa can be any naturally occurring amino acid
  Transcript Sequence Number=SeqID_16727
PSHDDXTFEQTQLTSSSHGSEDTSASGTSCAAMGAVVLADESSKPGNLTSDVVIDTVETMEVHTTSECVAQKDETKLEGIRSLTSSNCAEFLEGEVLAENVHLSGDEVI

SEQ ID NO: 82702 - protein, 79 aa, Setaria italica
  Transcript Sequence Number=SeqID_16728
  Gene Ontology: Mol. function=small protein activating enzyme activity; Biological process=protein modification process
  Homolog annotation: Hit_ID=B6TJH0; Match level="QueryCoverage=100%, HitCoverage=17%, E-value=7e-22, Identity=68%"; Hit description=NEDD8- activating enzyme E1 catalytic subunit
MASPDAEQPAPTEPARWRDLDMLLSRPGNLVEASFDPSPTLRDLLGSLVEVLVVGAGGLGCELLKDLALSGFKKLHVID

SEQ ID NO: 82703 - protein, 137 aa, Setaria italica
  Transcript Sequence Number=SeqID_16729
  Homolog annotation: Hit_ID=Q9S7Y5; Match level="QueryCoverage=94%, HitCoverage=66%, E-value=2e-58, Identity=82%"; Hit description =F17A17.10 protein
  Pfam annotation: Domain name=SAM_1; Domain location=25-94; Score=5.6; E_value=0.048; Accession=PF00536.22; Description=SAM domain (Sterile alpha motif)
MAQAKSAPGKKEVGRGRSPEPLDFFIWTVEDVGLWLEEINLGGYRQVFEENGVDGEYLESLSMFTTEQILRFIRRCHMKWGDFITLCKELRRIKVACLKGEQEVRRPWWAPACLSVVFVRAAKQNRKSRVVSLKLEP

SEQ ID NO: 82704 - protein, 96 aa, Setaria italica
  Transcript Sequence Number=SeqID_16730
  Gene Ontology: Mol. function=hydrolase activity
  Subcellular localization annotation: CTP_CleavageSite=48; ConfidenceScore=5.68e-01
SSSWSAAGAAVAARASANAPPPRSSSPSSRTSRRAMDPAAGAGRGRVRIAVVGDVHNDWALEEDSKALQFLQPDLVLFTGDYGNENVELVKSISDL

SEQ ID NO: 82705 - protein, 355 aa, Setaria italica
  misc_feature (54)..(54): Xaa can be any naturally occurring amino acid
  misc_feature (120)..(120): Xaa can be any naturally occurring amino acid
  Transcript Sequence Number=SeqID_16731
  Gene Ontology: Mol. function=hydrolase activity
  Homolog annotation: Hit_ID=B4VTR2; Match level="QueryCoverage=78%, HitCoverage=84%, E-value=5e-50, Identity=40%"; Hit description =Ser/Thr protein phosphatase family protein
  Pfam annotation: Domain name=Metallophos; Domain location=42-258; Score=58.5; E_value=2.6e-14; Accession=PF00149.20; Description =Calcineurin-like phosphoesterase
  Subcellular localization annotation: CTP_CleavageSite=43; ConfidenceScore=5.48e-01
AAGAAVAARASANAPPPRSSSPSSRTSRRAMDPAAGAGRGRVRIAVVGDVHNDXALAIDATTPILTCSLCETQPDLVLFTGDYGNCFVELVKSISDLQLPKAAILGNHDCWHTYQFSEKXADRVRLQLGSLGEQHVGYKCLDFPTIKLSIVGGRPFSCGGDRLFRPKLLLKWGVNDMAGSAKKIYDAATSAPEGHSVVLLAHNGPTGLGSRMDDICGRDWVPGGGDHGDPDLERAISDLQRETGVSIPLVVFGHMHKSLAYGRGLRKMIAFGANGTIYLNGAVVPRVRYAQASPSDEQNHPEGSASVAPTSRAFTIADLSEGRVEKISEVWVLVSGDRTELEEEIVLYKHPREHM

SEQ ID NO: 82706 - protein, 141 aa, Setaria italica
  misc_feature (102)..(102): Xaa can be any naturally occurring amino acid
  Transcript Sequence Number=SeqID_16732
  Pfam annotation: Domain name=VQ; Domain location=35-65; Score=45.1; E_ value=2.7e-10; Accession=PF05678.6; Description=VQ motif
  Subcellular localization annotation: CTP_CleavageSite=32; ConfidenceScore=5.36e-01
SVLVADSPMAGRRQHKQQLAPAGGRAGKRRSRASKRAPTTYISTDPANFRIMVQQITGVQADIEMLHPTATTAIDAAAAVLMAADASASATVGAYGGKPAAXPVPGGDEASATLHHHQQLQQPCFPTLDSWNVMYERSELL

SEQ ID NO: 82707 - protein, 80 aa, Setaria italica
  Transcript Sequence Number=SeqID_16733
TRKTKKQRPPVSRIVIENQYLTRINYRRTYSQFESGFKALALLKLKHLTIVFHISFERIMWPNRSGVKRTTSHLGVRIIT

SEQ ID NO: 82708 - protein, 151 aa, Setaria italica
  Transcript Sequence Number=SeqID_16734
VASRVEHTLSLCSWPLIKMKAILLNPQVFFKHGIHASLLYLERTLNQRAQMDEELQCIHSSRAQNRLLTFLSKFPYYPQMEKNNNKPEQLTDAEFITSINQYFWLVVITSSNTDAPIKTRQLFQQWLHASRIKALKFVQDSSMKPHQAAVY

SEQ ID NO: 82709 - protein, 405 aa, Setaria italica
  Transcript Sequence Number=SeqID_16735
  Gene Ontology: Mol. function=protein serine/threonine kinase activity; Cellular component=cytoplasm; Biological process=protein amino acid phosphorylation
  Homolog annotation: Hit_ID=B6SY14; Match level="QueryCoverage=93%, HitCoverage=90%, E-value=0.0, Identity=83%"; Hit description=Casein kinase I isoform delta-like
  Pfam annotation: Domain name=Pkinase; Domain location=14-262; Score =34.8; E_value=1.5e-10; Accession=PF00069.17; Description=Protein kinase domain
  Pfam annotation: Domain name=Pkinase_Tyr; Domain location=39-259; Score=-172.4; E_value=0.029; Accession=PF07714.9; Description =Protein tyrosine kinase
  Pfam module annotation: Pfam domain module=Pkinase::Pkinase_Tyr; Domain location=14-262::39-259
VNLCCVNVFLPSFFGNLSFLYCYVQESSKTNHPQLLYEAKLYNALQGGTGIANIKWCGIDGDENILVIDLLGPSLEDLLVYCGRRFSLKTVLMLADQMITRIEFMHSKGYLHRDIKPDNFLMGLGRKANQVYVIDFGLAKRYRDSTTNRHIPYRENKNLTGTARYASRNTHLGIEQSRRDDLESIGYVLLYFLRGSLPWQGLKAANKKQKYDKISEKKLSTPIEALCKSHPVEFASYFHYCHSLTFDQRPDYSFLRRLFRDLFDREGYQFDYVYDWTLLKCKQSQKAKAQQGCSQDAGASSRPVATNVDKHQVSVARPVEAAGLLDAEQRPAIRMQFKSSAENSRSNNLHPDRLRVAASPDNALLQSAPLGRVDAPRKNATISKTHGSIDPHTHGSYSPGPSNCI

SEQ ID NO: 82710 - protein, 89 aa, Setaria italica
  Transcript Sequence Number=SeqID_16736
  Gene Ontology: Mol. function=3'-5'-exoribonuclease activity; Biological process=RNA processing
VVCLLQCLRIASVKAADITSKIKKAVDSYTTEKALKKVKRLPTSLPQKINVTDVTMEDKGDGELETQTVKTPSDVQEISKGTHILKEFH

SEQ ID NO: 82711 - protein, 53 aa, Setaria italica
  Transcript Sequence Number=SeqID_16737
  Gene Ontology: Mol. function=kinase activity
QPLLHHASEKGIIHHHFPVNFILKPWRLGTRFYLIIKFGIFQYVFPRALLANS

SEQ ID NO: 82712 - protein, 73 aa, Setaria italica
  misc_feature (60)..(60): Xaa can be any naturally occurring amino acid
  Transcript Sequence Number=SeqID_16738
  Gene Ontology: Mol. function=kinase activity
  Homolog annotation: Hit_ID=O80656; Match level="QueryCoverage=100%, HitCoverage=13%, E-value=2e-21, Identity=68%"; Hit description =T14N5.8 protein
  Pfam annotation: Domain name=DUF300; Domain location=1-73; Score= -148.6; E_value=0.024; Accession=PF03619.8; Description=Domain of unknown function
LAPIKPLAKFLSFKSIVFLTWWQGVVIAILYALGLLRSPLAQSLELKSSIQNFIICIEDXMGIASAVHLYVFP

SEQ ID NO: 82713 - protein, 75 aa, Setaria italica
  Transcript Sequence Number=SeqID_16739
IYAMFRYIAKVMYLEKPKRIVIWDGGSAFSPLNSDMYKSASASPETSFSLRSFLFDILNLLEPSLRNLFYVLILP

SEQ ID NO: 82714 - protein, 47 aa, Setaria italica
  Transcript Sequence Number=SeqID_16740
VMKDFKFTVNQAVRPVEKRFDKLMKKKDKHKKTQDDNWVSAATPERP

SEQ ID NO: 82715 - protein, 88 aa, Setaria italica
  Transcript Sequence Number=SeqID_16741
  Gene Ontology: Mol. function=ATPase activity, coupled to transmembrane movement of substances; Cellular component=integral to membrane; Biological process=transport
ARYYEPTQGCITVAGEDIRIFDKREWSRVVSLVNQVCHHKNTNFHTMYFAAISTNLLLLPIKNISSFGQRQGLTRWTWTANFYNNILF

SEQ ID NO: 82716 - protein, 38 aa, Setaria italica
  Transcript Sequence Number=SeqID_16742
LGKGYCHIIYSLRPKLLFVLTFLDSSFCYAPRYMLCLD

SEQ ID NO: 82717 - protein, 65 aa, Setaria italica
  Transcript Sequence Number=SeqID_16743
  Gene Ontology: Mol. function=ATPase activity, coupled to transmembrane movement of substances; Cellular component=integral to membrane; Biological process=transport
  Homolog annotation: Hit_ID=A9TAL5; Match level="QueryCoverage=95%, HitCoverage=9%, E-value=1e-23, Identity=90%"; Hit description=ATP -binding cassette transporter, subfamily B, member 8, group TAP protein PpABCB8
  Pfam annotation: Domain name=ABC_tran; Domain location=1-61; Score= -55.7; E_value=0.069; Accession=PF00005.19; Description=ABC transporter
GYDTLVGERGSLLSGGQRQRIAIARALLKNAPILILDEATSALDATSERLVQEALNLLMKGRYFS

SEQ ID NO: 82718 - protein, 94 aa, Setaria italica
  Transcript Sequence Number=SeqID_16744
GDPVSWASSDSPAAPELDVLFTSALDDPATMGKASSHEDAQPMLTESSNAEVKSTSSSGAAGESEETQETGSPKSLKDAIKPKHKRKKKKTDRS

SEQ ID NO: 82719 - protein, 178 aa, Setaria italica
  misc_feature (19)..(19): Xaa can be any naturally occurring amino acid
  misc_feature (127)..(127): Xaa can be any naturally occurring amino acid
  Transcript Sequence Number=SeqID_16745
  Gene Ontology: Mol. function=ATPase activity, coupled to transmembrane movement of substances; Cellular component=integral to membrane; Biological process=transport
  Homolog annotation: Hit_ID=A9TAL5; Match level="QueryCoverage=98%, HitCoverage=27%, E-value=3e-52, Identity=57%"; Hit description=ATP -binding cassette transporter, subfamily B, member 8, group TAP protein PpABCB8
RLRSQIFRRILIQKMVFFXRHKVGELTGLLTSDLGSLKNLVSDNISRDRGLRALSEITGTLCILFTLSTELAPVLGLLMVSVSGLVALFKRSTVPTFKSYGIVQAQISDCASETFSAIRTVRSFGGXEKRQISFFDNLARAYQNSGTKLGVLKSANESLTRVVVYVSLMALYVLGWKQ

SEQ ID NO: 82720 - protein, 258 aa, Setaria italica
  Transcript Sequence Number=SeqID_16746
  Gene Ontology: Mol. function=3'-5'-exoribonuclease activity; Biological process=RNA processing
  Homolog annotation: Hit_ID=B9SYQ9; Match level="QueryCoverage=90%, HitCoverage=52%, E-value=9e-34, Identity=39%"; Hit description =Exosome complex exonuclease rrp45, putative
DSLHYPRCEGNIVVVDPTYKEEAVMGGRMTATINSNGDICSIQKAGGEGVMSSVVMQCLRIASVKAADITSKIKKAVDSYTTEKALKKVKRLPTSLPQKINVTDVTMEDKGDGELETQTVKTPSDVQEISKGDEDHRNIKGNSPLTGDRIAKHKQTSTFIGGPSNWDPYSKGVSLSSLRISQLPDPATMGKASSHEDAQPMLTESSNAEVKSTSSSGAAGESEEAQETGSPKSLKDAIKPKHKKKEEENLNSCQFSSS

SEQ ID NO: 82721 - protein, 75 aa, Setaria italica
  Transcript Sequence Number=SeqID_16747
SFNAPHADPATMGKASSHEDAQPMLTESSNAEVKSTSSSGAAGESEETQETGSPKSLKDAIKPKHKRKKKKTDRS

SEQ ID NO: 82722 - protein, 99 aa, Setaria italica
  misc_feature (13)..(13): Xaa can be any naturally occurring amino acid
  Transcript Sequence Number=SeqID_16748
  Homolog annotation: Hit_ID=B9RYM8; Match level="QueryCoverage=95%, HitCoverage=23%, E-value=6e-48, Identity=88%"; Hit description=N -rich protein, putative
  Pfam annotation: Domain name=Dev_Cell_Death; Domain location=1-93; Score=132.2; E_value=1.6e-36; Accession=PF10539.1; Description =Development and cell death domain
SLPVFLYNYSTHXQLHGIFEAASFGGSNIDPTAWEDKKCPGESRFPAQVRVATRKICDPLEEDAFRPILHHYDGPKFRLELSVPEALSLLDIFAEKVFA

SEQ ID NO: 82723 - protein, 113 aa, Setaria italica
  Transcript Sequence Number=SeqID_16749
  Homolog annotation: Hit_ID=B6TMX1; Match level="QueryCoverage=71%, HitCoverage=22%, E-value=1e-41, Identity=97%"; Hit description=N -rich protein
  Pfam annotation: Domain name=Dev_Cell_Death; Domain location=4-107; Score=85.7; E_value=1.6e-22; Accession=PF10539.1; Description =Development and cell death domain
PNHAIRSANNPTNLVCYYVIRAHRSHLNRSCSYQAASFGGTNIDPTAWEDKKCPGESRFPAQVRVATRKIYDPLEEDAFRPILHHYDGPKFRLELSVTEALALLDIFADKDDA

SEQ ID NO: 82724 - protein, 353 aa, Setaria italica
  Transcript Sequence Number=SeqID_16750
  Gene Ontology: Mol. function=ATPase activity, coupled to transmembrane movement of substances; Cellular component=integral to membrane; Biological process=transport
  Homolog annotation: Hit_ID=B9R9H4; Match level="QueryCoverage=100%, HitCoverage=50%, E-value=1e-135, Identity=69%"; Hit description =ATNAP8, putative
  Pfam annotation: Domain name=ABC_tran; Domain location=176-352; Score= 202.8; E_value=9.2e-58; Accession=PF00005.19; Description=ABC transporter
  Subcellular localization annotation: CTP_CleavageSite=52; ConfidenceScore=5.17e-01
QARAYQNSGTKLGVLKSANESLTRVVVYVSLMALYVLGGSKVNAGKLSVGTMASFIGYTFTLTFAVQGAVNTLGDLRSTLASIERINSILSAKDIDDSLAYGLAKELDSKEIGDSNGGLYENGSVNKHFMSELKSSSSCSNLAWSGDIHLKDVHFSYPLRSDVEILNGLDLMIECGKVTALVGPSGAGKSTVVQLLARYYEPTQGCITVAGEDIRIFDKREWSRVVSLVNQDPVLFSVSVGENIAYGLPDDVVSKDDIIKAAKAANAHEFIISLPQGYDTLVGERGSLLSGGQRQRIAIARALLKNAPILILDEATSALDATSERLVQEALNLLMKGRTSLVIAHRLSTVQNA

SEQ ID NO: 82725 - protein, 396 aa, Setaria italica
  Transcript Sequence Number=SeqID_16751
  Gene Ontology: Mol. function=3'-5'-exoribonuclease activity; Cellular component=nuclear exosome (RNase complex); Biological process=RNA processing
  Homolog annotation: Hit_ID=B9SYQ9; Match level="QueryCoverage=74%, HitCoverage=63%, E-value=1e-120, Identity=67%"; Hit description =Exosome complex exonuclease rrp45, putative
  Pfam annotation: Domain name=RNase_PH; Domain location=33-165; Score =135.9; E_value=1.3e-37; Accession=PF01138.13; Description=3' exoribonuclease family, domain 1
  Pfam annotation: Domain name=RNase_PH_C; Domain location=194-262; Score=38.8; E_value=2.2e-08; Accession=PF03725.7; Description=3' exoribonuclease family, domain 2
  Pfam module annotation: Pfam domain module=RNase_PH::RNase_PH_C; Domain location=33-165::194-262
MEHLRWRPTVNERAFIERSLESDLRVDGRHSFDFRTLKITFGREDGSSEVQLGETHVLGYVTAQLVQPYRDRPNEGTLAIFTEFSPMADPVFEPGRPGESAIELGRVIDRGLRESRAVDMESLCVVAGKHVWSVRVDLHILDNGGNLIDAANIAALAALSTFRRPECTIGGDDGQQVIVHDPEARDPIPLTIHHMPIAVTFAYFGEGNIVVVDPTYKEEAVMGGRMTATINSNGDICSIQKAGGEGVMSSVVMQCLRIASVKAADITSKIKKAVDSYTTEKALKKVKRLPTSLPQKINVTDVTMEDKGDGELETQTVKTPSDVQEISKDPATMGKASSHEDAQPMLTESSNAEVKSTSSSGAAGESEEAQETGSPKSLKDAIKPKHKRKKKKTDRS

SEQ ID NO: 82726 - protein, 473 aa, Setaria italica
  Transcript Sequence Number=SeqID_16752
  Gene Ontology: Mol. function=kinase activity; Cellular component =integral to membrane
  Homolog annotation: Hit_ID=O80656; Match level="QueryCoverage=77%, HitCoverage=76%, E-value=1e-102, Identity=47%"; Hit description =T14N5.8 protein
  Pfam annotation: Domain name=DUF300; Domain location=18-315; Score =486.6; E_value=3.4e-143; Accession=PF03619.8; Description=Domain of unknown function
MRVNIGLIVPVMAQYSAPTWATIVAGLFTLVALSLSMYLIFEHLSAYNNPEEQKFVLGVILMVPCYAIESYISLINPNTSVYCGILRDGYEAFAMYCFGRYITACLGGEDKTIAFLKREGGSGSGQPLLHHASEKGIIHHHFPVNFILKPWRLGTRFYLIIKFGIFQYMIIKTLTASLSLLLEPFGVYCEGEFNLRCGYPYFAAVLNFSQYWALYCLVAWYTATKDELAPIKPLAKFLSFKSIVFLTWWQGVVIAILYALGLLRSPLAQSLELKSSIQNFIICIEMGIASAVHLYVFPAKPYALLANQSPGNISVLGDYVSSDPVDPFEIKESNRPTKMKLPQLEPDERSVTNIKESVRDFVVGSGEYVIKDFKFTVNQAVRPVEKRFDKLMKKKDKHKKTQDDNWVSAATPERPIRGIDDPLLSGSASDSGVTKGKKHHRVVSSNAAMDSWGGGDQASDGYEIRGRRWAVKN

SEQ ID NO: 82727 - protein, 347 aa, Setaria italica
  misc_feature (212)..(212): Xaa can be any naturally occurring amino acid
  Transcript Sequence Number=SeqID_16753
  Homolog annotation: Hit_ID=B6TMX1; Match level="QueryCoverage=100%, HitCoverage=100%, E-value=1e-117, Identity=68%"; Hit description=N -rich protein
  Pfam annotation: Domain name=Dev_Cell_Death; Domain location=213-341; Score=282.5; E_value=9.4e-82; Accession=PF10539.1; Description =Development and cell death domain
MEGYDREFWQFSDQLRLQAAAFSGLSLGDSIWSPAGAAADRRNSQADAGLFATPSPADGTLLAAKNNNISSHLNDGGPGLIGSGKLAFGATTTSKADRYNNLPNLPAEKAAAYNNSSSSINGGYGAKNNTFNKMGSYGGYNSNSNSGEVVKSYFNKSAGRPASNNSNSHGKKQGSEYGKKKHAKNEGGNAASAADKRFKTLPASEALPRGRXVGGYIFVCNNDTMDENLRRELFGLPSRYRDSVRAIRPGLPLFLYNYSTHQLHGIFEAASFGGTNIDPTAWEDKKCPGESRFPAQVRVATRKIYDPLEEDAFRPILHHYDGPKFRLELSVTEALALLDIFADKDDA

SEQ ID NO: 82728 - protein, 339 aa, Setaria italica
  misc_feature (50)..(50): Xaa can be any naturally occurring amino acid
  Transcript Sequence Number=SeqID_16754
  Homolog annotation: Hit_ID=B6TMX1; Match level="QueryCoverage=99%, HitCoverage=99%, E-value=9e-92, Identity=55%"; Hit description=N -rich protein
  Pfam annotation: Domain name=Dev_Cell_Death; Domain location=205-333; Score=293.1; E_value=6.1e-85; Accession=PF10539.1; Description =Development and cell death domain
  Subcellular localization annotation: CTP_CleavageSite=54; ConfidenceScore=5.06e-01
MEGYDREFWQFSDQLRLQNNFSNLSIADSIWSSSTAPNNPLARPGRRSRXGSWKAATNNAPGLIGAGSKLAFGNATTTNADRYNYFPANAAPDAKSNANNNSGGLAFSKNLNSPAAALGNDYYFSKNAGAMNANTNAGGDVIKSYFNKSVGRPANNNNNNSFNVGKKSAAAHDKKKSAGNGNGAGVDKRFKSLPASEALPRGEAIGGYIFVCNNDTMEENLKRQLFGLPSRYRDSVRAIRPGLPLFLYNYSTHQLHGIFEAASFGGSNIDPTAWEDKKCPGESRFPAQVRVATRKICDPLEEDAFRPILHHYDGPKFRLELSVPEALSLLDIFAEKVFA

SEQ ID NO: 82729 - protein, 175 aa, Setaria italica
  misc_feature (89)..(89): Xaa can be any naturally occurring amino acid
  misc_feature (127)..(127): Xaa can be any naturally occurring amino acid
  Transcript Sequence Number=SeqID_16755
  Gene Ontology: Mol. function=hydrolase activity; Biological process =metabolic process
  Homolog annotation: Hit_ID=B6T7L7; Match level="QueryCoverage=90%, HitCoverage=46%, E-value=1e-32, Identity=47%"; Hit description =Gibberellin receptor GID1L2
  Pfam annotation: Domain name=Abhydrolase_3; Domain location=30-175; Score=44.6; E_value=2.9e-10; Accession=PF07859.5; Description =alphabeta hydrolase fold
VVVDGATGVFVRLYIPDHVLTAEHKKLPILVYFHGGGLVLHWAASPMYHRYLNSVASKAAVLAVSINYRLAPEHPLPAAYDDSWAALSXAASGADPWLSDHGDTGHVFLAGDSGGANIVHNIVIMAXGSRRGLPSGAFLEGAILLHPMFSGKEPVDGESRETRRRIETKKEKELN

SEQ ID NO: 82730 - protein, 545 aa, Setaria italica
  misc_feature (532)..(532): Xaa can be any naturally occurring amino acid
  Transcript Sequence Number=SeqID_16756
  Gene Ontology: Mol. function=hydrolase activity, acting on acid anhydrides, in phosphorus-containing anhydrides; Cellular component =spliceosome; Biological process=mRNA processing
  Homolog annotation: Hit_ID=B9SPB9; Match level="QueryCoverage=99%, HitCoverage=54%, E-value=0.0, Identity=77%"; Hit description =Helicase, putative
  Pfam annotation: Domain name=DSHCT; Domain location=353-540; Score =345.0; E_value=1.4e-100; Accession=PF08148.4; Description=DSHCT (NUC185) domain
WLSSGEYIQMSGRAGRRGIDQRGICILMVDEKMEPSTAKMMLKGSADSLNSAFHLSYNMLLNQMRSEDGDPEKLLRYSFYQFQADRALPDLEKQIKELELERNSMVIEEEESLKDYYELLQQYKSLKKDVRDIVLSPKHVLPFLQPGRLVRLEYSTDEPATFSIDENITWGIIINFEKVKSHGEDRRPEDSDYTVDVLTRCSVSKDSSGKKAMKIVPLKERGEPVVISLPLSQVDGLSSIRMYIPKDLLPVEARENTLRKVEEVLSRFAKDGVPLLDPEEDMKVQSKSFRKATRRIEALESLFEKHDIRSSPHIQQKLKVLHAKQELSAKIKSIKKTMRSSTALAFKDELKARKRVLRRLGYVTSDDVVEVKGKVACEISSADELTLTELMFSGTLKDATVEQMVALLSCFVWQEKLQDAPKPREELDLLFYQLQETARRVANLQLECKIQIDVESFVNSFRPDIMEAVYSWAKGSKFYQIMEMTQVFEGSLIRAIRRLEEVLQQLILASKSIGETELEAKLEEAVSKIKRXDIVFAASLTCNMS

SEQ ID NO: 82731 - protein, 294 aa, Setaria italica
  Transcript Sequence Number=SeqID_16757
  Homolog annotation: Hit_ID=B9RZD8; Match level="QueryCoverage=79%, HitCoverage=42%, E-value=2e-48, Identity=45%"; Hit description=Non -symbiotic hemoglobin, putative
MEGEEIGLVLARASDLRSRISACAAAARPTEGAVKRLGAAGGGDGGEDEDEQGEVESLVGIGDALESLERQLASLQDLQHQQRYERETILSQIDRSRRSLLCKLKEYKGQDCEVIHEAAAFAGEKIENDDGLILPPYSNHVTNSFVLDDLYPLNYVSKPKKSLHNGLGSDGATQDGTRTNGTENRNTSTPSCGLRGGITSFIGWMAKTAVMVVGAVSIMKAAGYEPVIGTNSIKLDIAGLFGKAGATANEEERRCPPGKVMVLEGGRAHCVVKERVEVPFDTNLAAPDASYGLG

SEQ ID NO: 82732 - protein, 103 aa, Setaria italica
  Transcript Sequence Number=SeqID_16758
  Subcellular localization annotation: CTP_CleavageSite=24; ConfidenceScore=5.20e-01
VPAKVWLHSASRSSSTRARGLPARLALEAQPGLAARLLQPFVSLPHSHSLPKPDSRSTAAAGAVLLPRSGGVAWGGDPSCRGVIPSFLDVGAQVEVNNGRDGG

SEQ ID NO: 82733 - protein, 69 aa, Setaria italica
  Transcript Sequence Number=SeqID_16759
RVQLTELSTFLAYFTNNSVIYGYGCAKHHIDACLASYKVANTMVVLLSSRLILFFAISCKHWLDSNWSR

SEQ ID NO: 82734 - protein, 301 aa, Setaria italica
  Transcript Sequence Number=SeqID_16760
  Gene Ontology: Mol. function=protein serine/threonine kinase activity; Cellular component=plasma membrane; Biological process =protein amino acid phosphorylation
  Homolog annotation: Hit_ID=Q9ZQC2; Match level="QueryCoverage=81%, HitCoverage=25%, E-value=2e-90, Identity=67%"; Hit description =Putative receptor-like protein kinase
  Pfam annotation: Domain name=Pkinase; Domain location=2-238; Score =56.0; E_value=1.4e-13; Accession=PF00069.17; Description=Protein kinase domain
  Pfam annotation: Domain name=Pkinase_Tyr; Domain location=1-238; Score=33.5; E_value=5.9e-16; Accession=PF07714.9; Description =Protein tyrosine kinase
  Pfam module annotation: Pfam domain module=Pkinase::Pkinase_Tyr; Domain location=2-238::1-238
GKEKNKLQPNEVSLLSRIHHRNLVAFLGYCHEDGRNILVYEFMHNGTLKEHLHGRDKHISWIKRLEIAEDAAKGIEYLHTGCTPSIIHRDIKTSNILLDKQMRAKVSDFGLSKFAAEESHASTNVRGTLGYLDPQYYISQQLTEKSDMYSFGIILLELISGRPPISTLSFGDHFRNIGPWAKFYYEGRAIEAIIDPSISGAGGYQDVQSVWKIAEAAVRCIDAEPRKRPCMPEVVKEIQDAMALERTSSEAARCGPFSPAAASVRSGGTMRSHDMVMDNLLLMDDEDDSSFSGSVSKLKYL

SEQ ID NO: 82735 - protein, 71 aa, Setaria italica
  Transcript Sequence Number=SeqID_16761
  Gene Ontology: Mol. function=protein serine/threonine kinase activity; Cellular component=plasma membrane
  Homolog annotation: Hit_ID=Q9LYI8; Match level="QueryCoverage=60%, HitCoverage=4%, E-value=2e-11, Identity=69%"; Hit description=MAP3K delta-1 protein kinase
YLHSSHPTIVHRDLKSPNLLVDKNWVVKVTLPSITSLSMHTYFLVIVLLYFIWERPIGSHYALVPRQIISR

SEQ ID NO: 82736 - protein, 784 aa, Setaria italica
  Transcript Sequence Number=SeqID_16762
  Gene Ontology: Mol. function=protein serine/threonine kinase activity; Cellular component=plasma membrane; Biological process =protein amino acid phosphorylation
  Homolog annotation: Hit_ID=Q9LYI8; Match level="QueryCoverage=93%, HitCoverage=89%, E-value=0.0, Identity=47%"; Hit description=MAP3K delta-1 protein kinase
  Pfam annotation: Domain name=Pkinase; Domain location=520-772; Score =230.6; E_value=3.9e-66; Accession=PF00069.17; Description=Protein kinase domain
  Pfam annotation: Domain name=Pkinase_Tyr; Domain location=520-772; Score=257.6; E_value=3e-74; Accession=PF07714.9; Description=Protein tyrosine kinase
  Pfam module annotation: Pfam domain module=Pkinase::Pkinase_Tyr; Domain location=520-772::520-772
QPAAVAPAAAEEPRGLGAEAATTRLEEDYQVQLALAISASDHAGLVDADSVQIRAAELISLGATVGAGGHDRTPAEALSARYWNHSAVNYDEQLPDGFYDVCGAQLHPGFQAKFPSLDYLRAVPPGRDVAFLAVLVDRERDTTLKRLEDRAAAIAVQTRAQHGPAASAELAQKIAGLVVDAMGGLVEDADGMNMDWSIKRRELSLQLNSVVLPLGSLRVGLSRHRSLLFKVLADRVNLPCKLVKGICYTGTDEGAVNLVKVDFDSTEYIIDLMGAPGTLIPSDISGSQFQDSNNSQLRGDAIEESVAELCLALEQINGGCENRNDIGGSSSDHSSILALTSNLADLSQAELKQNVISDKDLEGDIKVNDVSKYVVPDVVNPQFAQNLHDLLLESGALLPADLLPDQNSRNIHDKESAGWLLVAQTRQNLPNGFAAKDSSSLYENAQHPVENAEDIIRDLDLRGHTASAISNEDQRVAEDYLVGMSGGSNGNSDKLSWSSTKTISSVIDDVAEYEIPWEDLDIGERIGLGSYGEVYHADWNGTEVAVKKFLDQDLSGVSLEQFKCEVRIMSRLRHPNVVLFLGYVTQSPNLSILTEYLPRGSLYRLLHRPNSQVDEVRRLKMALDVAKGMNYLHSSHPTIVHRDLKSPNLLVDKNWVVKVSDFGMSRLKHHTFLSSKSTAGTPEWMAPEVLRNEPSNEKCDVYSFGVILWELATMRVPWSGLNPMQVVGAVGFQNRRLDIPKEVDPQVASIISSCWDNDPSKRPSFSQLLSPLKQLQRLVVTESC

SEQ ID NO: 82737 - protein, 137 aa, Setaria italica
  Transcript Sequence Number=SeqID_16763
  Subcellular localization annotation: CTP_CleavageSite=73; ConfidenceScore=5.04e-01
GVGLLLFTELLDLLNEIGPSSSSLSNRTGLLVLTTAIAPLRWPATTGLLGPSQPRRSRQARRGYGSPRRQAASASAAAAGRRTLRRAKAAGGRGRARVRARPLAYLSPLVSSRLALLCSGSLVFLSPTPAPRRAAPR

SEQ ID NO: 82738 - protein, 165 aa, Setaria italica
  misc_feature (91)..(91): Xaa can be any naturally occurring amino acid
  misc_feature (123)..(123): Xaa can be any naturally occurring amino acid
  misc_feature (138)..(138): Xaa can be any naturally occurring amino acid
  Transcript Sequence Number=SeqID_16764
  Gene Ontology: Mol. function=phosphopantetheine binding
AEEIEAKLREAHLRRQQFHETLSSKARRSIRSPSGSSQKEDRGQLLEAKLVAAKQKRLSLLAKEQSRLAKLDELRQAAKNNAETRFERERXELGMRVESRVRQAEKNRMELLHARLQRQAALXEERTKKVLVQRLTWXNKYRERVRSAILQKRTAAEKRRSGCWN

SEQ ID NO: 82739 - protein, 259 aa, Setaria italica
  Transcript Sequence Number=SeqID_16765
  Gene Ontology: Mol. function=serine O-acetyltransferase activity; Cellular component=cytoplasm; Biological process=cysteine biosynthetic process from serine
  Homolog annotation: Hit_ID=Q0DGG8; Match level="QueryCoverage=100%, HitCoverage=76%, E-value=1e-112, Identity=83%"; Hit description =Probable serine acetyltransferase 5
  Pfam annotation: Domain name=Hexapep; Domain location=150-167; Score =18.5; E_value=0.028; Accession=PF00132.16; Description=Bacterial transferase hexapeptide (th
  Pfam annotation: Domain name=Hexapep; Domain location=176-193; Score =14.9; E_value=0.34; Accession=PF00132.16; Description=Bacterial transferase hexapeptide (th
  Pfam annotation: Domain name=Hexapep; Domain location=194-211; Score =9.7; E_value=11; Accession=PF00132.16; Description=Bacterial transferase hexapeptide (th
  Pfam annotation: Domain name=SATase_N; Domain location=1-96; Score =172.8; E_value=1e-48; Accession=PF06426.6; Description=Serine acetyltransferase, N-terminal
  Pfam module annotation: Pfam domain module=Hexapep::Hexapep::Hexapep:: SATase_N; Domain location=150-167::176-193::194-211::1-96
  Subcellular localization annotation: CTP_CleavageSite=38; ConfidenceScore=5.07e-01
RRDADAEPALASFLYATVLSHPSLPRSLSFHLANKLCSSTLLSTLLYDLFLATLTAHPSLRAAIVADLLAARSRDPACVGFSHCLLNYKGFLAIQAHRVAHVLWAQQRRPLALALQSRVADVFAVDIHPAAVIGKGILLDHATGVVIGETAVVGDNVSILHHVTLGGTGKAVGDRHPKIGDGVLIGAGATILGNVKIGAGAKIGAGSVVLIDVLARSTAVGNPARLIGGKKTEGEKDEDMPGESMDHTSFIRQWSDYTI

SEQ ID NO: 82740 - protein, 124 aa, Setaria italica
  misc_feature (99)..(99): Xaa can be any naturally occurring amino acid
  Transcript Sequence Number=SeqID_16766
  Homolog annotation: Hit_ID=B9S9A5; Match level="QueryCoverage=45%, HitCoverage=12%, E-value=5e-18, Identity=75%"; Hit description =Catalytic, putative
  Subcellular localization annotation: CTP_CleavageSite=5; ConfidenceScore=5.30e-01
MDTRSAAHKAAAASVSRPSAPPVLLPAEAAPPFRIPKFPPENLYFHPVSRGSPVSCSLMDTSRSKQGPDHLLVLVHGIMASPKDWTYGEAVLKRRLGDXFFIYASSSNTYTKTFDGIDIAGRRL

SEQ ID NO: 82741 - protein, 66 aa, Setaria italica
  Transcript Sequence Number=SeqID_16767
QFGSSCNNIPDYIWWTCALRLYNVMHPLNFNKVLDSASRLVAIYFQTVFRLLFPCMRLLGCKRCIN

SEQ ID NO: 82742 - protein, 158 aa, Setaria italica
  misc_feature (94)..(94): Xaa can be any naturally occurring amino acid
  Transcript Sequence Number=SeqID_16768
  Gene Ontology: Mol. function=nucleotide binding; Biological process =defense response
  Homolog annotation: Hit_ID=A1Z0K0; Match level="QueryCoverage=99%, HitCoverage=17%, E-value=5e-40, Identity=52%"; Hit description=Non -TIR-NBS-LRR type resistance protein
QLHRLIIRGHWADGTLQCPIFHGHGKNLKYLALSWSGLQEDPLQLLAPHVPNLTYLGLNRVSSADTLVIPEGCFPRLKTLVLKNLSNVSLLTIXKGCYKNIEGLYIVALPKLDKVPKDIESLCSLKKLWLLYLHKDFKAQWDRDEMHQKMPYVLELRI

SEQ ID NO: 82743 - protein, 197 aa, Setaria italica
  Transcript Sequence Number=SeqID_16769
  Gene Ontology: Mol. function=protein binding; Biological process =apoptosis
  Homolog annotation: Hit_ID=Q53Q38; Match level="QueryCoverage=100%, HitCoverage=40%, E-value=3e-74, Identity=68%"; Hit description =Leucine Rich Repeat family protein
LYCSLFPEDYIMSRESLVRQWVAEGFAVTNENNTPEDVAELNLVDLITRNMLQVKDYDELGRVDTCVMHDIVRDLALSIAKDERFGSANDQRSVIQMNQEVRRLSLCGWNDSDVRAVRFPHLRTLFSLDGVTSTPHMLDSVFSKSSYLTVLELQDSEITEVPASIGNLFNLRYVGLRRTKVKSLPECIEKLSNLQTL

SEQ ID NO: 82744 - protein, 500 aa, Setaria italica
  misc_feature (25)..(25): Xaa can be any naturally occurring amino acid
  Transcript Sequence Number=SeqID_16770
  Gene Ontology: Mol. function=nucleotide binding; Biological process =defense response
  Homolog annotation: Hit_ID=Q8LL84; Match level="QueryCoverage=99%, HitCoverage=54%, E-value=1e-167, Identity=61%"; Hit description=NBS -LRR-like protein
  Pfam annotation: Domain name=LRR_1; Domain location=166-187; Score =10.3; E_value=3.3; Accession=PF00560.25; Description=Leucine Rich Repeat
  Pfam annotation: Domain name=LRR_1; Domain location=189-210; Score =8.6; E_value=6.9; Accession=PF00560.25; Description=Leucine Rich Repeat
  Pfam annotation: Domain name=LRR_1; Domain location=212-233; Score =8.9; E_value=6; Accession=PF00560.25; Description=Leucine Rich Repeat
  Pfam annotation: Domain name=LRR_1; Domain location=369-395; Score =1.9; E_value=1.3e+02; Accession=PF00560.25; Description=Leucine Rich Repeat
  Pfam module annotation: Pfam domain module=LRR_1::LRR_1::LRR_1::LRR _1; Domain location=166-187::189-210::212-233::369-395
CPGNLKLSYNDLPGNLRNCFLYCSXFPEDYIMSRESLVRQWVAEGFAVTNENNTPEDVAELNLMKLITRNMLQVVDYDEVGRVSTCKMHDIVRDLALTAAKDEKFGSANDQGAMIQIDKEVRRLSLYGWNDSDASMVTFPCLRTLLLLDGVMSTQMWKSILSKSSYLTVLELQDSEITEVPASIGDLFNLRYIGLRRTRVKSLPETIEKLSNLQSLDIKQTQIEKLPRSIVKVKKLRHLFADRIIDEKQEDFKYFVGVQPPKDLSNLIELLTLETVEASDDLAAQLDKLRKLQSLWISNVSAMHSPKLFAALSKMLLLSSLLLNASDEEQRLCLKALNPQSKHLHRLIIRGCLADGTLECSIFHSYGKNLKYLALSWSGLLEDPLQMLELHVPNLTYLSLNKVTSAENLAISEDCFPQLKTLVMKNILNVNQLTIGDRALPNIECLYIVALPKLDKVPRGIESLSSLKKLCLLNLHKNFKAQWDRDEMHQKMPYVLELRI

SEQ ID NO: 82745 - protein, 280 aa, Setaria italica
  Transcript Sequence Number=SeqID_16771
  Gene Ontology: Cellular component=integral to membrane; Biological process=vesicle-mediated transport
MNSRRSRSVKLVSARASKALEVDIAESDPRMSSSADNTVYCCIAKGRRVIYCYNSKDGDPETEAAAALCLEHSPPHHRHYVHTSGSRSYGYLMADGHTFFAIIDPSVGNAGALQFLERVRDVFRNSVNRNGFHDSLVPAVQRLVASLEKMPHAALVLEESAERGGTNEGSGCTSSKVPLLGKSGSRKEKKKKSKDKLASTGDGEDERHGTRGVRIDVPAEEVGGMSLERSLSQSRLRRQQPSRSLWMRHVKIIIVVDAVICLLLFAAWLAVCKGFRCVSS

SEQ ID NO: 82746 - protein, 73 aa, Setaria italica
  Transcript Sequence Number=SeqID_16772
RQKYLGKHFRLTFLFFLKVIFGCVISCMDHLYFCQCFLGIFDFMARNCGGSACYEGKRECLVCEKIWIIKKCS

SEQ ID NO: 82747 - protein, 64 aa, Setaria italica
  Transcript Sequence Number=SeqID_16773
  Gene Ontology: Mol. function=protein binding; Cellular component =cytoskeleton; Biological process=regulation of actin filament polymerization
  Homolog annotation: Hit_ID=B6U3I7; Match level="QueryCoverage=95%, HitCoverage=29%, E-value=1e-25, Identity=90%"; Hit description=Actin- related protein 2/3 complex subunit 3
  Pfam annotation: Domain name=P21-Arc; Domain location=1-64; Score= -55.6; E_value=2.1e-05; Accession=PF04062.6; Description=P21-ARC (ARP23 complex 21 kDa subunit)
MVYHSSFVDDDGITKACGCPLLPLKTHIKGPAPASDPDKADIVDEAITFFRANVFLQNFRVEKH

SEQ ID NO: 82748 - protein, 66 aa, Setaria italica
  Transcript Sequence Number=SeqID_16774
  Gene Ontology: Mol. function=protein binding; Cellular component =cytoskeleton; Biological process=regulation of actin filament polymerization
  Homolog annotation: Hit_ID=B6U3I7; Match level="QueryCoverage=72%, HitCoverage=23%, E-value=2e-22, Identity=97%"; Hit description=Actin- related protein 2/3 complex subunit 3
  Pfam annotation: Domain name=P21-Arc; Domain location=3-65; Score= -55.8; E_value=2.1e-05; Accession=PF04062.6; Description=P21-ARC (ARP23 complex 21 kDa subunit)
MCPWNCDDKLMTEHFCLNSELLRNYLKQIREETSGRLLNCAYRANGFPNKWWLAFAKRKFMNIVIL

SEQ ID NO: 82749 - protein, 175 aa, Setaria italica
  Transcript Sequence Number=SeqID_16775
  Gene Ontology: Mol. function=protein binding; Cellular component =cytoskeleton; Biological process=regulation of actin filament polymerization
  Homolog annotation: Hit_ID=B6U3I7; Match level="QueryCoverage=98%, HitCoverage=84%, E-value=4e-79, Identity=85%"; Hit description=Actin- related protein 2/3 complex subunit 3
  Pfam annotation: Domain name=P21-Arc; Domain location=1-174; Score =356.3; E_value=5.6e-104; Accession=PF04062.6; Description=P21-ARC (ARP23 complex 21 kDa subunit)
LLTYLSFTLDDDGITKACGCPLLPLKTHIKGPAPASDPDKADIVDEAITFFRANVFFKNFRVKSTADKLLIYLTFYINIALKRLEGCRTLAVGTKAIINLGLEKVPVPGEPGFPFPGLFTPPESQEEAELLRNYLKQIREETSGRLLNCAYRANGFPNKWWLAFAKRKFMNIVIL

SEQ ID NO: 82750 - protein, 164 aa, Setaria italica
  Transcript Sequence Number=SeqID_16776
  Gene Ontology: Mol. function=protein binding
  Homolog annotation: Hit_ID=Q84X59; Match level="QueryCoverage=90%, HitCoverage=53%, E-value=2e-37, Identity=54%"; Hit description=Ve resistance gene-like protein (Fragment)
  Pfam annotation: Domain name=FNIP; Domain location=83-126; Score =10.8; E_value=0.08; Accession=PF05725.4; Description=FNIP Repeat
  Pfam annotation: Domain name=LRR_1; Domain location=27-49; Score=9.1; E_value=5.5; Accession=PF00560.25; Description=Leucine Rich Repeat
  Pfam annotation: Domain name=LRR_1; Domain location=51-73; Score =12.6; E_value=1.2; Accession=PF00560.25; Description=Leucine Rich Repeat
  Pfam annotation: Domain name=LRR_1; Domain location=75-97; Score =17.0; E_value=0.081; Accession=PF00560.25; Description=Leucine Rich Repeat
  Pfam annotation: Domain name=LRR_1; Domain location=99-121; Score =14.4; E_value=0.47; Accession=PF00560.25; Description=Leucine Rich Repeat
  Pfam module annotation: Pfam domain module=FNIP::LRR_1::LRR_1::LRR _1::LRR_1; Domain location=83-126::27-49::51-73::75-97::99-121
SYHPYYKESITVTLKGQETTLVQILSVFMYIDLSNNNFEGVIPDEIGDLKLLKQLNLSRNSFTGVIPPRIANMLQLESLDLSYNQLSGEIPPAMAAMSFLEVLNLSYNHLSGQIPQSSQFLTFPTTSFLGNDGLCGKPLIRSCDINHAPSAPATPGIFLKGSLE

SEQ ID NO: 82751 - protein, 205 aa, Setaria italica
  Transcript Sequence Number=SeqID_16777
  Gene Ontology: Mol. function=substrate-specific transmembrane transporter activity; Cellular component=integral to membrane; Biological process=transmembrane transport
  Homolog annotation: Hit_ID=B6U4F9; Match level="QueryCoverage=98%, HitCoverage=39%, E-value=9e-83, Identity=83%"; Hit description=Sugar transport protein 5
MPGGAFLLNSGGGGGMADYGGGLTVPVVVTCLMAASGGLIFGYDIGISGGVSEMESFLKKFFPGLLKRTAHANKDVYCIYNNQALTAFTSSLYAFGMVGTLVASRVTRRLGRQAIMLIGGSLFLVGALVNAAAANVAMLIVGRMLLGLGLGFSGQATPVYLAEVSPPRWRGGFISAFPLFISIGYLVANLINYGTSRIPGWGGAL

SEQ ID NO: 82752 - protein, 484 aa, Setaria italica
  Transcript Sequence Number=SeqID_16778
  Gene Ontology: Mol. function=UDP-glucose:glycoprotein glucosyltransfer ase activity; Biological process=protein amino acid glycosylation
  Homolog annotation: Hit_ID=Q6ESI8; Match level="QueryCoverage=100%, HitCoverage=29%, E-value=0.0, Identity=71%"; Hit description =Putative UDP-glucose:glycoprotein glucosyltransferase
TLPINDGEDTSILITRLFLYIKETYSTQLAFEFLSNIHKSRNGEDDYNEDLIEAHHVEGAFVDSLLSSAKSHPQDVLLKLQKENMYREEAEQSSRFVHKLGLYKLQCCLLMNGLVHEANEDATMNAMNDELPRIQEQVYYGHIQSHTDVLEKFLSESSYKRYNPSITGKSAGKKFVSLFASYHQEDSVFNDIKYLQSPATVDDAKPVTHLLAIDLSSKVGIKLLHEAIRYLMDGTNRGRVGLLLYVRTASSLPILLLKDIFDRTISSFSYKEKVLVFLHEVLKFYGAQPTPVSSVAGDWTRTMMEKVYSLAAEIALPVDDYKAWFESFSADTVLKGMDKLSDFVFGQLGLVFGSNAVITNGRVFVMKEGEPFLADDLGLLESMEYDLRTKYIFEIIEEVEFAGVDPDDLTSQFYSDIAMLISSSMSVRERPSERAHFEILHAEHSAIRLNNENSSIHIDAVIDPLSPTGQKLAPLLRILWKQIQ

SEQ ID NO: 82753 - protein, 157 aa, Setaria italica
  misc_feature (133)..(133): Xaa can be any naturally occurring amino acid
  Transcript Sequence Number=SeqID_16779
  Gene Ontology: Mol. function=DNA binding; Cellular component=nucleus; Biological process=regulation of transcription
  Homolog annotation: Hit_ID=Q5Y5S4; Match level="QueryCoverage=78%, HitCoverage=34%, E-value=2e-47, Identity=77%"; Hit description=NAC transcription factor
  Pfam annotation: Domain name=NAM; Domain location=1-56; Score=13.5; E_ value=1.1e-08; Accession=PF02365.7; Description=No apical meristem (NAM) protein
PNRVTPSGYWKATGADRMVRVEGNRSIGLKKTLVFYVGKAPKGLRSSWIMNEYRLPHGEADRYQKEISLCRVYKRPGIEDNFHLTTNTRSSGSKAAASMEKKHHRTSASPRLAPMFDGGHSSSAHMNKPYSGXSMASSAAARAAATMAPQTSMDVPV

SEQ ID NO: 82754 - protein, 90 aa, Setaria italica
  Transcript Sequence Number=SeqID_16780
  Pfam annotation: Domain name=DDA1; Domain location=4-55; Score=71.2; E_value=3.7e-18; Accession=PF10172.1; Description=Det1 complexing ubiquitin ligase
PHADCFFPFPCVSHQNVTPATYIATHRTDPPPNQVITTEPRNILLRHFYQKSEEKLRPKRAAPDNLAPENNNKQPRGPVADVGSQSNARS

SEQ ID NO: 82755 - protein, 237 aa, Setaria italica
  misc_feature (73)..(73): Xaa can be any naturally occurring amino acid
  misc_feature (227)..(227): Xaa can be any naturally occurring amino acid
  Transcript Sequence Number=SeqID_16781
  Gene Ontology: Mol. function=dihydroneopterin aldolase activity; Biological process=folic acid and derivative metabolic process
  Homolog annotation: Hit_ID=B4FPQ2; Match level="QueryCoverage=54%, HitCoverage=98%, E-value=6e-52, Identity=76%"; Hit description =Dihydroneopterin aldolase
  Pfam annotation: Domain name=FolB; Domain location=106-221; Score =169.0; E_value=1.4e-47; Accession=PF02152.10; Description =Dihydroneopterin aldolase
  Subcellular localization annotation: CTP_CleavageSite=11; ConfidenceScore=5.37e-01
APRLGFSGLLRSSPASQALSTAGRWGVPGFQLLLCSLPCGLVRLHICPPSANSGVAAAPSFLAVKQRHPHFTXVHSASFSSQHSQPTRGAAGPLMAERELIGKDKLVLRGLQFHGFHGVKQEEKTLGQKFVVDVDAWMDLSTAGETDSISDTVSYTDIYRIAKNVVEGPSQNLLESVAHQIASATLLKFPQISAVRVEVKKPHVAVQGIVDYLGVEIVRYRKDKTGXHQELHCSSIL

SEQ ID NO: 82756 - protein, 129 aa, Setaria italica
  misc_feature (73)..(73): Xaa can be any naturally occurring amino acid
  misc_feature (93)..(93): Xaa can be any naturally occurring amino acid
  Transcript Sequence Number=SeqID_16782
  Gene Ontology: Mol. function=acid phosphatase activity
  Homolog annotation: Hit_ID=Q2QN72; Match level="QueryCoverage=72%, HitCoverage=23%, E-value=4e-30, Identity=54%"; Hit description =Diphosphonucleotide phosphatase 1, putative, expressed
PRPLPSLLSSSGIPILLWFTGRPSAPNTANQQDALQFQYANFTNDAYNKSGKGSLRLQLINQRADFAFALFSXGLSAPKLIAVSNKVTFENPXGGHQMFSPAETFTFGRNCMRGSPARTVGWRDPGHSM

SEQ ID NO: 82757 - protein, 66 aa, Setaria italica
  Transcript Sequence Number=SeqID_16783
VSGSQEAGASVESELECSPSPVFARSIYFRVCLDYNFQICVSLIVKWLAIYANCSLKFEIKQIQSI

SEQ ID NO: 82758 - protein, 174 aa, Setaria italica
  Transcript Sequence Number=SeqID_16784
  Gene Ontology: Mol. function=receptor activity; Cellular component =integral to membrane
  Homolog annotation: Hit_ID=O80813; Match level="QueryCoverage=75%, HitCoverage=73%, E-value=4e-23, Identity=43%"; Hit description=Ycf20- like protein
  Pfam annotation: Domain name=DUF565; Domain location=92-153; Score =90.9; E_value=4.6e-24; Accession=PF04483.4; Description=Protein of unknown function (DUF565)
  Subcellular localization annotation: CTP_CleavageSite=31; ConfidenceScore=5.15e-01
SCRWEKPGTFSLLWASPSYRRNSRQMQWAIRTMSDDSSGQPGNSTRLFSAIQSFWNKFSAKLKKARKGLATKIMFFLIGFYCATAFATVIGQTGDWDILSAGLAVAIVEGIGALMYSASFGFLGRIRNMVTMFNYWKAGLTLGLFLDSFKYEVDGLLDSCNPFNFEINIFTGLW

SEQ ID NO: 82759 - protein, 194 aa, Setaria italica
  Transcript Sequence Number=SeqID_16785
  Gene Ontology: Cellular component=anchored to membrane
  Homolog annotation: Hit_ID=A6YTC7; Match level="QueryCoverage=86%, HitCoverage=86%, E-value=2e-27, Identity=37%"; Hit description=GPI -anchored protein-like protein II
MDSRISLLCFLVLAFSLLHCARSDGNDAQLLKGINSYRSSLKVPALTENKNAACLAEQLAKQFKGQQCTNTTGANTVIGTEQQFPDYPKYLDHCHLNASVTEDGQVMPACVPGLVPGVVLTNYTKSQYNRFLNDSQFSGVGIANEGDWVVVVLSTSTGSGDYSPATPGSNWAAPVQPFSLMILLLVGSVVLLMK

SEQ ID NO: 82760 - protein, 110 aa, Setaria italica
  misc_feature (100)..(100): Xaa can be any naturally occurring amino acid
  Transcript Sequence Number=SeqID_16786
  Subcellular localization annotation: CTP_CleavageSite=95; ConfidenceScore=5.73e-01
DFGCGPRYRRSPSYGRRSYSPRDRSPRRRSDSRSPPPPRARSLSRSPPPARARSYSKSPPPPPPRNNSRSSPPARDLSRSPPPPPARRSYSRSPAAAPAXESPYGNGNDA

SEQ ID NO: 82761 - protein, 237 aa, Setaria italica
  Transcript Sequence Number=SeqID_16787
  Gene Ontology: Mol. function=nucleic acid binding; Cellular component= nucleolus
  Homolog annotation: Hit_ID=B6U4H0; Match level="QueryCoverage=47%, HitCoverage=43%, E-value=2e-38, Identity=72%"; Hit description =Splicing factor, arginine/serine-rich 7
  Pfam annotation: Domain name=RRM_1; Domain location=4-69; Score=59.8; E_value=1e-14; Accession=PF00076.14; Description=RNA recognition motif. (a.k.a. RRM, RBD, o
  Pfam annotation: Domain name=zf-CCHC; Domain location=85-102; Score =33.1; E_value=1.1e-06; Accession=PF00098.15; Description=Zinc knuckle
  Pfam module annotation: Pfam domain module=RRM_1::zf-CCHC; Domain location=4-69::85-102
MARVYVGNLDPRVTAREIEDEFRTFGVLRSVWVARKPPGFAFIDFDDRRDAQDAIRELDGKNGWRVELSTKAGGGRGRDRNGSDMKCYECGETGHFARECRLRIGSGGLGTGRRRSRSPRYRSRSRSRSRSPRYRRSPSYGRRSYSPRDRSPRRRSDSRSPPPPRARSLSRSPPPARARSYSKSPPPPPPRNNSRSPPPARDLSRSPPPPPARRSYSRSPGQQPQRDESPYGNGNDA

SEQ ID NO: 82762 - protein, 119 aa, Setaria italica
  misc_feature (107)..(107): Xaa can be any naturally occurring amino acid
  Transcript Sequence Number=SeqID_16788
  Homolog annotation: Hit_ID=B4FNT4; Match level="QueryCoverage=100%, HitCoverage=47%, E-value=5e-58, Identity=87%"; Hit description =Circadian clock coupling factor ZGT
LVVKRYRCTHSATCVCLKGHISEDAMYLVFEHMKWNPKMIAIFSSVCKWFDEFAKRVLWKEFCHARAPKMMTDLHSDGSHIVDGNWKALGKLLIYCSACPRGDLFSXNIHVPIPGHFVY

SEQ ID NO: 82763 - protein, 127 aa, Setaria italica
  Transcript Sequence Number=SeqID_16789
  Gene Ontology: Mol. function=protein serine/threonine kinase activity; Cellular component=cytoplasm; Biological process=protein amino acid phosphorylation
  Homolog annotation: Hit_ID=Q6Y2W8; Match level="QueryCoverage=100%, HitCoverage=18%, E-value=8e-58, Identity=85%"; Hit description=GCK -like kinase MIK
  Pfam annotation: Domain name=Pkinase; Domain location=15-127; Score= -100.5; E_value=0.017; Accession=PF00069.17; Description=Protein kinase domain
  Pfam annotation: Domain name=Pkinase_Tyr; Domain location=15-127; Score=-135.2; E_value=9.7e-05; Accession=PF07714.9; Description =Protein tyrosine kinase
  Pfam module annotation: Pfam domain module=Pkinase::Pkinase_Tyr; Domain location=15-127::15-127
MSDSASMAAAIEARFSSRDLIGRGSFGDVYKGFDKELNKEVAIKVIDLEEAEDDIEDIQKEISVLSQCRCPYITDYYGSYLHQTKLWIVMEYMAGGSVADLLQAGPPLDEMSIACILRDLLHAIEYL

SEQ ID NO: 82764 - protein, 151 aa, Setaria italica
  Transcript Sequence Number=SeqID_16790
  Gene Ontology: Mol. function=superoxide dismutase activity; Cellular component=cytoplasm; Biological process=superoxide metabolic process
  Homolog annotation: Hit_ID=P11428; Match level="QueryCoverage=100%, HitCoverage=100%, E-value=6e-77, Identity=96%"; Hit description =Superoxide dismutase [Cu-Zn] 2
  Pfam annotation: Domain name=Sod_Cu; Domain location=1-151; Score =355.3; E_value=1.2e-103; Accession=PF00080.12; Description =Copperzinc superoxide dismutase (SODC)
MVKAVAVLAGSDVKGTIFFSQEGDGPTTVTGSISGLKPGLHGFHVHALGDTTNGCMSTGPHFNPAGKEHGAPEDENRHAGDLGNVTAGEDGVANVNITDCQIPLTGPHSIIGRAVVVHADPDDLGKGGHELSKSTGNAGGRVACGIIGLQG

SEQ ID NO: 82765 - protein, 82 aa, Setaria italica
  Transcript Sequence Number=SeqID_16791
  Gene Ontology: Mol. function=transcription regulator activity; Cellular component=nucleus; Biological process=regulation of transcription
NASSPRTPPDEERKPAAGEAGSGNGKGKEVAAEPPKDYIHVRARRGQATDSHSLAERVRRRRTTCLTQLTRFVVKLQSFTWL

SEQ ID NO: 82766 - protein, 372 aa, Setaria italica
  Transcript Sequence Number=SeqID_16792
  Gene Ontology: Mol. function=transcription regulator activity; Cellular component=nucleus; Biological process=regulation of transcription
  Homolog annotation: Hit_ID=B6UBF8; Match level="QueryCoverage=93%, HitCoverage=81%, E-value=7e-69, Identity=52%"; Hit description=BHLH transcription factor
  Pfam annotation: Domain name=HLH; Domain location=200-250; Score =36.1; E_value=1.4e-07; Accession=PF00010.18; Description=Helix-loop -helix DNA-binding domain
  Subcellular localization annotation: CTP_CleavageSite=40; ConfidenceScore=5.53e-01
LVPSRSPSPSSLAAAASGAAAVDTALMEQLASRLGVSVPSSSRYASCYSSPVGSPSKPAPAPFGAPLLGADAARLSCFAASGGKLSRVASSQLLLGEPVTAPAPGTAQQHASDGSSSDSPSRKRKAPGGKSKAKEAATTATPKSREPETRAKKCKLSADTADEERKPAAGEAGSGNGKGKEVAAEPPKDYIHVRARRGQATDSHSLAERVRREKISERMKLLQDLVPGCSKVTGKAVMLDEIINYVQSLQRQVEFLSMKLSTVNPRLEIDVDSFIPKDANQPCAPAASSLPPPPVYSLEDSSPALCYASSQGTAAPSAVTSAKSFATPSTFVNHGIPDHSLEGFHNANSQMGSLWEEDDLQSLVLMGFRGNT

SEQ ID NO: 82767 - protein, 66 aa, Setaria italica
  Transcript Sequence Number=SeqID_16793
MDGAKARDPHPAIWASDMPSDDDSADGPAADDSADDAADKAGAAPSMLTRWGTAAAMVAAALALGA

SEQ ID NO: 82768 - protein, 413 aa, Setaria italica
  misc_feature (172)..(172): Xaa can be any naturally occurring amino acid
  Transcript Sequence Number=SeqID_16794
  Gene Ontology: Mol. function=nutrient reservoir activity; Cellular component=anchored to membrane
  Homolog annotation: Hit_ID=B6SL10; Match level="QueryCoverage=79%, HitCoverage=77%, E-value=1e-148, Identity=79%"; Hit description =Fasciclin-like arabinogalactan protein 8
  Pfam annotation: Domain name=Fasciclin; Domain location=196-328; Score=73.8; E_value=6.3e-19; Accession=PF02469.14; Description =Fasciclin domain
MGLRRLAVAAAVLAVCAAAVEGFDILQILGKHDEFSQFCKLLNETHLAGDINRDRTITVLAVANGDMGHLTSAHYSLGTIRHILELHVVADYYDEKKLKQLSHGATAASTLFQRSGFAPGMAGYVNITQHRGGKVTFIVDDAADSVKPVTFVKQIESHRYDYSVLQVSSVLXSPEAEAPVAPPAPVNLTELLSKKYCKSFAGLLAADAKAFDTINGTKDTALTLFCPVDAAVAAFMPKFKNLTAKAKTAILLYHAVPDYYSMQFLKSNKGKVTTLASTSVAKKDYTYEAQTEADTVTLDTTVTTSTIQATVRDDDPLAIYAVSKFLQPKELFKPKKAEDLAPSPAPEVPKKKTKKKPGSTSAAAAPSDDDSADGPAADDSADDAADKAGAAPSMLTRWGTAAAMVAAALALGA

SEQ ID NO: 82769 - protein, 236 aa, Setaria italica
  Transcript Sequence Number=SeqID_16795
  Gene Ontology: Mol. function=protein dimerization activity; Cellular component=nucleus; Biological process=regulation of transcription, DNA-dependent
  Homolog annotation: Hit_ID=B6TV32; Match level="QueryCoverage=98%, HitCoverage=45%, E-value=1e-110, Identity=81%"; Hit description =Transcription factor TGA6
  Pfam annotation: Domain name=bZIP_1; Domain location=118-168; Score =22.7; E_value=0.0015; Accession=PF00170.13; Description=bZIP transcription factor
  Pfam annotation: Domain name=bZIP_2; Domain location=116-166; Score =20.1; E_value=0.0039; Accession=PF07716.7; Description=Basic region leucine zipper
  Pfam module annotation: Pfam domain module=bZIP_1::bZIP_2; Domain location=118-168::116-166
  Subcellular localization annotation: CTP_CleavageSite=62; ConfidenceScore=5.22e-01
MYAAAGYLAARPPTLEIFPSWPMSHLQQPYSGNSHSVGSTSESSSGQNAMPQAELVSPGSMRADSGQQQEVLMVTVDDYNYEQGLGVAATTAPIFQQHTESQDKRKQGSTRKDGKLLDAKTERRLAQNREAARKSRLRKKAYVQQLETSRIRLQQIEQELQGARSQGLFPGGGSASGDMNSGALMFDMEYARWLEDDSKHMTQLQGILQAQNIDANLGTIVEECMRHYDELFHLRA

SEQ ID NO: 82770 - protein, 287 aa, Setaria italica
  Transcript Sequence Number=SeqID_16796
  Homolog annotation: Hit_ID=B9RDS4; Match level="QueryCoverage=94%, HitCoverage=12%, E-value=9e-55, Identity=45%"; Hit description=CRP, putative
PGRSSMHMRNREHQVCQVSEALVFSSLLRYENILLATDILPDVLSASVNRNSVSATARHPGSAAFAYVRYFLKKYRDVASVARWEKNFRTTCDQRLLAELDNGRSIDGDFVSSSGVSAGEEIDEQVRQKLNGRSSRLMQNMKEIVQRQADEVQRSLKEKKVLPAPKSPPSFEKEDSYQISHDIVFGLVECIRQNGGANPDGDLSIVASAVSAVVVNAGHVIAKHLDFAGGNYQGVNSVSNSLNFVRHTLRIHINSLCLLKDTLGDRFSRVFEIALAAEASAAVTAAF

SEQ ID NO: 82771 - protein, 101 aa, Setaria italica
  misc_feature (9)..(9): Xaa can be any naturally occurring amino acid
  misc_feature (22)..(22): Xaa can be any naturally occurring amino acid
  Transcript Sequence Number=SeqID_16797
  Gene Ontology: Mol. function=protein transporter activity; Cellular component=nuclear pore; Biological process=protein import into nucleus, docking
  Homolog annotation: Hit_ID=Q8GTC5; Match level="QueryCoverage=98%, HitCoverage=11%, E-value=9e-45, Identity=86%"; Hit description =Importin beta-like protein (Fragment)
DTSGILQGXKGPKAQLMIPYAXHLLQFTEAVFKDRSRDESVTKAAVAVLGDLADTLGASSKDMFQTNLFHVEFLRECIDSDDEVRETASWAQGMINQVVVS

SEQ ID NO: 82772 - protein, 810 aa, Setaria italica
  misc_feature (424)..(424): Xaa can be any naturally occurring amino acid
  Transcript Sequence Number=SeqID_16798
  Gene Ontology: Mol. function=protein transporter activity; Cellular component=nuclear pore; Biological process=protein import into nucleus, docking
  Homolog annotation: Hit_ID=Q8GTC5; Match level="QueryCoverage=99%, HitCoverage=92%, E-value=0.0, Identity=89%"; Hit description =Importin beta-like protein (Fragment)
  Pfam annotation: Domain name=HEAT; Domain location=112-149; Score =2.4; E_value=25; Accession=PF02985.14; Description=HEAT repeat
  Pfam annotation: Domain name=HEAT; Domain location=156-192; Score =20.7; E_value=0.0059; Accession=PF02985.14; Description=HEAT repeat
  Pfam annotation: Domain name=HEAT; Domain location=303-339; Score =14.3; E_value=0.51; Accession=PF02985.14; Description=HEAT repeat
  Pfam annotation: Domain name=HEAT; Domain location=345-381; Score =20.6; E_value=0.0064; Accession=PF02985.14; Description=HEAT repeat
  Pfam annotation: Domain name=HEAT; Domain location=439-478; Score =9.6; E_value=3.3; Accession=PF02985.14; Description=HEAT repeat
  Pfam annotation: Domain name=HEAT; Domain location=584-621; Score =3.5; E_value=18; Accession=PF02985.14; Description=HEAT repeat
  Pfam annotation: Domain name=HEAT; Domain location=67-104; Score=0.0; E_value=49; Accession=PF02985.14; Description=HEAT repeat
  Pfam module annotation: Pfam domain module=HEAT::HEAT::HEAT::HEAT::HEA T::HEAT::HEAT; Domain location=112-149::156-192::303-339::345 -381::439-478::584-621::67-104
EITLGIDDAKDSAKKELLTQQWVSMDPSIKLKIKESLLVTLGSSVHDARHTTSQVIAKVASIEIPRREWQDLIAQLLGNMTSPSAYAPLKQATLEALGYVCEEISPQHLEQDQVNAVLTAVVQGMNQTELSFEVRHAAVKALYNALDFAESNFANEMERNYIMKVICDTAVSKEVEIRQAAFECLVAIASIYYSHLDPYMQTIFNLTANAVKGDEEQVALQAVEFWSAICDEEIALQDEYEGSDDGNSTIHFRFIEKALPSLVPMLLETLLKQEEDQDQDDNVWNISMSGGTCLGLIARTVGDAIVPLVMPFVEANITKPDWHCREAATFAFGSILEGPSVEKLAPLVQAGLDFLLNTMNDSNSQVKDTTAWTLGRVFEILHSPAGANPIINNSNLPRIMAVLLESSKDVPNVAEKVCGAIYFXAQGYEDAESMSSVLTPYLPNVIAALLSAADRADTTHFRLRASAYEALNEIVRVSNIPETSGIIGQLLQEIMRRLDLTFDLQILSSGDKEKQSDLQALLCGVLQVIIQKLSSTDAKSIIIQTADQLMLLFLRVFACHSSTVHEEAMLAIGALAYATGSDFQKYMPKFFTYLEAGLQNYEEYQVCSISVGVVGDICRALEDKILPFCDRIMAVLLKDLSNSMLNRSVKPPIFSCFGDIALAIGENFEKYLPYAMPMLQGAAELLGTLDQSDDDMVDYGNQLRRGIFEAYSGILQGIKGPKAQLMIPYAAHLLQFTEAVFKDRSRDESVTKAAVAVLGDLADTLGASSKDLFQTHLFHVEFLRECLDLDDEVQETASWAQGMINQAVVS

SEQ ID NO: 82773 - protein, 254 aa, Setaria italica
  Transcript Sequence Number=SeqID_16799
  Gene Ontology: Cellular component=plasma membrane
  Homolog annotation: Hit_ID=B2ZAQ7; Match level="QueryCoverage=93%, HitCoverage=35%, E-value=2e-29, Identity=32%"; Hit description=UNE1 -like protein
AGVFDSVLRDALRVAHRFARALAEVLRCAGWDLTAAAAAAYPGVSYSKGGHCRYALLSRVCLSMFDGFDSYEFGAAADNAELEGIELAIRRNESLQQFIEHSDADPIELMNSSPDCEFAQFCDRKYKQLIHPGIESSLFGNSDCGTLPVMSVAGPLYELFVAMASSIWTLHRLAWAYDPAVGIFQVSRGTEFSTVYMENIVRSKGFSGSKELGKTARPKVGFTVVPGFRLGGTVIQCRVYLDHGKREEGIIDSI

SEQ ID NO: 82774 - protein, 82 aa, Setaria italica
  misc_feature (22)..(22): Xaa can be any naturally occurring amino acid
  misc_feature (43)..(43): Xaa can be any naturally occurring amino acid
  Transcript Sequence Number=SeqID_16800
DNKDVKASDESKLSISGPGIIXSKNNDESDGIQEAESMENTPXTAQLMMHQEQLLDDMVTDTEEVKTKVEKKQIQQERKDED

SEQ ID NO: 82775 - protein, 139 aa, Setaria italica
  misc_feature (89)..(89): Xaa can be any naturally occurring amino acid
  Transcript Sequence Number=SeqID_16801
VRVEDGKVQGSALVSSLDQSNENLSAGNTEIGSGILDGKATEESHQIHKDNEIVADQLDSKREERTDQNSGRNPVEVNLDDKDKEHVQXIDQNSSRNHVDITTHDMCQTNEHVEKIDHVERIDHDSSRNPVEIMPEVIT

SEQ ID NO: 82776 - protein, 262 aa, Setaria italica
  misc_feature (253)..(253): Xaa can be any naturally occurring amino acid
  Transcript Sequence Number=SeqID_16802
SLFPLNCDFSTHDMCQTNEHVEKIDHVERIDHDSSRNPVEIMPEVITVCLVPGNVEKVDEDSSRNNIEKEIAQKDNKDVKASDESKLSISGPGIIFSKNNDESDGIQEAESMENTPTAQLMMHQEQLLDDMVTDTEEVKQGERTITDESELEQDEKKALAGLIELVSSPAVASLVKPAEKKGPEFPGLNETGMKIEQDYTNGELREHDLISKGGVQGGAIATMDRRSPALAILALIFAMTIGITIIVRLYAPXRATKLQMDL

SEQ ID NO: 82777 - protein, 87 aa, Setaria italica
  misc_feature (14)..(14): Xaa can be any naturally occurring amino acid
  Transcript Sequence Number=SeqID_16803
  Gene Ontology: Mol. function=nucleoside-triphosphatase activity; Cellular component=membrane; Biological process=transport
  Homolog annotation: Hit_ID=Q7XML5; Match level="QueryCoverage=100%, HitCoverage=9%, E-value=3e-29, Identity=70%"; Hit description =OSJNBa0040D17.13 protein
KVAFRGLTLSIGKXKLLQCVTGKLSPGRVTAIMGPSGAGKTTFLNAVLGKTSGYKKDGIVLINGIPGLMQSYKKIIGFVPQDDIVHG

SEQ ID NO: 82778 - protein, 127 aa, Setaria italica
  Transcript Sequence Number=SeqID_16804
FQIRYREAQQVDQRSQRFRRRGHRERTARHVHVADRRHCQVRRSMGAPTMPDFHVAPGPPTVTCRLAVSSHSSSSTFLSSHCHCLHPLQSCIFLSRFFACILHPASKVNKVLRTNLILFTGFLGCLL

SEQ ID NO: 82779 - protein, 819 aa, Setaria italica
  misc_feature (39)..(39): Xaa can be any naturally occurring amino acid
  Transcript Sequence Number=SeqID_16805
  Homolog annotation: Hit_ID=B9SV90; Match level="QueryCoverage=86%, HitCoverage=63%, E-value=6e-29, Identity=47%"; Hit description =Bromodomain-containing protein
VRKVIPKNSENDESITFHKQQVKKTTSQSSKSDFSSQKXHIKKPVCSTREGPDLSSRKEPVEDPICTNVDDAGFLSTKRLEEKPISRNSEDLGHCHQESPKKPSCRDGQDDLGNSCSEEAAKKPARMNSQDAMGSDISAATIASVGDGSNGLSMSQANATEPAGCTVANGFLDKDISSPLDEIRSEKTDDIFAKPNYKSIVVDETRRKTYDTYEEQPAVESDLVFDIFSTEPKELVNVGLDAEHSYAYARSLARFAGSLGAQGWRIASERIRQALPAEVKYGRGWVGEYEPPLPSILVVNDQSRYLKSSEANVRRNASLPRDNDRLRPTESNNPKDMSLSLNRITTSTNVVGVPGPLESPEFKPRLFGVTAEPQHRSTDALSPHENHRVPGNVAKTKRTANEQTRKGNSSSGARPIEMKPQKGASGAPDMPALNKTAGQPRPFFQPAESTRTQQMRKVDSLKSNVPIEMAPQRLECAKGAASGVYDTPSSNGQPKHFFPSQAAAASGVHDIPSPNGQPKRLFQSKAVASSGAHDAPSNGQPKHFFQSQGPASSGVHDMPSTNGQPKPFFQPQEATVPQPRNEATWVYHGRPGDGKVGTSNKSRPSTSVGFVNKNQAVNAATFAMNLNGQKNVSDHAKSVGSTAMPGLANIPNRGVDASRNMFSAFPAAVRENQSIPPAPSAQSWISFGAATENKPAIVSPTFLDNNSSWKMPFANVRPSDDTKIGAVPQFFRQPVQVVRESPVQNNGLVIFPQLVQPDFMRSQGQPQWQGLVPHMQQKPSKDVLRPDLNIGFPSPGSPPARQSSGINLEAQQPDLALQL

SEQ ID NO: 82780 - protein, 85 aa, Setaria italica
  Transcript Sequence Number=SeqID_16806
  Gene Ontology: Mol. function=catalytic activity; Biological process =metabolic process
  Homolog annotation: Hit_ID=Q2RAR7; Match level="QueryCoverage=43%, HitCoverage=10%, E-value=7e-10, Identity=81%"; Hit description =Saccharopine dehydrogenase family protein, expressed
  Subcellular localization annotation: CTP_CleavageSite=19; ConfidenceScore=5.66e-01
MATMGVVRACAPPAAAATAAAKRNPSRSARVLVLGGTGRVGGSTATALSKLRPDLNILVGGRNREKGESFAAKLGEQSEFVQVDT

SEQ ID NO: 82781 - protein, 89 aa, Setaria italica
  misc_feature (7)..(7): Xaa can be any naturally occurring amino acid
  Transcript Sequence Number=SeqID_16807
FFVFFFXFFFFFFCLEIDYMWDPYKNRIQGHNRLKNIPVQSQAICMEPKVFATTTTRHVGTPTNKHDQRLKLIQKEFDKLSSDGPNDKE

SEQ ID NO: 82782 - protein, 226 aa, Setaria italica
  Transcript Sequence Number=SeqID_16808
  Homolog annotation: Hit_ID=B6TLX6; Match level="QueryCoverage=98%, HitCoverage=99%, E-value=4e-84, Identity=73%"; Hit description=PYM protein
  Pfam annotation: Domain name=Mago-bind; Domain location=20-46; Score =57.8; E_value=4e-14; Accession=PF09282.2; Description=Mago binding
MATSSDGGDQRRLLSIPKEGERIIAPTRRPDGTLRKAIRIRAGYVPQEEVAIYQSKGALMRKSGPDVPPGYDPALAVDGKPKTKAAKRNERRKEKRQQQASSTNDKGKGLDIEEAGAGETDKVLSSKTDKQRDSVESVTKQIKGIAISESPAAPSTNANDSSQPESSAPDIDKKIRALKKKIRLAEAQLQGDPEKLKSEMQEKLKKIEGWRAELKLLEDNRAPTGS

SEQ ID NO: 82783 - protein, 113 aa, Setaria italica
  Transcript Sequence Number=SeqID_16809
  Gene Ontology: Mol. function=N-acetyltransferase activity; Cellular component=core TFIIH complex; Biological process=metabolic process
  Homolog annotation: Hit_ID=B6TH38; Match level="QueryCoverage=97%, HitCoverage=42%, E-value=9e-46, Identity=82%"; Hit description=N -acetyltransferase
  Pfam annotation: Domain name=Acetyltransf_1; Domain location=1-72; Score=25.3; E_value=0.00025; Accession=PF00583.16; Description =Acetyltransferase (GNAT) family
  Pfam annotation: Domain name=FR47; Domain location=3-81; Score=-8.9; E_value=0.1; Accession=PF08445.2; Description=FR47-like protein
  Pfam module annotation: Pfam domain module=Acetyltransf_1::FR47; Domain location=1-72::3-81
FVHYRVVLEEELPVVYVYELQMEPSAQGKGLGKFLMQLIEQIACKNQMGAVMLTVQKANTQAMAFYTKLRYVISSTSPSRVDPQIGLEKSYEILCKTFDCEAKSKLEDGDEEL

SEQ ID NO: 82784 - protein, 161 aa, Setaria italica
  misc_feature (123)..(123): Xaa can be any naturally occurring amino acid
  misc_feature (141)..(141): Xaa can be any naturally occurring amino acid
  Transcript Sequence Number=SeqID_16810
  Gene Ontology: Mol. function=nucleoside-triphosphatase activity
  Homolog annotation: Hit_ID=Q2R8Q8; Match level="QueryCoverage=99%, HitCoverage=16%, E-value=1e-39, Identity=54%"; Hit description =ATPase, AAA family protein, expressed
KGNFIPLSMCGKLSLFVVMRAEFDSSARDDFGEKRNTLPNAEDSSNLGGTLVSILVDRTTKVHLCDSVCTEKPGLDKTDLPSEVYDYYNKGNDDSNHAPMLGGLSEESKTIKEIISFSLSDQXGLPRYKGILLYGPPGTGXTSLVSSCTYDAGFNLFTINR

SEQ ID NO: 82785 - protein, 66 aa, Setaria italica
  Transcript Sequence Number=SeqID_16811
RPPRSRPEPHSAGEAAMFFSGDPSARRRVDLGGRSSKERDRKVLLEQTREERRRRQGLRLQNSSAT

SEQ ID NO: 82786 - protein, 82 aa, Setaria italica
  Transcript Sequence Number=SeqID_16812
  Subcellular localization annotation: CTP_CleavageSite=74; ConfidenceScore=5.07e-01
FEFSRSSGGDREAFGHFGVVLVALFRRVVACRAACSAAAAAPLAAAATTCGIRARGPLSSAADAVGPVVFASARARTASAVA

SEQ ID NO: 82787 - protein, 112 aa, Setaria italica
  Transcript Sequence Number=SeqID_16813
  Subcellular localization annotation: CTP_CleavageSite=51; ConfidenceScore=5.60e-01
KGRGKWARPARPINPTSPRFWSGGTATGRRAVRGRGRVGVGKPFPTGAVPVCNRRGGRPDGEIKTGRQPDQSNSPVDSSHVSKPGHGCGVVQDEESFLAVPRQSGADTRLPC

SEQ ID NO: 82788 - protein, 113 aa, Setaria italica
  Transcript Sequence Number=SeqID_16814
  Gene Ontology: Mol. function=hydrolase activity, hydrolyzing O -glycosyl compounds; Cellular component=anchored to membrane; Biological process=carbohydrate metabolic process
  Homolog annotation: Hit_ID=B4FB19; Match level="QueryCoverage=80%, HitCoverage=18%, E-value=4e-31, Identity=74%"; Hit description =Glucan endo-1,3-beta-glucosidase 5
MARLAAALLLLVAVACWAVAPGAEALGMNWGTQASHPLPPKAVVQVLRDNGIKKVKLFDTDFAAMSALAGTGIEVMAAIPNNMLADLADDAGKAKDWVKRNVKRYDFDGGVTI

SEQ ID NO: 82789 - protein, 36 aa, Setaria italica
  Transcript Sequence Number=SeqID_16815
  Gene Ontology: Mol. function=5-methyltetrahydropteroyltriglutamate -homocysteine S-methyltransferase activity; Cellular component =cytoplasm; Biological process=methionine biosynthetic process
  Homolog annotation: Hit_ID=Q42699; Match level="QueryCoverage=100%, HitCoverage=4%, E-value=3e-11, Identity=91%"; Hit description=5 -methyltetrahydropteroyltriglutamate--homocysteine methyltransferase
NPDCGLKTRKYTEVKPALTNMVSATKLIRTQLASAK

SEQ ID NO: 82790 - protein, 78 aa, Setaria italica
  Transcript Sequence Number=SeqID_16816
  Gene Ontology: Mol. function=5-methyltetrahydropteroyltriglutamate -homocysteine S-methyltransferase activity; Cellular component =cytoplasm; Biological process=methionine biosynthetic process
  Homolog annotation: Hit_ID=Q42662; Match level="QueryCoverage=98%, HitCoverage=10%, E-value=3e-30, Identity=87%"; Hit description=5 -methyltetrahydropteroyltriglutamate--homocysteine methyltransferase
  Pfam annotation: Domain name=Meth_synt_1; Domain location=1-78; Score= -155.2; E_value=0.0017; Accession=PF08267.4; Description=Cobalamin -independent synthase, N-termina
EAKALGVDTVPVLTGPVSYLLLSKAAKGVEKGFPLLSLLSGILPVYKEVIAELKAAGASWIQFDEPTLVLDLDSQKLA

SEQ ID NO: 82791 - protein, 94 aa, Setaria italica
  Transcript Sequence Number=SeqID_16817
  Gene Ontology: Mol. function=5-methyltetrahydropteroyltriglutamate -homocysteine S-methyltransferase activity; Cellular component =cytoplasm; Biological process=methionine biosynthetic process
  Homolog annotation: Hit_ID=A6XMY7; Match level="QueryCoverage=70%, HitCoverage=28%, E-value=3e-31, Identity=95%"; Hit description =Cobalamin-independent methionine synthase (Fragment)
GPVTILNWSFVRNDQPRFETCYQIALAIKKEVEDLEAAGIQVIQIDEAALREGLPLRKAEHAFYLELGTSYNYFTRNTTKLDEEYKGTTNQEYQ

SEQ ID NO: 82792 - protein, 113 aa, Setaria italica
  Transcript Sequence Number=SeqID_16818
  Gene Ontology: Mol. function=5-methyltetrahydropteroyltriglutamate -homocysteine S-methyltransferase activity; Cellular component =cytoplasm; Biological process=methionine biosynthetic process
  Homolog annotation: Hit_ID=O50008; Match level="QueryCoverage=89%, HitCoverage=13%, E-value=9e-41, Identity=80%"; Hit description=5 -methyltetrahydropteroyltriglutamate--homocysteine methyltransferase
LNVLIETYFADVPAESYKTLTSLSGVTCLWFLTLFRGAQTLDLVKSGFPAGKYLFAGVVDGRNIWADDLAASLSTLQSLEAVVGKDKLVVSTSCSLMHTAVVVGRTGRFSFFC

SEQ ID NO: 82793 - protein, 172 aa, Setaria italica
  misc_feature (27)..(27): Xaa can be any naturally occurring amino acid
  misc_feature (65)..(65): Xaa can be any naturally occurring amino acid
  Transcript Sequence Number=SeqID_16819
  Gene Ontology: Mol. function=5-methyltetrahydropteroyltriglutamate -homocysteine S-methyltransferase activity; Cellular component =cytoplasm; Biological process=methionine biosynthetic process
  Homolog annotation: Hit_ID=B9I615; Match level="QueryCoverage=56%, HitCoverage=12%, E-value=4e-46, Identity=84%"; Hit description =Vitamin-b12 independent methionine synthase, 5-methyltetrahydropteroy ltriglutamate-homocysteine
  Pfam annotation: Domain name=Meth_synt_1; Domain location=7-165; Score=-17.9; E_value=1.2e-12; Accession=PF08267.4; Description =Cobalamin-independent synthase, N-termina
RAPLRILEKVATDLRASIWKQMADAGXKYIPSNTFSYYDQVLDTTAMLGAVPERYSWTGGEIGFXTYFSMARGNATVPAMEMTKWFDTNYHFIVPELGPNTKFSTPLAAFESNKYETGPVSTGTVSTPSALASLFVEPRLLILSRVVSRLASTSFLVLWMGATSGLMILTRT

SEQ ID NO: 82794 - protein, 186 aa, Setaria italica
  misc_feature (91)..(91): Xaa can be any naturally occurring amino acid
  Transcript Sequence Number=SeqID_16820
  Gene Ontology: Mol. function=5-methyltetrahydropteroyltriglutamate -homocysteine S-methyltransferase activity; Cellular component =cytoplasm; Biological process=methionine biosynthetic process
  Homolog annotation: Hit_ID=O50008; Match level="QueryCoverage=91%, HitCoverage=22%, E-value=8e-74, Identity=78%"; Hit description=5 -methyltetrahydropteroyltriglutamate--homocysteine methyltransferase
  Pfam annotation: Domain name=Meth_synt_1; Domain location=1-89; Score= -159.4; E_value=0.0032; Accession=PF08267.4; Description=Cobalamin -independent synthase, N-termina
SLLLLGLNVLIETYFADIPAESYKTLTSLSGVTAYGFDLIRGAKTLDLIRSSFPSGKYLFAGVVDGRNIWADDLAASLSTLQSLEAVAGKXKLVVSTSCSLMHTAVDLVNETKLDDEIKSWLAFAAQKVVEVNALAKALAGQKDEAYFAANAAALASRKSSPRVTNQEVQKAVSNRALLNKCSIGC

SEQ ID NO: 82795 - protein, 163 aa, Setaria italica
  misc_feature (51)..(51): Xaa can be any naturally occurring amino acid
  Transcript Sequence Number=SeqID_16821
  Gene Ontology: Mol. function=5-methyltetrahydropteroyltriglutamate -homocysteine S-methyltransferase activity; Cellular component =cytoplasm; Biological process=methionine biosynthetic process
  Homolog annotation: Hit_ID=Q42699; Match level="QueryCoverage=90%, HitCoverage=19%, E-value=1e-80, Identity=93%"; Hit description=5 -methyltetrahydropteroyltriglutamate--homocysteine methyltransferase
  Pfam annotation: Domain name=Meth_synt_2; Domain location=2-163; Score=88.1; E_value=3.2e-23; Accession=PF01717.10; Description =Cobalamin-independent synthase, Catalytic
  Subcellular localization annotation: CTP_CleavageSite=60; ConfidenceScore=5.34e-01
MQKPESCSPKYSTISFLSGFAFTANGWVQSYGSRCVKPPIIYGDVSRPNPXTVFWSTTAQSMTSRPMKGMLTGPVTILNWSFVRNDQPRFETCYQIALAIKKEVEDLEAAGIQVIQIDEAALREGLPLRKAEHAFYLDWAVHSFRITNCEIKDTTQIHTHMCY

SEQ ID NO: 82796 - protein, 556 aa, Setaria italica
  misc_feature (12)..(12): Xaa can be any naturally occurring amino acid
  misc_feature (21)..(21): Xaa can be any naturally occurring amino acid
  misc_feature (40)..(40): Xaa can be any naturally occurring amino acid
  misc_feature (132)..(132): Xaa can be any naturally occurring amino acid
  misc_feature (153)..(153): Xaa can be any naturally occurring amino acid
  misc_feature (328)..(328): Xaa can be any naturally occurring amino acid
  misc_feature (512)..(512): Xaa can be any naturally occurring amino acid
  Transcript Sequence Number=SeqID_16822
  Gene Ontology: Mol. function=5-methyltetrahydropteroyltriglutamate -homocysteine S-methyltransferase activity; Cellular component =cytoplasm; Biological process=methionine biosynthetic process
  Homolog annotation: Hit_ID=Q42699; Match level="QueryCoverage=96%, HitCoverage=73%, E-value=0.0, Identity=79%"; Hit description=5 -methyltetrahydropteroyltriglutamate--homocysteine methyltransferase
  Pfam annotation: Domain name=Meth_synt_1; Domain location=1-121; Score=-91.1; E_value=9e-08; Accession=PF08267.4; Description =Cobalamin-independent synthase, N-termina
  Pfam annotation: Domain name=Meth_synt_2; Domain location=238-536; Score=602.7; E_value=3.9e-178; Accession=PF01717.10; Description =Cobalamin-independent synthase, Catalytic
  Pfam module annotation: Pfam domain module=Meth_synt_1::Meth_synt_2; Domain location=1-121::238-536
ASWIQFDEPTLXVLDLDSQNXAAFSAAYTELESALSGLNXVLIETYFADVPAESYKTLTSLSGVTAYGFDLVRGAQTLDLVKSGFPAGKYLFAGVVDGRNICADDLAASLSTLQSLEAVVRKGQALFVVLTXSCSLMHTAVDLVNETKLDAEXKSWLAFAAQKVVEVDALAKALAGQKDEAYFAANAAAQASRKSSPRVTNEEVQKAAAALKGSDHRRATNVSARLDAQQKKLNLPVLPTNPQWLFPQTVELRRVRREYKAKKISEEEYVTAIKEEINKVVKLQEELDIDVLVHGEPERNDMVEYFGEQLSGFAFTANGWVQSYGSRXMTSRPMKGMLTGPVTILNWSFVRNDQPRFETCYQIALAIRRRFEDLEAAGIQVIQIDEAALREGLPLRKAEHAFYLDWAVHSFRITNCEIKDTTQIHTHMCYSNFNDIIHSIINMDADVITIENSRSDEKLLSVFREGVKYGAGIGPGVYDIHSPRIPSTEEIADRINKMLAVLETNILWVNPXCGLKTRKYTEVKPALTNMVSAAKLIRLPSSPAPSENRSLQWLFV

SEQ ID NO: 82797 - protein, 339 aa, Setaria italica
  misc_feature (13)..(13): Xaa can be any naturally occurring amino acid
  Transcript Sequence Number=SeqID_16823
  Gene Ontology: Mol. function=5-methyltetrahydropteroyltriglutamate -homocysteine S-methyltransferase activity; Cellular component =cytoplasm; Biological process=methionine biosynthetic process
  Homolog annotation: Hit_ID=Q42699; Match level="QueryCoverage=100%, HitCoverage=44%, E-value=0.0, Identity=93%"; Hit description=5 -methyltetrahydropteroyltriglutamate--homocysteine methyltransferase
  Pfam annotation: Domain name=Meth_synt_1; Domain location=7-297; Score=-152.1; E_value=0.0011; Accession=PF08267.4; Description =Cobalamin-independent synthase, N-termina
  Pfam annotation: Domain name=Meth_synt_2; Domain location=6-330; Score=751.0; E_value=8.9e-223; Accession=PF01717.10; Description =Cobalamin-independent synthase, Catalytic
  Pfam module annotation: Pfam domain module=Meth_synt_1::Meth_synt_2; Domain location=7-297::6-330
LNLPVLPTTTIGXFPQTVELRRVRREYKAKKISEEEYVTAIKEEINKVVKLQEELDIDVLVHGEPERNDMVEYFGEQLSGFAFTANGWVQSYGSRCVKPPIIYGDVSRPNPMTVFWSTTAQSMTSRPMKGMLTGPVTILNWSFVRNDQPRFETCYQIALAIKKEVEDLEAAGIQVIQIDEAALREGLPLRKAEHAFYLDWAVHSFRITNCEIKDTTQIHTHMCYSNFNDIIHSIINMDADVITIENSRSDEKLLSVFREGVKYGAGIGPGVYDIHSPRIPSTEEIADRINKMLAVLETNILWVNPDCGLKTRKYTEVKPALTNMVSAAKLIRTQLASTK

SEQ ID NO: 82798 - protein, 768 aa, Setaria italica
  misc_feature (174)..(174): Xaa can be any naturally occurring amino acid
  misc_feature (301)..(301): Xaa can be any naturally occurring amino acid
  misc_feature (614)..(614): Xaa can be any naturally occurring amino acid
  misc_feature (729)..(729): Xaa can be any naturally occurring amino acid
  Transcript Sequence Number=SeqID_16824
  Gene Ontology: Mol. function=5-methyltetrahydropteroyltriglutamate -homocysteine S-methyltransferase activity; Cellular component =cytoplasm; Biological process=methionine biosynthetic process
  Homolog annotation: Hit_ID=Q42699; Match level="QueryCoverage=100%, HitCoverage=100%, E-value=0.0, Identity=87%"; Hit description=5 -methyltetrahydropteroyltriglutamate--homocysteine methyltransferase
  Pfam annotation: Domain name=Meth_synt_1; Domain location=2-319; Score=593.8; E_value=1.8e-175; Accession=PF08267.4; Description =Cobalamin-independent synthase, N-termina
  Pfam annotation: Domain name=Meth_synt_2; Domain location=433-759; Score=739.7; E_value=2.2e-219; Accession=PF01717.10; Description =Cobalamin-independent synthase, Catalytic
  Pfam module annotation: Pfam domain module=Meth_synt_1::Meth_synt_2; Domain location=2-319::433-759
MASHIVGYPRMGPKRELKFALESFWDGKSTAEDLEKVATDLRASIWKQMADAGIKYIPSNTFSYYDQVLDTTAMLGAVPERYSWTGGEIGFDTYFSMARGNATVPAMEMTKWFDTNYHFIVPELGPNTKFTYSSHKAVNEYKEAKALGVDTVPVLTGPVSYLLLSKAAKGVEKXFPLLSLLSGILPVYKEVIAELKAAGASWIQFDEPTLVLDLDSQKLAAFSAAYTELESALSGLNVLIETYFADVPAESYKTLTSLSGVTAYGFDLVRGAQTLDLVKSGFPAGKYLFAGVVDGRNIWAXDDLAASLSTLQSLEAVVGKDKLVVSTSCSLMHTAVDLVNETKLDAEIKSWLAFAAQKVVEVDALAKALAGQKDEAYFAANAAAQASRKSSPRVTNEEVQKAAAALKGSDHRRATNVSARLDAQQKKLNLPVLPTTTIGSFPQTVELRRVRREYKAKKISEEEYVTAIKEEINKVVKLQEELDIDVLVHGEPERNDMVEYFGEQLSGFAFTANGWVQSYGSRCVKPPIIYGDVSRPNPMTVFWSTTAQSMTSRPMKGMLTGPVTILNWSFVRNDQPRFETCYQIALAIKKEVEDLEAAGIQVIQIDEAALREGXLPLRKAEHAFYLDWAVHSFRITNCEIKDTTQIHTHMCYSNFNDIIHSIINMDADVITIENSRSDEKLLSVFREGVKYGAGIGPGVYDIHSPRIPSTEEIADRINKMLAVLETNIXLWVNPDCGLKTRKYTEVKPALTNMVSAAKLIRTQLASTK

SEQ ID NO: 82799 - protein, 121 aa, Setaria italica
  Transcript Sequence Number=SeqID_16825
  Gene Ontology: Mol. function=serine-type endopeptidase inhibitor activity; Cellular component=extracellular region
  Homolog annotation: Hit_ID=A1EGX1; Match level="QueryCoverage=52%, HitCoverage=50%, E-value=6e-20, Identity=68%"; Hit description =Bowman-Birk serine proteinase inhibitor
  Pfam annotation: Domain name=Bowman-Birk_leg; Domain location=57-83; Score=27.0; E_value=7.9e-05; Accession=PF00228.12; Description =Bowman-Birk serine protease inhibitor family
  Pfam annotation: Domain name=Bowman-Birk_leg; Domain location=85-112; Score=16.4; E_value=0.019; Accession=PF00228.12; Description=Bowman -Birk serine protease inhibitor family
  Pfam annotation: Domain name=GASA; Domain location=5-87; Score=-45.1; E_value=0.1; Accession=PF02704.6; Description=Gibberellin regulated protein
  Pfam module annotation: Pfam domain module=Bowman-Birk_leg::Bowman -Birk_leg::GASA; Domain location=57-83::85-112::5-87
MRTQVFFLTFALLAVLAQSSNRHHHHSHVQSKGHGGGGGGGGELASRGKAAARAWPCCDNCGGCTKSIPPLCQCLDAVPRGCHPACQDCIKSSLSADPPVYQCMDRVPNFCDRRCTAAAAH

SEQ ID NO: 82800 - protein, 147 aa, Setaria italica
  Transcript Sequence Number=SeqID_16826
MRGVGGPLLTIGDLLSDLAVDGGDDPLAAGGDASIPSSLSAEQQAGEADPSDLSRLFEEHYNHLMKALQENDPSWPSLMLKLCAALKTADKLVSCANTNAERLVEKVKALEGVLEKGDRAVAEIVESLQRSGVAKDHRSSQSKSASK

SEQ ID NO: 82801 - protein, 96 aa, Setaria italica
  misc_feature (79)..(79): Xaa can be any naturally occurring amino acid
  Transcript Sequence Number=SeqID_16827
LSKLLEGANQHVPPQLLDMAARGATGGPRNQATGMSRWDGPGGGRFEPAVGGPVGYGGVREGPGGFGSREGPGVFSSLXGPGGFGGRESPGGLLAG

SEQ ID NO: 82802 - protein, 168 aa, Setaria italica
  Transcript Sequence Number=SeqID_16828
  Gene Ontology: Mol. function=protein serine/threonine kinase activity; Cellular component=chloroplast; Biological process=protein amino acid phosphorylation
  Homolog annotation: Hit_ID=Q7XQK6; Match level="QueryCoverage=100%, HitCoverage=35%, E-value=5e-81, Identity=82%"; Hit description =OSJNBa0017B10.2 protein
  Pfam annotation: Domain name=Pkinase; Domain location=3-168; Score= -12.2; E_value=9.1e-08; Accession=PF00069.17; Description=Protein kinase domain
  Pfam annotation: Domain name=Pkinase_Tyr; Domain location=1-168; Score=-66.2; E_value=2.5e-09; Accession=PF07714.9; Description =Protein tyrosine kinase
  Pfam module annotation: Pfam domain module=Pkinase::Pkinase_Tyr; Domain location=3-168::1-168
LNPESVQGMEQWQSEVNFLGRISHPNLVKLLGYCMDDNELLLVYEFMAKGSLENHLFRRGAVYEPLPWSLRLKILIGAARGLAFLHSSERQIIYRDFKASNILLDSHFNAKPSDFGLAKHGPDGEESHVTTRVMGTYGYAAPEYVSTGHLYVKSDVYGFGVVLLEMIS

SEQ ID NO: 82803 - protein, 104 aa, Setaria italica
  Transcript Sequence Number=SeqID_16829
EQWQPSAPLDPPPSSLVPPWPGQLRLTVSSSIIFEIWCQKAGSHLAAACKASLDMREAAVQTAGLPQLRARADKVRCSACSRQQDGSGKGAAAPAAGASSLLAV

SEQ ID NO: 82804 - protein, 82 aa, Setaria italica
  Transcript Sequence Number=SeqID_16830
RARHGQQGRRAGGRSRRPLAAAVLLPRAGAAPHLVGSRSQLRQPVSLSWPGHGGTSEEGGGSSGADGCHCSHSRGLVSGCGS

SEQ ID NO: 82805 - protein, 129 aa, Setaria italica
  Transcript Sequence Number=SeqID_16831
  Gene Ontology: Mol. function=catalytic activity; Biological process =cellular metabolic process
  Homolog annotation: Hit_ID=B6T555; Match level="QueryCoverage=100%, HitCoverage=37%, E-value=1e-47, Identity=67%"; Hit description =Dihydroflavonol-4-reductase
GGPTIMNNLLWHVVNVRDVADALLLVYEKAESSGRYLCAPDRVSTKDLLNILKKTHPNYNCVNCDNDSDLKSIITRITSEKLKNLGWKPRTIEETLSDSIEYYEKAGLLQDVEGCPCRLPHPFHLAIDK

SEQ ID NO: 82806 - protein, 68 aa, Setaria italica
  Transcript Sequence Number=SeqID_16832
EIRHNQWGLHKELNGYLDMGHQENPARGRRGLGELERAQTNRPGSWARSASRFFSVTSTTSLGFSIDK

SEQ ID NO: 82807 - protein, 111 aa, Setaria italica
  Transcript Sequence Number=SeqID_16833
  Homolog annotation: Hit_ID=B6U2F9; Match level="QueryCoverage=78%, HitCoverage=64%, E-value=3e-22, Identity=67%"; Hit description =RALFL33
  Pfam annotation: Domain name=RALF; Domain location=39-108; Score =95.0; E_value=2.7e-25; Accession=PF05498.3; Description=Rapid ALkalinization Factor (RALF)
MPATTKLISLSRAWATASLLLMLVLALHGRGGHCVGLGMDAAEMEMDSEAHRRLLWEATGGRRYISYDALRGDVVPCSRTGVPYYNCRVSTTANPYTRGCESITRCRDAGP

SEQ ID NO: 82808 - protein, 170 aa, Setaria italica
  Transcript Sequence Number=SeqID_16834
STVSRSYVIFIHFDGAVLIVGCGLHQKQDTVQCSLAPSTAHQQIMKTYSRHHTKHHAEKIWCLLHMRQRMSKRHLSNGDETGSNISAAVSYGGRLGLCCSAREMKQEDLSCRYAWKQVRYFAVTRKFLEKHASWQGSHFITVVFHVWYSNLSLMHFLSGATTHTGNRGRW

SEQ ID NO: 82809 - protein, 129 aa, Setaria italica
  Transcript Sequence Number=SeqID_16835
  Gene Ontology: Cellular component=peroxisome
  Homolog annotation: Hit_ID=B9S0H2; Match level="QueryCoverage=60%, HitCoverage=98%, E-value=4e-27, Identity=69%"; Hit description =ATOZI1, putative
  Pfam annotation: Domain name=DUF1138; Domain location=54-126; Score =170.0; E_value=6.8e-48; Accession=PF06592.5; Description=Protein of unknown function (DUF1138)
  Subcellular localization annotation: CTP_CleavageSite=58; ConfidenceScore=5.34e-01
SQPCPLPYRTLPPQPPPSSPSEISQPLSLPLLRFVLVQLRWVVVFDRRRAKMTAGYIVGSLVGSFAVAYLCDSFVSDKKAFGGTIPKTVSDKEWFKATDTKFQAWPRTAGPPVVMNPISRQNFIVKSTE

SEQ ID NO: 82810 - protein, 157 aa, Setaria italica
  misc_feature (9)..(9): Xaa can be any naturally occurring amino acid
  Transcript Sequence Number=SeqID_16836
  Gene Ontology: Mol. function=transporter activity; Cellular component= integral to membrane; Biological process=response to antibiotic
  Homolog annotation: Hit_ID=B4FA49; Match level="QueryCoverage=96%, HitCoverage=30%, E-value=6e-44, Identity=60%"; Hit description =Carbohydrate transporter/ sugar porter/ transporter
GKPLLYQTXIYPYKVKVLGPINASRVMAILSMMLLFTYPSMTHLPRPWLLIVLNISSALKANLVTTVVTSSVILQNNSVRQDQRGIANGLANTMMSFSKALAPAGAGIVFSWAQKHQHSFIFPGDQMVFLFLGIVVFIEFIWTFKPLLVVPDQFCST

SEQ ID NO: 82811 - protein, 338 aa, Setaria italica
  Transcript Sequence Number=SeqID_16837
  Gene Ontology: Mol. function=transcription regulator activity; Cellular component=nucleus; Biological process=regulation of transcription
  Homolog annotation: Hit_ID=B9RKM4; Match level="QueryCoverage=99%, HitCoverage=88%, E-value=2e-71, Identity=49%"; Hit description =Transcription factor, putative
LSSPSVLFSQQFPHTSSGQLAHMNGAAGSLPSMHDGGGQENHMPESWSQMLLGGLVGDHERYSATAALLSKGLESWGDQAACMAALKEEGSAMPQPAYNFYGSHLAGGDHEMPAAGGAKSQLSQMLLQASSPRSCITTSLGSNMLDFSNTAPAPEMRSHHHHSDNSSECNSTATGSAIKKPRVQASSSAQSTLKVRKERLGDRITALHQIVSPFGKTDTASVLQETIGYIRFLLSQIEALSYPYMGHGNGTSMQNGPMGERNPGLFPEYPGQLLNHNSNTGAQQPAVQPDEQQGANEEAKKDLRSRGLCLVPVSCTSHFGGDNAADYWAPAPLGGILR

SEQ ID NO: 82812 - protein, 144 aa, Setaria italica
  Transcript Sequence Number=SeqID_16838
  Gene Ontology: Mol. function=methionine-tRNA ligase activity; Cellular component=cytoplasm; Biological process=tRNA aminoacylation for protein translation
  Homolog annotation: Hit_ID=Q8H054; Match level="QueryCoverage=99%, HitCoverage=24%, E-value=3e-73, Identity=88%"; Hit description =Putative methionyl-tRNA synthetase
  Pfam annotation: Domain name=tRNA-synt_1g; Domain location=1-144; Score=-177.0; E_value=1.7e-08; Accession=PF09334.3; Description=tRNA synthetases class I (M)
VKKIATSAEASGRNPKEHCDAISSSYKMLWADLDIEYDKFIRTTDYKHEAVVNEFYSRVLNSGDIYRADYEGLYCVSCEEYKDEKELAENNTCPVHLKPCVARKEDNYFFALSKYQHKLEELLAKNPNFVRPSHRLNEVQGWIK

SEQ ID NO: 82813 - protein, 100 aa, Setaria italica
  Transcript Sequence Number=SeqID_16839
RPLPRHAVLLQHNNPLVVILLLLVLLPDARYPARARAPGVLREATHDLGRLPRRRRRHGSRGRRRPHVTVALGGTVRREARVVDDARVRGEAAVAVEAVA

SEQ ID NO: 82814 - protein, 86 aa, Setaria italica
  Transcript Sequence Number=SeqID_16840
RCGCPLKISHSLTANFNAERWTMTPLHIHETSKHANVLKSLNFEQEDIKILPVAFFVSLQRTSPVTTRIKEHCQCSLWLMLAPQVP

SEQ ID NO: 82815 - protein, 109 aa, Setaria italica
  Transcript Sequence Number=SeqID_16841
  Gene Ontology: Mol. function=protein serine/threonine kinase activity; Cellular component=integral to membrane; Biological process=protein amino acid phosphorylation
  Homolog annotation: Hit_ID=B9S7D4; Match level="QueryCoverage=87%, HitCoverage=41%, E-value=5e-20, Identity=43%"; Hit description =Serine/threonine-protein kinase bri1, putative
  Pfam annotation: Domain name=LRR_1; Domain location=27-49; Score =11.8; E_value=1.7; Accession=PF00560.25; Description=Leucine Rich Repeat
  Pfam annotation: Domain name=LRR_1; Domain location=3-25; Score=11.8; E_value=1.7; Accession=PF00560.25; Description=Leucine Rich Repeat
  Pfam annotation: Domain name=LRR_1; Domain location=52-74; Score =13.9; E_value=0.67; Accession=PF00560.25; Description=Leucine Rich Repeat
  Pfam annotation: Domain name=LRR_1; Domain location=76-99; Score =13.4; E_value=0.82; Accession=PF00560.25; Description=Leucine Rich Repeat
  Pfam module annotation: Pfam domain module=LRR_1::LRR_1::LRR_1::LRR _1; Domain location=27-49::3-25::52-74::76-99
CAGLATLNLSYNGLTGSIPEAVAGIAGLEVFDVSSNHLTGAIPDSIGNACASLEVLKVSSNNISGPIPDSMSSCHALRLLDAANNKLTGAIPAAVLGNLTSLESLLLSN

SEQ ID NO: 82816 - protein, 183 aa, Setaria italica
  Transcript Sequence Number=SeqID_16842
RKISLHIGSSLQNEMVQATVPDDHEANQFLNRDSQENHCGEGDKKHDVEVSNPLSSSEVECVAEFASVKSENLHISQSNELIVIPEEAWSDFGNIKFIPEQEGKHQLSNGVYGFGGLYAAGLSAQKTNEKHEIVVDYKDMDFSSAGCNKAADSEENKSNGAPKQEDMLSPGLTAQQEKGEHGN

SEQ ID NO: 82817 - protein, 72 aa, Setaria italica
  Transcript Sequence Number=SeqID_16843
AVEGANVYVSSKKKNRSKRVCLPSTQIAIQQLEPILLQDSKHLQHQFHVCSLKSLISLASPTHDSVTVLRGE

SEQ ID NO: 82818 - protein, 50 aa, Setaria italica
  Transcript Sequence Number=SeqID_16844
MGSRTSPPHDYLHMHVEQLRRRHQSLSELTYARDEDAKLETTRARLSNIL

SEQ ID NO: 82819 - protein, 142 aa, Setaria italica
  Transcript Sequence Number=SeqID_16845
  Homolog annotation: Hit_ID=Q7XW79; Match level="QueryCoverage=80%, HitCoverage=36%, E-value=9e-54, Identity=86%"; Hit description =OSJNBa0019J05.15 protein
SSSGAAVLNVEQLRRRHHSLSELTYARDEDAKLETTRARLSNILKRHEDLKERLSRDSDKLIFERLQKEFEAARAAQTEEISIDDDDWNDGLLATIREKVHMEADRKAMANQVNVPADLPFQSKTTYRIRNKVIYCLVLVVV

SEQ ID NO: 82820 - protein, 103 aa, Setaria italica
  Transcript Sequence Number=SeqID_16846
  Homolog annotation: Hit_ID=Q7XW79; Match level="QueryCoverage=94%, HitCoverage=31%, E-value=1e-28, Identity=67%"; Hit description =OSJNBa0019J05.15 protein
FFPLLIVIEFVLEDFECKITVSIRYSDLLLTLPSQARVLAWPLRSSKRISTRSSSASAVQLVPFRLSYAEEALKTLCLPEAYADIVLDLPNALKRSFSSQHSD

SEQ ID NO: 82821 - protein, 285 aa, Setaria italica
  Transcript Sequence Number=SeqID_16847
  Homolog annotation: Hit_ID=Q7XW79; Match level="QueryCoverage=97%, HitCoverage=89%, E-value=1e-132, Identity=80%"; Hit description =OSJNBa0019J05.15 protein
  Pfam annotation: Domain name=Cenp-O; Domain location=92-170; Score =104.0; E_value=5.1e-28; Accession=PF09496.2; Description=Cenp-O kinetochore centromere component
SCFKLGDSDKLIFEHLQKEFEAARAAQTEEISIDDDEWNDGLLATIREKVHMEADRKAMANQVNVPADLPFQSKTTYRIRNKVIYCLDGARIGIQYETFFAGEPCEIFHCVLESKSFLEKMTVIEHTLPFFLPIRELESDLLSSNAIKFIDHLEEILQAYIDRREQVRLIKELYGNQIGELFHSLPYNVIEFVLEDFECKITVSIRYSDLLLTLPSQARVLAWPLRSSKRISTRSSSASAAQPVPFHLSYAEEALKTLCLPEAYADIVLDLPHALKRILTSQDSD

SEQ ID NO: 82822 - protein, 80 aa, Setaria italica
  misc_feature (18)..(18): Xaa can be any naturally occurring amino acid
  misc_feature (29)..(29): Xaa can be any naturally occurring amino acid
  misc_feature (57)..(57): Xaa can be any naturally occurring amino acid
  Transcript Sequence Number=SeqID_16848
  Gene Ontology: Cellular component=nucleus
  Homolog annotation: Hit_ID=B9SZX7; Match level="QueryCoverage=96%, HitCoverage=26%, E-value=1e-19, Identity=65%"; Hit description =Nucleolar essential protein, putative
  Pfam annotation: Domain name=EMG1; Domain location=1-79; Score=-95.3; E_value=0.052; Accession=PF03587.6; Description=EMG1NEP1 methyltransferase
KLSITAVGKREKLLNVVXNPVTRYLPVVXEIGLSFSADKSVNLFDYVAKSSDDEPLXFVVGAMAHGKIDKEYTDDYIQSK

SEQ ID NO: 82823 - protein, 234 aa, Setaria italica
  Transcript Sequence Number=SeqID_16849
  Gene Ontology: Mol. function=protein binding; Cellular component =nucleus; Biological process=ribosome biogenesis
  Homolog annotation: Hit_ID=B9SZX7; Match level="QueryCoverage=94%, HitCoverage=74%, E-value=2e-88, Identity=70%"; Hit description =Nucleolar essential protein, putative
  Pfam annotation: Domain name=EMG1; Domain location=31-228; Score =369.0; E_value=8.4e-108; Accession=PF03587.6; Description=EMG1NEP1 methyltransferase
VAREEEEHAAVEGLPVVPRPVDGKRRPGAIFVLERACLEVGKVGKTMQILNSDDHANYLRKQNRNPADYRPDIIHQALLAIFDSPLTKAGRLQAVYVRTEKGVLFEIKPYVRMPRTFKRFCGLMSQLLQKLSITAVGKREKLLNVVKNPVTRYLPVGARKVGLSFSAEKSVNLFDYVAKSSDDEPLVFVVGAMAHGKIDKEYTDDYIQICNYPLSAACCLNRICSALEQKWNIQ

SEQ ID NO: 82824 - protein, 71 aa, Setaria italica
  Transcript Sequence Number=SeqID_16850
  Gene Ontology: Mol. function=transporter activity; Cellular component= intracellular; Biological process=transport
MSVSHAEDIEISLCDGNSEDERRRRKIGSLRRKAIHALKKRGRRRVDFRFPPAAISIEDVRDAEEERAVAA

SEQ ID NO: 82825 - protein, 277 aa, Setaria italica
  Transcript Sequence Number=SeqID_16851
  Gene Ontology: Mol. function=acyltransferase activity; Cellular component=integral to membrane; Biological process=metabolic process
  Homolog annotation: Hit_ID=B6SWK2; Match level="QueryCoverage=98%, HitCoverage=52%, E-value=6e-89, Identity=66%"; Hit description =Glycerol-3-phosphate acyltransferase 8
  Pfam annotation: Domain name=Acyltransferase; Domain location=161 -277; Score=-11.7; E_value=0.013; Accession=PF01553.13; Description =Acyltransferase
VVRTTTRLPRVMLERFAKEHLGAHEVVGCELEYSRLRRCTGLLRGGGDEAVAGRVRTLFAGGNRPDLGIGRSEMARSFLPFCKEQLKPPFAAGGAATTDAPPFRPVIFHDGRLVCRPTPFMSLVILLWLPLGALVAFVRIAVGLMVPIWTIPHIAPIFGGAIITHGRAPAPVRAARDDDGGGSPSGVLFVCTHRTLMDPVVLATVLGRRVAAVTYSISRLSEVLSPIPTVRLTRDRDVDAARMRAELARGDVAVCPEGTTCREPFLLRFSALFAELS

SEQ ID NO: 82826 - protein, 505 aa, Setaria italica
  Transcript Sequence Number=SeqID_16852
  Gene Ontology: Mol. function=two-component response regulator activity; Cellular component=nucleus; Biological process=two -component signal transduction system (phosphorelay)
  Homolog annotation: Hit_ID=Q94LW1; Match level="QueryCoverage=100%, HitCoverage=79%, E-value=0.0, Identity=84%"; Hit description =Response regulator 9
  Pfam annotation: Domain name=Myb_DNA-binding; Domain location=83-133; Score=51.3; E_value=3.9e-12; Accession=PF00249.23; Description=Myb -like DNA-binding domain
RIEQLRTIWQHVVRRKSSDAKNHGNDNDDSDKKLQLASAEGDNGGVNRNKRTSRKGRDDNGDDGDDSDDSNENGDSSTQKKPRVVWSVELHRKFVAAVNQLGIDKAVPKKILDLMNVENITRENVASHLQKYRLYLKRLSADASRQANLTAAFGGRNPAYVNMGLEAFRHYNAYGRYRPVPTTNHSQSNNLLARMNSPAFGMHGLLPSQPLQIGHTQNNMSTSLGNVGGMNSGNLIRGAHMPLQDSSKCFPTGPSGNSFPNISNSTALVPTNNLPLQSLEPSNQQHLGRMHSSSADPFNSFVGESPQFPDLGRCNTTWPTAVSSSNIHELGQKDSMPQPNLRANGPKLEPLSSFTEASSQIPLLGNEMQSQVASLASNGLPMPFNQEAVPFAYRSSTNSRDMLNNNLALSNSGINSSLPNLRLDNSMVPRQTLDGGNSGGVPPLQDGRIDQQAVNSQLNYNNDLMGTSRLQRGLSGGLDDIVVDMFRPDRSDDSIPFIDGDWELV

SEQ ID NO: 82827 - protein, 205 aa, Setaria italica
  misc_feature (71)..(71): Xaa can be any naturally occurring amino acid
  Transcript Sequence Number=SeqID_16853
  Homolog annotation: Hit_ID=Q336N9; Match level="QueryCoverage=86%, HitCoverage=53%, E-value=1e-88, Identity=88%"; Hit description=(RAP Annotation release2) NERD domain containing protein
KRKKKNKKTKRNLRNGNNNKYGKKLVTNPIPNCRPSYNISIQPEVMLYDQWKDLKTDSKSGLSTWIKGAFXGSKSDMQDSVLQNLHSILSTSPMWDRLELKGDKNVLGEFIEFKGRHEDIQLLKNLKRSKVSRFIIQKSTLFGGFGRSRVQILYSPRDYRAEGTSSSEWKEISVKQYTEIVFQPLHSKKVRKFKLSSVVSVTLSA

SEQ ID NO: 82828 - protein, 86 aa, Setaria italica
  Transcript Sequence Number=SeqID_16854
  Homolog annotation: Hit_ID=Q336N9; Match level="QueryCoverage=100%, HitCoverage=26%, E-value=3e-37, Identity=77%"; Hit description=(RAP Annotation release2) NERD domain containing protein
MVVGIKNFSGFVEADKDGNWSCPTDKKRKQEIIPNPVQEVNRLAANLQSYLEQRGAKLPDGHIIGRVVLPNPNCRPSYNISIQPEV

SEQ ID NO: 82829 - protein, 327 aa, Setaria italica
  Transcript Sequence Number=SeqID_16855
  Homolog annotation: Hit_ID=Q336N9; Match level="QueryCoverage=100%, HitCoverage=100%, E-value=1e-156, Identity=80%"; Hit description =(RAP Annotation release2) NERD domain containing protein
  Pfam annotation: Domain name=NERD; Domain location=29-157; Score =27.3; E_value=8.9e-06; Accession=PF08378.3; Description=Nuclease -related domain
MWVEILCGLVAYKVIRRFFFDDDDASYLADLDSSHSDLCFAVASRLEKLYAGRCFVGLRIPDPDAGERQHIDVVLVTKREVMVVGIKNFSGFVEADKDGNWSCPTDKKRKQEIIPNPVQEVNRLAANLQSYLEQRGAKLPDGHIIGRVVLPNPNCRPSYNISIQPEVMLYDQWKDLKTDSKSGLSTWIKGAFTGSKSDMQDSVLQNLHSILSTSPMWDRLELKGDKNVLGEFIEFKGRHEDIQLLKNLKRSKVSRFIIQKSTLFGGFGRSRVQILYSPRDYRAEGTSSSEWKEISVKQYTEIVFQPLHSKKVRKFKLSSVVSVTLSA

SEQ ID NO: 82830 - protein, 134 aa, Setaria italica
  misc_feature (58)..(58): Xaa can be any naturally occurring amino acid
  misc_feature (84)..(84): Xaa can be any naturally occurring amino acid
  misc_feature (129)..(129): Xaa can be any naturally occurring amino acid
  Transcript Sequence Number=SeqID_16856
  Gene Ontology: Mol. function=transferase activity, transferring nitrogenous groups; Biological process=biosynthetic process
  Homolog annotation: Hit_ID=B6TFA9; Match level="QueryCoverage=98%, HitCoverage=29%, E-value=4e-54, Identity=78%"; Hit description=8 -amino-7-oxononanoate synthase
NGEKVVVTDSLFSMDGDFAPFPELVKLRRKYGFLLVIDDAHGTLVCGENGGGAAELFXCENDIDISVGTLSKAAGCQGGFIACXDNLWKNLIQSRGRSFIFSTALPVPVVASVHVYVGLSRKERWRRSXFWRHV

SEQ ID NO: 82831 - protein, 28 aa, Setaria italica
  Transcript Sequence Number=SeqID_16857
FECENDIDISVGTLSKAAGCQGGFIACR

SEQ ID NO: 82832 - protein, 348 aa, Setaria italica
  misc_feature (173)..(173): Xaa can be any naturally occurring amino acid
  Transcript Sequence Number=SeqID_16858
GGGGGGGNSSRTDLLAAGRKKLQQFRKKKGKREPGKKAAEADADAEAEEGAAKAEESTVPEPKSPVGLKFLAGVGGSSTPFEEAETSQAEQCNGEGPGAVESGSVENADAVREQETAADGSDAHNAGTSEQGVSEQHESQAADGEDLAIQATSGDGSGDLVEGAQLGEVHVDXKLPDMTLKDNMELDASSERDGDGDDCNQLGEHQQVEMEPVEKPTSSDSEEVAEVPIPSQDTGADNNNDEGAQEMLTDVSRIPLDGDIQHDIEPTVSAEIVAATALEEELTVAASHEIPESTAGRGTEEETDGVGREAVEENPSTTHVTDEDLSVQAKPTGQWILHFVNKMVIQLY

SEQ ID NO: 82833 - protein, 103 aa, Setaria italica
  Transcript Sequence Number=SeqID_16859
  Gene Ontology: Mol. function=transferase activity, transferring glycosyl groups; Biological process=metabolic process
MEKKTVVLYPGLAVSHFVPMVKLADVLLEEGYAVVVALIDPTVKGDIALAAVVDRAAASMPSVAFHKLPRNQDSPAVVHDGNFVVRYFDLVRRYHQHLHGFLL

SEQ ID NO: 82834 - protein, 102 aa, Setaria italica
  misc_feature (69)..(69): Xaa can be any naturally occurring amino acid
  Transcript Sequence Number=SeqID_16860
  Gene Ontology: Mol. function=nucleic acid binding
  Homolog annotation: Hit_ID=Q9SFY4; Match level="QueryCoverage=99%, HitCoverage=5%, E-value=9e-12, Identity=35%"; Hit description =T22C5.20
KRRNREELSKALMHYRRIRDYIGQRKDCGLTPELEQDYLDLISASRGCESVQCFLSLPIPRFASHCPTXQLEAATKVTINMYKCNMATVTGGKGSSGIAYKL

SEQ ID NO: 82835 - protein, 131 aa, Setaria italica
  misc_feature (17)..(17): Xaa can be any naturally occurring amino acid
  Transcript Sequence Number=SeqID_16861
  Gene Ontology: Mol. function=metal ion binding; Cellular component =intracellular
  Homolog annotation: Hit_ID=B9RNG3; Match level="QueryCoverage=84%, HitCoverage=10%, E-value=4e-41, Identity=64%"; Hit description=DNA replication regulator dpb11, putative
MSSLRRWKGRGNSHHWXFQATHLVTTELRRTEKFFAAAAAGRWILRPDYLTACNEAGKFLEEEPFEWHGDGLNSGDTISLDAPRKWRQLKLRTGHGAFYGMRVIIYGECIAPTLDTLKRTIKSGDGTILAT

SEQ ID NO: 82836 - protein, 61 aa, Setaria italica
  Transcript Sequence Number=SeqID_16862
NNSNQIMLNSPLSLLISIKTFMQLRCKGHLYYPDISINIKPSISQCTPELNTFINMSMPTK

SEQ ID NO: 82837 - protein, 82 aa, Setaria italica
  Transcript Sequence Number=SeqID_16863
VEVSTFVFDESWRVFFMSEEGVVVVTPEQKLLHYDMNGTLRESFPCNGRNLKITPYTLKESLVRHAFFERQDNGGDCDDEPP

SEQ ID NO: 82838 - protein, 155 aa, Setaria italica
  Transcript Sequence Number=SeqID_16864
  Gene Ontology: Mol. function=sequence-specific DNA binding; Cellular component=cytoplasm; Biological process=regulation of transcription, DNA-dependent
  Homolog annotation: Hit_ID=B6TNF2; Match level="QueryCoverage=100%, HitCoverage=52%, E-value=1e-55, Identity=75%"; Hit description=Heat shock factor protein 4
ATTSGGGNERSSSSASSPPRADLTSENEQLKKDNRTLATELAQARRQCEELLGFLSRFLDVRQLDLGMLMQEDVVRAAAGDAHQQCRSAVADQLECGGEEGKSVKLFGVLLKDAARKRGRCEEAAASERPIKMIRIGEPWVGVPSSGPGRFGGEN

SEQ ID NO: 82839 - protein, 106 aa, Setaria italica
  Transcript Sequence Number=SeqID_16865
  Gene Ontology: Mol. function=protein binding; Biological process =protein modification process
  Homolog annotation: Hit_ID=B6U8V5; Match level="QueryCoverage=98%, HitCoverage=63%, E-value=4e-49, Identity=89%"; Hit description=BCL-2 binding anthanogene-1
  Pfam annotation: Domain name=ubiquitin; Domain location=13-82; Score =24.0; E_value=0.00064; Accession=PF00240.15; Description=Ubiquitin family
GSGKGGEEVIVVRVSTGFSWHDVSIGATSTFGELKVMLSMLTGLEPREQRLLFRGKEREDTDHLHMVGVRDKDKVLLLEDPALKDMKLRALAAQVVPSPCQPFIQV

SEQ ID NO: 82840 - protein, 269 aa, Setaria italica
  Transcript Sequence Number=SeqID_16866
  Gene Ontology: Mol. function=nucleoside-triphosphatase activity
  Homolog annotation: Hit_ID=Q6YVI6; Match level="QueryCoverage=99%, HitCoverage=33%, E-value=1e-137, Identity=86%"; Hit description =Putative DNA helicase
  Subcellular localization annotation: CTP_CleavageSite=28; ConfidenceScore=5.01e-01
LISDWRDTQSCRILKEMANSSQHRPAVRSTSPRPKAVHSSIGISLKKVRLMQARIEEFVRHMSDLLRIERDVELEFTQEELNATPMLDDDSEPPKPVEYLVSHGQAQQEQCDTICNLNVISSSTGLGGLHLVLFRVEGGHKLPPTTLSPGDMVCVRTCNSRGEGATSCKQGFVYNFGEDGCSITVALESRHGDATFSRLFGKSVRIDRIQGLADALTYERNLEALLLLQRNGLQEDNVSIGVVATLFGDSKDVVKMAKNNLTDWDESGG

SEQ ID NO: 82841 - protein, 84 aa, Setaria italica
  Transcript Sequence Number=SeqID_16867
  Subcellular localization annotation: CTP_CleavageSite=50; ConfidenceScore=5.35e-01
LNLAQPSQARVAPVQRSRFPPNLHPPATAPAATRRCPDDSPPPPPREGLRPAANRSRRRTRIGINGVHNYLSDIDWDVHFSWFL

SEQ ID NO: 82842 - protein, 69 aa, Setaria italica
  Transcript Sequence Number=SeqID_16868
  Subcellular localization annotation: CTP_CleavageSite=12; ConfidenceScore=5.07e-01
SSWPAGPAGLTRWQLKGTCTSTPRCLVNTLYHQKSGFQWFCFCQQRLNEAYPNLRLWSLFSSVVDIGVC

SEQ ID NO: 82843 - protein, 122 aa, Setaria italica
  misc_feature (23)..(23): Xaa can be any naturally occurring amino acid
  Transcript Sequence Number=SeqID_16869
SLSTEQLVARIRHYLHFHISVRXTPLHTPKNKRENEHQTIPPTQLPFFQLPEIHALSFLFFSFLSFHTHVSVNNMHLDTLWIKMLGHNPCYKPLDGIMLHDKVTKSLQSPLTVNTTTLGPLP

SEQ ID NO: 82844 - protein, 87 aa, Setaria italica
  Transcript Sequence Number=SeqID_16870
  Gene Ontology: Mol. function=nucleic acid binding; Cellular component= nucleus; Biological process=mRNA processing
  Homolog annotation: Hit_ID=Q10RM6; Match level="QueryCoverage=65%, HitCoverage=10%, E-value=8e-26, Identity=96%"; Hit description =Transposon protein, putative, CACTA, En/Spm sub-class, expressed
NCWTCTLRRNTLCTYRLGQSQLEPEVDPERDQRTVFAYQLSLKADERDVYEFFSRAGKVRDVRLIMDRNSRRSKGVGNIYNLVYLLE

SEQ ID NO: 82845 - protein, 215 aa, Setaria italica
  misc_feature (5)..(5): Xaa can be any naturally occurring amino acid
  misc_feature (64)..(64): Xaa can be any naturally occurring amino acid
  misc_feature (134)..(134): Xaa can be any naturally occurring amino acid
  Transcript Sequence Number=SeqID_16871
  Gene Ontology: Mol. function=nucleic acid binding; Cellular component= nucleus; Biological process=mRNA processing
  Homolog annotation: Hit_ID=Q10RM6; Match level="QueryCoverage=100%, HitCoverage=34%, E-value=2e-77, Identity=69%"; Hit description =Transposon protein, putative, CACTA, En/Spm sub-class, expressed
VTDQXGMQVSGATTGDFDDDEGGGLALNASSRALLMQKLDRSGITTRIHPPLQQRCFHIYLACXSLAGGMGTASLNTPVGIPAVSVLGAAPATAPVLHPTVPGLGSIPGATLPISTPSIELAPPSECLLLKNMXDPAVETDPDFDLDIRDDVQDECSKFGQLKHIFVDKNTAGFVYLRFDSITAAMSAQKALHGRWFAGKMITATFMTPQASNRK

SEQ ID NO: 82846 - protein, 101 aa, Setaria italica
  Transcript Sequence Number=SeqID_16872
  Gene Ontology: Mol. function=nucleic acid binding; Cellular component= nucleus; Biological process=mRNA processing
  Homolog annotation: Hit_ID=Q10RM6; Match level="QueryCoverage=53%, HitCoverage=9%, E-value=4e-23, Identity=98%"; Hit description =Transposon protein, putative, CACTA, En/Spm sub-class, expressed
MMPDMAMLLFFAREGSGDGDAERRRDDEERDRYRDRDVRRRKEEAAEPEVDPERDQRTVFAYQLSLKADERDVYEFFSRAGKVRDVRLIMDRNSRRSKGVG

SEQ ID NO: 82847 - protein, 212 aa, Setaria italica
  Transcript Sequence Number=SeqID_16873
  Gene Ontology: Mol. function=nucleic acid binding; Cellular component= nucleus; Biological process=mRNA processing
  Homolog annotation: Hit_ID=B9RRL9; Match level="QueryCoverage=95%, HitCoverage=34%, E-value=2e-60, Identity=58%"; Hit description =Splicing factor, putative
  Pfam annotation: Domain name=RRM_1; Domain location=13-83; Score =92.9; E_value=1.1e-24; Accession=PF00076.14; Description=RNA recognition motif. (a.k.a. RRM, RBD, o
SSSGAASGGARKLYVGNLHSNINEEQLRQVFEPFGQVELVQLPLDPLTGLCKGFGFVQFARLEDAKAAQSLNGQLDIAGRVIKVSAVTDQAGMQVSGATTGDLDDDEGGGLALNASSRALLMQKLDRSGITTSLAGGMGTASLNTPVGIPAVSVLGAAPATAPVLHPTVPGLGSIPGATLPISTPSIELAPPSECLLLKNMFDPAVETDPDF

SEQ ID NO: 82848 - protein, 163 aa, Setaria italica
  Transcript Sequence Number=SeqID_16874
QMYCYNTFQTTREPNKAFYTVADGNCGTSSRTHNLSCGLSESPETDQGFAGERSWWVRPGDLQGLKGQLIRLFELSGGCVPLVRIPSEYLKLFGRHLYVSEYGAVKLVQLFEKLADSFVVIGKGQRKMICLRNSGDRNLKNCPSTPIYFEERKRGSCALEEST

SEQ ID NO: 82849 - protein, 84 aa, Setaria italica
  Transcript Sequence Number=SeqID_16875
MAKDQNGSPRDGRGEEEEEEARSGSKSVEADRDERSKGSRDRGHRGKSKRREEERRRRRKEKERRKRKEKEKERERRRKEKKKR

SEQ ID NO: 82850 - protein, 119 aa, Setaria italica
  Transcript Sequence Number=SeqID_16876
EFRDMTDFLDLSCELLEEKKLNTLLSFGDLPGEILPWYTLLSSRQGGCHHELAPDQQGEDGADGDNRLPRCTMCGNYRWRKRGWILGTLELRDLGVHQRGGPSTASQLGGHFYRSRSRR

SEQ ID NO: 82851 - protein, 117 aa, Setaria italica
  Transcript Sequence Number=SeqID_16877
VFRKMEIRQDILQGMRLLIIFRIDVMATGIKIEFGRLNISHEAAKREINWTAFSTERSNLPTTCIWSRQTTERSDAQSIYLVTFQLVYFQQPVHTRELICLINNFQILKSHGCINSI

SEQ ID NO: 82852 - protein, 152 aa, Setaria italica
  Transcript Sequence Number=SeqID_16878
  Subcellular localization annotation: CTP_CleavageSite=49; ConfidenceScore=5.17e-01
RFLPRRLRSSPPQAVARWRKPPEAARSISSPRGRPLQRPEPPRHPTLTSCGELTDPLRFVTKAGGGRGRASDVVARRLRVQEEAHGEHVTAGHICGCWPKPSSQPWSSGCQAAPACAPSGCVPRGGDTGGRTAAETRQGSERPNSSKGGNLT

SEQ ID NO: 82853 - protein, 89 aa, Setaria italica
  Transcript Sequence Number=SeqID_16879
  Subcellular localization annotation: CTP_CleavageSite=42; ConfidenceScore=5.28e-01
TKPLRLDLPVKVVSALMSGCSLCWSLATRYLAGVSATAASSVASSLKQLSQYITCFLLVTFLERFSHGIPCFLHVKEDATMNLHQYKIA

SEQ ID NO: 82854 - protein, 224 aa, Setaria italica
  Transcript Sequence Number=SeqID_16880
  Homolog annotation: Hit_ID=B9T7M5; Match level="QueryCoverage=88%, HitCoverage=20%, E-value=2e-72, Identity=65%"; Hit description=WD -repeat protein, putative
  Pfam annotation: Domain name=WD40; Domain location=117-156; Score =0.3; E_value=37; Accession=PF00400.24; Description=WD domain, G-beta repeat
  Pfam annotation: Domain name=WD40; Domain location=160-198; Score =9.3; E_value=3.2; Accession=PF00400.24; Description=WD domain, G -beta repeat
  Pfam annotation: Domain name=WD40; Domain location=25-63; Score=35.9; E_value=1.6e-07; Accession=PF00400.24; Description=WD domain, G-beta repeat
  Pfam annotation: Domain name=WD40; Domain location=67-104; Score=0.9; E_value=31; Accession=PF00400.24; Description=WD domain, G-beta repeat
  Pfam module annotation: Pfam domain module=WD40::WD40::WD40::WD40; Domain location=117-156::160-198::25-63::67-104
TWSKSDQLLSSSMDKTVRLWDTESKACLKTFTHSDYVTCIQFNPVDDRYFISGSLDAKVRLWSIPDRQVVDWTDLNEMVTAASYTPDGQGAIIGSHKGSCRLYKTTGCKLSAEAQIYIQIKKRKAQAKKILPFQFAPGNAAEVLVTSADSQIRVFDGVTMVQKFRGFKNTSSQITAAYTSDGRYAVCASEDSHVYLWRTTRVPPAAAIGIGMKPKTWCTIRSYE

SEQ ID NO: 82855 - protein, 91 aa, Setaria italica
  Transcript Sequence Number=SeqID_16881
  Subcellular localization annotation: CTP_CleavageSite=41; ConfidenceScore=5.13e-01
MASSVSSPSSPNPVGLWFCQISSVLQGRCQGGRADPPQGPKSGAGGAEGRQGRAPDAAGSKGDDDTPRRTCRGDAMPEATVYLLLDRFAPS

SEQ ID NO: 82856 - protein, 122 aa, Setaria italica
  misc_feature (107)..(107): Xaa can be any naturally occurring amino acid
  Transcript Sequence Number=SeqID_16882
  Gene Ontology: Mol. function=serine-type carboxypeptidase activity; Cellular component=extracellular region; Biological process =proteolysis
  Homolog annotation: Hit_ID=Q53PA1; Match level="QueryCoverage=95%, HitCoverage=24%, E-value=8e-36, Identity=62%"; Hit description =Serine carboxypeptidase
KGYLVGNPATGESIDTDSRVPYAHGFGIISDQLYEATLEHCKGESYSNPTNMICDQLLKRVHELLGECSKPHILYKKCFYVSPGQNDESPRRIILKKEIEGLKRPPXPPMDCQNYVNYLSYF

SEQ ID NO: 82857 - protein, 125 aa, Setaria italica
  Transcript Sequence Number=SeqID_16883
  Gene Ontology: Mol. function=serine-type carboxypeptidase activity; Cellular component=extracellular region; Biological process =proteolysis
  Homolog annotation: Hit_ID=B6TC80; Match level="QueryCoverage=95%, HitCoverage=23%, E-value=1e-47, Identity=73%"; Hit description =Serine carboxypeptidase 1
  Pfam annotation: Domain name=Peptidase_S10; Domain location=1-125; Score=-218.7; E_value=0.022; Accession=PF00450.14; Description =Serine carboxypeptidase
LNLVCFFNSQNYVNYLSYFWANSMATRDALGIKKGTKDEWVRCHDGDLPYSKDIKSSIKYHRNVTLKGYRALVYSGDHDSVIPFLGTQAWVRSLNFPIVDEWRAWHVYGQSAGFSIVYSNNLTFT

SEQ ID NO: 82858 - protein, 370 aa, Setaria italica
  Transcript Sequence Number=SeqID_16884
  Gene Ontology: Mol. function=serine-type carboxypeptidase activity; Cellular component=extracellular region; Biological process =proteolysis
  Homolog annotation: Hit_ID=Q53PA1; Match level="QueryCoverage=100%, HitCoverage=72%, E-value=1e-144, Identity=66%"; Hit description =Serine carboxypeptidase
  Pfam annotation: Domain name=Peptidase_S10; Domain location=1-367; Score=324.2; E_value=2.7e-94; Accession=PF00450.14; Description =Serine carboxypeptidase
VKFIREPYNGSVPRLKYNPYSWTKAANIIFVDSPVGAGFSFSQDTKGYAVGDVSSSLQLKIFLYKWFEGHPDFLANPFYVGGDSYGGKIVPYLVQKITEDIEAQVRPALNLKGYLVGNPATGESIDTDSRVPYAHGFGIISDQLYEATLEHCKGESYSNPTNMICDQLLKRVHELLGECSKPHILYKKCFYVSPGQNDESPRRIILKKEIEGLKRPPPRPPMDCQNYVNYLSYFWANSMATRDALGIKKGTKDEWVRCHDGDLPYSKDIKSSIKYHRNVTLKGYRALVYSGDHDSVIPFLGTQAWVRSLNFPIVDEWRAWHVYGQSAGFSIVYSNNLTFATVKGGGHTAPEYQPERCLAMFKRWISNKPL

SEQ ID NO: 82859 - protein, 83 aa, Setaria italica
  Transcript Sequence Number=SeqID_16885
IFQGTMQSDGCTSTWIIHAQPWHERERRGWWLEMPTKTPTNFRERNVLARKGQEVQRENLRKRPFHFYLSWADRWSTKYPPPP

SEQ ID NO: 82860 - protein, 63 aa, Setaria italica
  Transcript Sequence Number=SeqID_16886
VLSELKRHGSDFYIFIFMLCNHNYGAPVICFFLEHARELRIIILRRINEWVFVFFFQEVKVMH

SEQ ID NO: 82861 - protein, 68 aa, Setaria italica
  Transcript Sequence Number=SeqID_16887
  Subcellular localization annotation: CTP_CleavageSite=57; ConfidenceScore=5.32e-01
ILLLTSSIIKQSDYTLPHESLHSIRRRPWRWSPPSSCPPPRRRQSTPTSAPSRCHPTTAAVTPTATGW

SEQ ID NO: 82862 - protein, 133 aa, Setaria italica
  misc_feature (47)..(47): Xaa can be any naturally occurring amino acid
  misc_feature (66)..(67): Xaa can be any naturally occurring amino acid
  Transcript Sequence Number=SeqID_16888
  Gene Ontology: Mol. function=hydrogen ion transmembrane transporter activity; Biological process=proton transport
  Homolog annotation: Hit_ID=Q6ZHJ9; Match level="QueryCoverage=89%, HitCoverage=63%, E-value=5e-26, Identity=56%"; Hit description =Putative Vacuolar ATP synthase subunit G 1
  Pfam annotation: Domain name=V-ATPase_G; Domain location=41-132; Score=107.8; E_value=3.7e-29; Accession=PF03179.7; Description =Vacuolar (H+)-ATPase G subunit
PFHLQGYNVLLILNFVPDAAAERWMRTGARVEFSSCWLQSKRLSRLXNAARAAKSARLRQAKEEAXXEIAEYRSQMEAEFQRKVAEKSGDSGANVKRLDQETAAKIEQLNQQAASISPEVIQMLLRHVTTVKN

SEQ ID NO: 82863 - protein, 110 aa, Setaria italica
  Transcript Sequence Number=SeqID_16889
  Gene Ontology: Mol. function=hydrogen ion transmembrane transporter activity; Biological process=proton transport
  Homolog annotation: Hit_ID=B2B9U2; Match level="QueryCoverage=100%, HitCoverage=100%, E-value=7e-40, Identity=76%"; Hit description =Vacuolar ATPase subunit G
  Pfam annotation: Domain name=V-ATPase_G; Domain location=5-109; Score= 182.4; E_value=1.3e-51; Accession=PF03179.7; Description=Vacuolar (H+)-ATPase G subunit
MDANRRQSGIQQLLAAEQEAQQIVNAARAAKSARLRQAKEEAEREIAEYRSQMEAEFQRKVAEKSGDSGANVKRLDQETAAKIEQLNQQAASISPEVIQMLLRHVTTVKN

SEQ ID NO: 82864 - protein, 109 aa, Setaria italica
  Transcript Sequence Number=SeqID_16890
  Homolog annotation: Hit_ID=Q5VS03; Match level="QueryCoverage=100%, HitCoverage=30%, E-value=3e-32, Identity=61%"; Hit description =Selenium-binding protein-like
SKSSMFQWQVGSNSWSEHPLDVERILQIVFFKGEMFAMDLFGRLHRIRLAPQFSMQEIAVMWGEDMDAGLSCQQWLVACGDMLLLVDFSVSFEPFSDLPGTFKVFCLDF

SEQ ID NO: 82865 - protein, 90 aa, Setaria italica
  Transcript Sequence Number=SeqID_16891
ETRRNSLRLYIWVVRSFGTITHLYHGSEVGRSYEETTTAGNPPVQISPVVNRNGHRVHAESSIPSLQGKVGCNCEDQKFSHALIQNNALA

SEQ ID NO: 82866 - protein, 370 aa, Setaria italica
  misc_feature (345)..(345): Xaa can be any naturally occurring amino acid
  Transcript Sequence Number=SeqID_16892
  Gene Ontology: Mol. function=nucleotide binding; Biological process =defense response
  Homolog annotation: Hit_ID=Q2R8J8; Match level="QueryCoverage=98%, HitCoverage=37%, E-value=1e-111, Identity=57%"; Hit description=NB -ARC domain containing protein, expressed
  Pfam annotation: Domain name=NB-ARC; Domain location=2-193; Score= -76.7; E_value=0.00014; Accession=PF00931.14; Description=NB-ARC domain
  Subcellular localization annotation: CTP_CleavageSite=48; ConfidenceScore=5.11e-01
ITRGNFIVIDDIRSKDQWNCIKSAFPRLQDVSSRIVVTTKFQSVANTCSSTNGYVHNMRRLDEECSKQLLLKESCLQEYSDSSSSQSDSKVILDKCDGQPLALTAVGQFIQSRNSVEQPEWEVVCKDVRCHLDSDDCLKRMYQVLTHDYTSLPSHELKACLLYFATFPSNHRVRTLMLMRRWLAEGFVVPSTLCSDPEAQSFKELMDRNIIQSVDVSNNLKVKTCKTYGMMHEYIMRKSLSENIIALFDDGKLQSKYARRLSLHDSSITDATNLEIDLSLVRSLVVIGEAGKAILNFRKYQLLRVLDLEQCTDLHNGHLKDICNLLLMKYLSLGGKITDLPKDIXKLKVLETLDLRRTYVKILPPEVIQL

SEQ ID NO: 82867 - protein, 378 aa, Setaria italica
  misc_feature (20)..(20): Xaa can be any naturally occurring amino acid
  Transcript Sequence Number=SeqID_16893
  Gene Ontology: Mol. function=ATP binding; Biological process=apoptosis
  Homolog annotation: Hit_ID=Q2R8J8; Match level="QueryCoverage=88%, HitCoverage=35%, E-value=5e-84, Identity=51%"; Hit description=NB -ARC domain containing protein, expressed
YFLKYLSLGGKITDLPKDIXKLKVLETLDLRRTYVKILPPEVIQLPNLIHLFGKFKLPNTVVQNKLQKFLSSGQCKLQTLSGFLVDDNEGFSELMVHMNKLRKVKIWCESSATSSSLTNVKKAIQNFIHDVKDPSDDPRSLSVHFEGCSEDLLEGLEAPCYLRSLKLQGNIPKLPEFVTALRRLRELCLRSTRMTADLLTALGNLKDLLYLKLIADELEQITFRDRALPNLLCLCYVVKHPTFPRTEDGALPLLISLQLFCENMDSQCSVQIKGFTRLREVVIYDEVNPDIKANWERAVKEHQNRPKVLLLKRADPPEEATGNETTECFAPLEGPVQETDIQMPPEEPKFASNSSKGHPVLCVGLSGLPIAGIGTVSS

SEQ ID NO: 82868 - protein, 158 aa, Setaria italica
  misc_feature (138)..(138): Xaa can be any naturally occurring amino acid
  Transcript Sequence Number=SeqID_16894
SLPSDGDEENSNKGDHLAKEQPQPCVTKESLTAQPHDSAEITEVPQCQNKDAGSHDAGFVSPTKTVIPLLHRHCAQPEDSVTSVDDQLRDSDVQMICRPSDPCAVDRSLSVEEMSGCIPLTESGCKAGISRPRGLHSXEKRGFSPKKLSPKKGILKRH

SEQ ID NO: 82869 - protein, 217 aa, Setaria italica
  misc_feature (36)..(36): Xaa can be any naturally occurring amino acid
  misc_feature (125)..(125): Xaa can be any naturally occurring amino acid
  Transcript Sequence Number=SeqID_16895
  Gene Ontology: Mol. function=hydrolase activity, hydrolyzing O -glycosyl compounds; Biological process=carbohydrate metabolic process
  Homolog annotation: Hit_ID=O81638; Match level="QueryCoverage=94%, HitCoverage=19%, E-value=2e-91, Identity=79%"; Hit description =Pullulanase-type starch debranching enzyme
DFNQGNETETRLTLATYTDHIQIGLAGNLKNYVLKXHTGEAKKGSEVCTFDGSPVGYTSSPIEIINYASAHDNETLFDIISLKTPMSLSIDERCRINHLSSSMIALSQLSPLLYILLICPPWNTXFFHAGDEILRSKSLDRDSYNSGDWFNKLDFTYETNNWGVGLPPREKNEGSWPLMKPRLENPSFKPTKDQILAALNNFVDILKELRITTIRPN

SEQ ID NO: 82870 - protein, 175 aa, Setaria italica
  misc_feature (122)..(122): Xaa can be any naturally occurring amino acid
  misc_feature (144)..(144): Xaa can be any naturally occurring amino acid
  Transcript Sequence Number=SeqID_16896
  Gene Ontology: Mol. function=hydrolase activity, hydrolyzing O -glycosyl compounds; Biological process=carbohydrate metabolic process
  Homolog annotation: Hit_ID=O81638; Match level="QueryCoverage=82%, HitCoverage=15%, E-value=4e-75, Identity=91%"; Hit description =Pullulanase-type starch debranching enzyme
LDKLLSLSCLLNSAQNYNYLNAPLFLPFQINYASAHDNETLFDIISLKTPMSLSIDERCRINHLSSSMIALSQGIPFFHAGDEILRSKSLDRDSYNSGDWFNKLDFTYETNNWGVGLPPREXNEGSWPLMKPRLENPSFKPTKXQILAALNNFVDILKIRYSSPLFRLTTASDVE

SEQ ID NO: 82871 - protein, 334 aa, Setaria italica
  Transcript Sequence Number=SeqID_16897
  Gene Ontology: Mol. function=hydrolase activity, hydrolyzing O -glycosyl compounds; Biological process=carbohydrate metabolic process
  Homolog annotation: Hit_ID=O81638; Match level="QueryCoverage=98%, HitCoverage=34%, E-value=1e-154, Identity=81%"; Hit description =Pullulanase-type starch debranching enzyme
  Pfam annotation: Domain name=CBM_48; Domain location=122-206; Score =71.0; E_value=4.4e-18; Accession=PF02922.10; Description =Carbohydrate-binding module 48 (Isoam
FLLLWVSYVVSLIYPKVSNQETSLYLYASRSATMHMSNGVIEGYDSKVQLQPEHGGLPASVTQKFPFISSYRAFRIPSSVDVASLVKCQLAVASFDAHGKSQDVTGLQLPGVLDDMFAYTGPLGPVFSEEAVNLYLWAPTAQDVSVSFYDGPVGPLLETVQLNESNGVWSVTGPRNWENLYYLFEVTVYHPATSKIEKCLADDPYARGLSANGTRTLLVDINSEALKPPSWDELVAEKPKLDSFSDISIYELHIRDFSAHDSTVDTHSRGGFGAFTCQDTAGIRHLRKLSDAGLTHVHLLPSFQFGGVDDIKNNWKCVDEAELSKLPPRVLVFY

SEQ ID NO: 82872 - protein, 663 aa, Setaria italica
  Transcript Sequence Number=SeqID_16898
  Gene Ontology: Mol. function=hydrolase activity, hydrolyzing O -glycosyl compounds; Biological process=carbohydrate metabolic process
  Homolog annotation: Hit_ID=O81638; Match level="QueryCoverage=100%, HitCoverage=68%, E-value=0.0, Identity=89%"; Hit description =Pullulanase-type starch debranching enzyme
  Pfam annotation: Domain name=Alpha-amylase; Domain location=36-564; Score=-66.9; E_value=1.4e-05; Accession=PF00128.16; Description =Alpha amylase, catalytic domain
TLLVDINSEALKPPSWDELVAEKPKLDSFSDISIYELHIRDFSAHDSTVDTHSRGGFGAFTCQDTAGIRHLRKLSDAGLTHVHLLPSFQFGGVDDIKNNWKCVDEAELSKLPPGSDLQQDAVVAIQEEDPYNWGYNPVLWGVPKGSYASNPDGPNRIIEYRQMVQALNRLGLRVVMDVVYNHLYSSGPSAITSVLDKIVPGYYLRRDTNGQIENSAAVNNTASEHFMVDRLIVDDLLNWAVNYKVDGFRFDLMGHIMKKTMMRAKSALQSLTMDEHGVDGSKIYLYGEGWDFGEVAQNKRGINGSQLNMSGTGIGSFNDRIRDAINGGSPFGNPLQQGFSTGLFLEPNGFYQGNETETRLTLATYTDHIQIGLAGNLKNYVLKSHTGEAKKGSEVCTFDGSPVGYTSSPIEIINYASAHDNETLFDIISLKTPMSLSIDERCRINHLSSSMIALSQGIPFFHAGDEILRSKSLDRDSYNSGDWFNKLDFTYETNNWGVGLPPREKNEGSWPLMKPRLENPSFKPTKDQILAALNNFVDILKIRYSSPLFRLTTASDVEQRVHFHNTGPSLVPGVIVMSIQDARNDAHEMSQLDENFSCVVTVFNACPHEVSIEIPDLATNKLQLHPVQVNSSDALVRQSAYEATTGQFTVPRRTTAVFVEPRC

SEQ ID NO: 82873 - protein, 107 aa, Setaria italica
  Transcript Sequence Number=SeqID_16899
  Gene Ontology: Mol. function=nucleoside-triphosphatase activity; Cellular component=protein complex; Biological process=protein catabolic process
  Homolog annotation: Hit_ID=Q8W3N9; Match level="QueryCoverage=92%, HitCoverage=26%, E-value=3e-50, Identity=93%"; Hit description=26S proteasome regulatory particle triple-A ATPase subunit3 (Fragment)
GQITLRIQALLRPGRLDRKIEFPLPDRRQKRLVFQVCTAKMNMSDEVDLEDFISRPDKISAADITAICQEAGMHAVRKNRYVILQKDFEKGYRTNVKKPETEFDFYK

SEQ ID NO: 82874 - protein, 54 aa, Setaria italica
  Transcript Sequence Number=SeqID_16900
YFVSKYNFKVREHCGRQSITSPLRNNMNCDNRQQSRISTLMLKDTSDKHETVQH

SEQ ID NO: 82875 - protein, 420 aa, Setaria italica
  Transcript Sequence Number=SeqID_16901
  Gene Ontology: Mol. function=nucleoside-triphosphatase activity; Cellular component=protein complex; Biological process=protein catabolic process
  Homolog annotation: Hit_ID=Q9SEI4; Match level="QueryCoverage=91%, HitCoverage=93%, E-value=0.0, Identity=95%"; Hit description=26S protease regulatory subunit 6B homolog
  Pfam annotation: Domain name=AAA; Domain location=203-390; Score =297.7; E_value=2.5e-86; Accession=PF00004.21; Description=ATPase family associated with various cellular activities (AAA)
  Pfam annotation: Domain name=AAA_2; Domain location=199-331; Score= -21.2; E_value=0.00051; Accession=PF07724.6; Description=ATPase family associated with various
  Pfam annotation: Domain name=AAA_5; Domain location=203-336; Score =20.7; E_value=1.8e-05; Accession=PF07728.6; Description=ATPase family associated with various
  Pfam module annotation: Pfam domain module=AAA::AAA_2::AAA_5; Domain location=203-390::199-331::203-336
  Subcellular localization annotation: CTP_CleavageSite=29; ConfidenceScore=5.15e-01
MAAATTAPAPPAATPMAPPPSYPASSAASASTTASAEDDDDLYGRLKSLQRHMEFVEIQEEYVKDEQKNLKRELLRAQEEVKRIQSVPLVIGQFMEMVDGNNGIVGSTTGSNYYVRILSTINRELLKPSASVALHRHSNALVDVLPPEADSSISLLGSSEKPNVTYNDIGGCDIQKQEIREAVELPLTHHELYKQIGIDPPRGVLLYGPPGTGKTMLAKAVAHHTTAAFIRVVGSEFVQKYLGEGPRMVRDVFRLAKENAPAIIFIDEVDAIATARFDAQTGADREVQRILMELLNQMDGFDQTVNVKVIMATNRADTLDPALLRPGRLDRKIEFPLPDRRQKRLVFQVCTAKMNLSDEVDLEDYVSRPDKISAADIAAICQEAGMHAVRKNRYVILPKDFEKGYRTNVKKPETDFDFYK

SEQ ID NO: 82876 - protein, 127 aa, Setaria italica
  Transcript Sequence Number=SeqID_16902
  Gene Ontology: Mol. function=alanine-tRNA ligase activity; Cellular component=cytoplasm; Biological process=alanyl-tRNA aminoacylation
  Homolog annotation: Hit_ID=Q9FFC7; Match level="QueryCoverage=59%, HitCoverage=7%, E-value=6e-34, Identity=84%"; Hit description=Alanyl- tRNA synthetase
RPSPRHQGFGCVRDGWGQRHSARENGFFLTNNSSASVEPATQEVGTAIPGEWSGDAIRRRFLEFYAARGHKILPSSSLVPDDPTVFLTIAGMLQFKPIFLGKEPRRVPCATTSQKCIRTNDIENVGR

SEQ ID NO: 82877 - protein, 69 aa, Setaria italica
  Transcript Sequence Number=SeqID_16903
  Subcellular localization annotation: CTP_CleavageSite=52; ConfidenceScore=5.17e-01
MAAALLLLLLTPAGLLAALAFLARPRAARVPLKGRHVFITGGSSGIGLAMATAAAREGARVSILARNLA

SEQ ID NO: 82878 - protein, 118 aa, Setaria italica
  Transcript Sequence Number=SeqID_16904
MEFDSSTHAVCLTCSMAFSSSEASDHAEHDMLSIVMESGRLPRLQIPSAHYLAHVWRNIKGWDPDGMGDILIKDNSSPRCQTCQMRLVDGGSKTCSFECCLPQPSLLPRPLQRQQLAG

SEQ ID NO: 82879 - protein, 312 aa, Setaria italica
  Transcript Sequence Number=SeqID_16905
  Gene Ontology: Mol. function=2 iron, 2 sulfur cluster binding; Biological process=oxidation reduction
  Homolog annotation: Hit_ID=Q9LZ73; Match level="QueryCoverage=97%, HitCoverage=81%, E-value=6e-83, Identity=54%"; Hit description=3 -oxoacyl-[acyl-carrier-protein] synthase-like protein
  Pfam annotation: Domain name=DUF455; Domain location=1-298; Score =405.0; E_value=1.3e-118; Accession=PF04305.6; Description=Protein of unknown function (DUF455)
RPARSAEVRLLPPSRMPKLGKGGSAQSRLAMLHSLAHTESWAVDLSWDIIARFGARMRMPREFFDDFARLAQDEGRHYTVLSARLRELGWRYGALPAHDGLWDSAMRTAHCLLARLAVEHCVHEARGLDVLPTTISRFRAGGDEQTAKLLEDIIYPEEVTHCAAGVRWFRYLCLRPCSDDLISYSVPHSEPHCPGMPGDGTADDKTVLEGRNELTSVQQVEDETSKISQDFNSNINMTQQVEDGLANCKLGNNVDKDEAAVIRTFHRIVREYFRGPLKPPFNTEARKAAGFVPAWYEPLAVKEVHVEGKADN

SEQ ID NO: 82880 - protein, 111 aa, Setaria italica
  Transcript Sequence Number=SeqID_16906
  Gene Ontology: Mol. function=electron carrier activity; Biological process=oxidation reduction
  Homolog annotation: Hit_ID=B6U021; Match level="QueryCoverage=99%, HitCoverage=22%, E-value=4e-19, Identity=46%"; Hit description =Cytochrome P450 CYP76M15
ILAAHVFSSRSLAAARGVRERKVRDLVAHLRARAGREVDVGRALYGGMINLVSSTFFSVDVVDVDATGESAHGMREHVENIADLMTKPNVSDLLPFLRRLDLQGRRRAAAW

SEQ ID NO: 82881 - protein, 60 aa, Setaria italica
  Transcript Sequence Number=SeqID_16907
VLPPFFIYKARTHIKIQTLQSLTNNLTINFYFYNANFIWLDSYSNILYNDYKFITINNII

SEQ ID NO: 82882 - protein, 56 aa, Setaria italica
  Transcript Sequence Number=SeqID_16908
DSLLLLILELLDTMLLCEIFITLLISIHIHLLYVSNSWCFTLITFIYFCQINSCAY

SEQ ID NO: 82883 - protein, 61 aa, Setaria italica
  Transcript Sequence Number=SeqID_16909
  Gene Ontology: Mol. function=electron carrier activity; Biological process=metabolic process
  Homolog annotation: Hit_ID=Q2QY23; Match level="QueryCoverage=96%, HitCoverage=3%, E-value=4e-12, Identity=58%"; Hit description =Cytochrome P450 family protein
FCWKPSNWRVVLPNEFQQDELEIIFRYKTLFDQHVVKSVSLEVYRVLQLCAKEFQFIQQAD

SEQ ID NO: 82884 - protein, 85 aa, Setaria italica
  Transcript Sequence Number=SeqID_16910
MESWATWVGTSVASAFFASLERCSCINLSTDDDDDRDDDEEAKDRPLILSSAPRHDDAAAAKPADLDLLPDSKDQKQEQPPVPPV

SEQ ID NO: 82885 - protein, 54 aa, Setaria italica
  Transcript Sequence Number=SeqID_16911
HRCVNWCMPHRFVKLGRGKANLVATSSSVTLVMLFVNMKISMLMIIPPGHLADG

SEQ ID NO: 82886 - protein, 78 aa, Setaria italica
  Transcript Sequence Number=SeqID_16912
TFTCESPRSDIFLIKKHTIRKHICAYICISSNLVGTSPKYDLITCLSLDSYANNIACLIMIFHMVFPDKVQSQFSIKD

SEQ ID NO: 82887 - protein, 184 aa, Setaria italica
  Transcript Sequence Number=SeqID_16913
  Subcellular localization annotation: CTP_CleavageSite=73; ConfidenceScore=5.75e-01
TSTARSASSHASSPHAVAMAVAAAWLPPTAARRSSLSSLRSPFVAPISIHVPRRAPPPCPSPNPIPRRSRLVVASAQFDFARAVQTAWRVGTDAVEAGSNFVPGSVPRPIARIGVTFAAVSVALFLLKSVVSTALFVLAMMGLIYLGFLAMNPKEASGSRMDETGGNPSEDPVEEARRIMEKYK

SEQ ID NO: 82888 - protein, 79 aa, Setaria italica
  Transcript Sequence Number=SeqID_16914
RWDLPGAAYDRTRGNRRNWILAWEDGFCNFAAAAAATSAACGEEGAAAAVVAYAGDCEAAVAPQEAAKHHQQQQPQGLQ

SEQ ID NO: 82889 - protein, 95 aa, Setaria italica
  misc_feature (14)..(14): Xaa can be any naturally occurring amino acid
  Transcript Sequence Number=SeqID_16915
  Gene Ontology: Mol. function=protein binding; Cellular component=cell wall
  Homolog annotation: Hit_ID=Q70YJ5; Match level="QueryCoverage=77%, HitCoverage=33%, E-value=6e-15, Identity=48%"; Hit description =Putative Cf2/Cf5 disease resistance protein (Fragment)
  Pfam annotation: Domain name=LRRNT_2; Domain location=39-77; Score =50.8; E_value=5.2e-12; Accession=PF08263.4; Description=Leucine rich repeat N-terminal domain
MGMLRVSCIQIAIXLLVFTHTKSSTQASTETNGTIKKCIAHERSALLTFRAGLSDPANRLSSWEGDSCCQWKGVQCSNRSSHIVKLDLQALTATT

SEQ ID NO: 82890 - protein, 102 aa, Setaria italica
  Transcript Sequence Number=SeqID_16916
  Subcellular localization annotation: CTP_CleavageSite=35; ConfidenceScore=5.06e-01
CTGLLRFLPSPSSFTYRSLLQRVLHSGRKKFLPVRDAHSPNGNGNKPWLFKTYMYGINSPLDIRTDSSDGVVVAIEVHCNGQAFAKHDWGCASITSFSLISF

SEQ ID NO: 82891 - protein, 56 aa, Setaria italica
  Transcript Sequence Number=SeqID_16917
MSSEHNLCMDEALLKEPANQLALKNKDGRCPSLLTVVGVVFLTFNSIMAVYRSNGD

SEQ ID NO: 82892 - protein, 85 aa, Setaria italica
  Transcript Sequence Number=SeqID_16918
MGKKKQGGGGGGDEKALLWRLPEITSNELGKIGPAFGLGIGCGAGAGVGFFGGAGLGFGFPGLTLGFGVGAGCGVGIGFGYGMGK

SEQ ID NO: 82893 - protein, 796 aa, Setaria italica
  misc_feature (444)..(444): Xaa can be any naturally occurring amino acid
  Transcript Sequence Number=SeqID_16919
MTTRDIHIGHKETVQFKDVYEVSEEPIRTYHLQDQTFPSGASSRSKRDIRMEIVRQKFMEAKRLATNEKLLHSKEFQDALEVLSSNRDLFLKFLEEPNSTFSKQLAGLHKSPSPPHTKRITVLKPNKSVDNEGRREIRTHRINEEHEHVMPRTHRRSHSAEVTFSQPTRIVVLKPSPGKPSRTMARLTPRAAPGQLTEQIDFYGGLEDDNYLPDGLHRRDESLLSSVYSNGYGGDESSFSRSEVDYIDEDGNLSDSEIVSPVSRSRHSWDHIKRYNSPYSGSSFSRASRSPESSVIREAKKRLSERWASVAYNEINQEQMRLPRSSTTLGEMLSLRGAKKEVGGVGSVSSSQPCDAENELTLQATCISTFIENEGDGQSSPKNLARSKSVPVSSSKFDNIAPNAPSSNSEGCKTLNVVTRSDKVKSSFKGRVSSFFFPKSKGSXKEKITLSASSDEKVEVTCFGSMKPEAAQNIGADENMSFREDKDDSSTTQTICSSKDIVSIEAPICSVCPSGHFDGLRSGGGLNGTRDEPSPTSVLDASFEDSNINESESLRSITCGNERIGLRSDAIESVTRSLSWEDMSSPSPLLGMTKLTHLSSGDNDELECVAFVQRIVSSSGLGDLQLGTVFTGWHLPDCPLDPALCDKLLDRKEEAAKSRERRSNQKLLFDYVNMTLVEIGQDTLLRAYPWSQARSMAWKESLSLDLVEEIPHLMTDWLYGSGKFAVNENDDAGTILERIMQQEVEGRGWVKSMRWELDGITELIAGEVLEELVEETVDDLAICSPHQEMPMATLQL

SEQ ID NO: 82894 - protein, 184 aa, Setaria italica
  Transcript Sequence Number=SeqID_16920
MLRGNVYDQKKAMINLFDRGLGMSNSNMLTDRPRRDGSPACRSRQDVKRTIDPAKVYAEDKLGASNWSSTSNKSNASPLNVVLAKEMSKELESKKKPPSVVARLMGLEDDLPGQGATLQSAKRNLKKSHLNSNSAERNSLHQHQEQYSSTMTTRDIHIGHKETVQFKDVYEVSEEPIRTYHLQD

SEQ ID NO: 82895 - protein, 145 aa, Setaria italica
  misc_feature (80)..(80): Xaa can be any naturally occurring amino acid
  misc_feature (120)..(120): Xaa can be any naturally occurring amino acid
  Transcript Sequence Number=SeqID_16921
  Gene Ontology: Mol. function=aspartic-type endopeptidase activity; Cellular component=nucleus; Biological process=regulation of transcription, DNA-dependent
  Homolog annotation: Hit_ID=Q53LV2; Match level="QueryCoverage=100%, HitCoverage=25%, E-value=3e-19, Identity=35%"; Hit description =Retrotransposon protein, putative, unclassified
DEQFSRGHKCKQLFEITIVNDFDDDDEPSLMVITAGPNGGLQGWCTMRLVGAVFGEGARVVIDTGATHNVVDFSFARHVXVSERRINVGITIGDGSRVRSRGLCRGVPIRLDREVFASRXISTLDGETDVILGTSWLASLGPITW

SEQ ID NO: 82896 - protein, 380 aa, Setaria italica
  misc_feature (9)..(9): Xaa can be any naturally occurring amino acid
  misc_feature (238)..(238): Xaa can be any naturally occurring amino acid
  Transcript Sequence Number=SeqID_16922
  Gene Ontology: Mol. function=aspartic-type endopeptidase activity; Biological process=DNA integration
  Homolog annotation: Hit_ID=Q10SZ0; Match level="QueryCoverage=100%, HitCoverage=16%, E-value=1e-122, Identity=59%"; Hit description =Retrotransposon protein, putative, unclassified
  Pfam annotation: Domain name=rve; Domain location=37-199; Score =162.5; E_value=1.3e-45; Accession=PF00665.18; Description=Integrase core domain
LDLIRGMPXKVWEDLVCAPCRHGKMVAASHPPVNQVMTEHPGELLHMDTVGPARVCSVGGKWYVLVIVDDFSRYSWVFFMESKDEAFPFVRDLILRLRNERPKDAMRAIRSDNGTEFKNARFKAFCNDLGLEHQFSSPYVPPQNGVVERKNRTLCEMARTMLDEHRTPRKYWAEAVNTACYVSNRIFLRAFLKKTSYELMHRRSPKVSHLRVFGCKCFILKQGNLDKFESRSTDGIFXGYASHSRAYRVLNLETNRIVKTCEITFNEIMPCTTPVFEVAGEHEMGQSIFEEEEERVDGGDEEDDEIDRAPAVAPIPSTSTTRVDGPTSTSTTSSHQLVPLQDDEEEDQSDPAAVEGEATSEREAPRHIQRRHPPQQMIGN

SEQ ID NO: 82897 - protein, 107 aa, Setaria italica
  misc_feature (47)..(47): Xaa can be any naturally occurring amino acid
  Transcript Sequence Number=SeqID_16923
  Gene Ontology: Mol. function=5'-3' exoribonuclease activity; Cellular component=intracellular; Biological process=nucleobase, nucleoside, nucleotide and nucleic acid metabolic process
  Homolog annotation: Hit_ID=Q10C49; Match level="QueryCoverage=98%, HitCoverage=14%, E-value=2e-45, Identity=84%"; Hit description=5'-3' exoribonuclease, putative, expressed
  Pfam annotation: Domain name=XRN_N; Domain location=1-107; Score =33.7; E_value=1.9e-11; Accession=PF03159.10; Description=XRN 5'-3' exonuclease N-terminus
TVSDAEEEEPVELEPGAFVPVDLRRPNPNGIEFDNLYLDMNGIIHPXLPPEGRPAPTTYDEVFKSIFDYIDHLFGLVRPRKLLYMAIDGVAPRAKMNQQRSRRFRAV

SEQ ID NO: 82898 - protein, 95 aa, Setaria italica
  Transcript Sequence Number=SeqID_16924
MAFGGRRDGPLMLRGGGSGGGKPLSRGSRIAVAVAVGVALGCVCAFLYPDGIFRPSASALHWSSHVDSTACESTGQFTNLKSQLVSLERQNAEMR

SEQ ID NO: 82899 - protein, 318 aa, Setaria italica
  Transcript Sequence Number=SeqID_16925
  Gene Ontology: Mol. function=catalytic activity; Cellular component =extracellular region; Biological process=metabolic process
  Homolog annotation: Hit_ID=A8J657; Match level="QueryCoverage=98%, HitCoverage=36%, E-value=1e-129, Identity=69%"; Hit description =Alpha-1,2-fucosidase
RETAYPLLEGSASFLLDWLIEGHREYLETNPSTSPEHYFIAPDGKKACVSYSTTMDMSIIREVFSAVLLSADILGKSDTNVVQRIKKALPNLPPVKVARDGTIMEWAQDFQDPEVHHRHVSHLFGLYPGHSMSLEQTPDLCKAVANSLYKRGDEGPGWSTSWKMALWAHLHNSEHAYKMILQLITLVDPKHEVSREGGLYSNLFTAHPPFQIDANFGFPAALSEMLVQSTGTDLYLLPALPRSKWPHGCVKGLKARGGVTVNISWKEGGLREALLWSSSEQISFARLHYADRTAPFSLSSGQVYRFGRDLKCLKTWPL

SEQ ID NO: 82900 - protein, 197 aa, Setaria italica
  misc_feature (31)..(31): Xaa can be any naturally occurring amino acid
  misc_feature (84)..(84): Xaa can be any naturally occurring amino acid
  Transcript Sequence Number=SeqID_16926
  Gene Ontology: Mol. function=hydrolase activity
  Homolog annotation: Hit_ID=B6SWJ5; Match level="QueryCoverage=95%, HitCoverage=56%, E-value=1e-78, Identity=78%"; Hit description =Hydrolase
PRNPLLLLHGFGASATWQWAPYLRPLIAAGXFDPIVPDLVFFGASCTSLPDRSDAFQASTIKAAMDAIGVARFGLVGVSYGGFXGYRMAAMFPEAVERVAMICAGVCLEEKDLAEGLFPVAGVGEAAALLVPRRPEEVRRLVRLTFVRPPLIMPSCFLWDYIKVMASAHIQEKAELLYALISGRQLSTLPKLTQPTL

SEQ ID NO: 82901 - protein, 71 aa, Setaria italica
  Transcript Sequence Number=SeqID_16927
MVPPAVLPKVAAQWLFTFHRAARKLRRQAFQLYYRNAAAKPPPSTAKPQQGHAATAKGAAILDDAAAVAAA

SEQ ID NO: 82902 - protein, 59 aa, Setaria italica
  Transcript Sequence Number=SeqID_16928
  Subcellular localization annotation: CTP_CleavageSite=41; ConfidenceScore=5.13e-01
SIKHIVCGLQVFHIVTIFNQPKVPTKVHVRFPRIQVWSSCRPTHAPDLGTFFLGSSRPC

SEQ ID NO: 82903 - protein, 69 aa, Setaria italica
  misc_feature (57)..(69): Xaa can be any naturally occurring amino acid
  Transcript Sequence Number=SeqID_16929
  Subcellular localization annotation: CTP_CleavageSite=24; ConfidenceScore=5.20e-01
QLATSVFTVPPAGRSFLFCFFCCRFSPPASSCNLYMVGWHAEVTLWQSESFYLKKKXXXXXXXXXXXXX

SEQ ID NO: 82904 - protein, 103 aa, Setaria italica
  Transcript Sequence Number=SeqID_16930
  Gene Ontology: Mol. function=heat shock protein binding
  Homolog annotation: Hit_ID=B6U0R7; Match level="QueryCoverage=99%, HitCoverage=42%, E-value=4e-31, Identity=65%"; Hit description=Heat shock protein binding protein
MAGRREGEHPASPWRPGVPGEEGDSGPFPSAIILVALVGATATTAAVGQLRRTVRWFYTQLSRSEPYVYWEDVPRTRRPNRSGEAWEQYYQRMRERNEDQREE

SEQ ID NO: 82905 - protein, 154 aa, Setaria italica
  Transcript Sequence Number=SeqID_16931
  Gene Ontology: Mol. function=metal ion binding; Biological process =metal ion transport
  Homolog annotation: Hit_ID=B9RCH3; Match level="QueryCoverage=37%, HitCoverage=44%, E-value=2e-16, Identity=74%"; Hit description=Metal ion binding protein, putative
  Pfam annotation: Domain name=HMA; Domain location=5-75; Score=29.4; E_ value=1.4e-05; Accession=PF00403.18; Description=Heavy-metal -associated domain
MSKKIVVKIDLHDNKDKQKAMKAVSTLSGIDSISVDMASHKMTVIGMVDPVNVVSKLRKASWAANIDSVGPAKEPEKKEEEKKKDGDDKKDGDDKKDGDAKKDGDEKDGKKAAAPTEQQILAELMNQYRAYYPPMNTHYYVQSMEENPNSCAIC

SEQ ID NO: 82906 - protein, 128 aa, Setaria italica
  Transcript Sequence Number=SeqID_16932
  Gene Ontology: Mol. function=beta-N-acetylhexosaminidase activity; Cellular component=cellular_component; Biological process =carbohydrate metabolic process
  Homolog annotation: Hit_ID=B4FYZ2; Match level="QueryCoverage=100%, HitCoverage=21%, E-value=4e-66, Identity=93%"; Hit description=Beta -hexosaminidase beta chain
  Pfam annotation: Domain name=Glyco_hydro_20; Domain location=2-128; Score=-70.6; E_value=5.1e-08; Accession=PF00728.14; Description =Glycosyl hydrolase family 20, catalytic domain
THRGILLDTARNYYPVRDILRTIRAMAYNKLNVFHWHITDAQSFPIVLPSVPNLANFGSYSPAMRYTDQDVRRVVRFAEAFGIRVIPEIDMPGHAGSWAGAYPEIVTCANKFWAPTAKPALAAEPGTG

SEQ ID NO: 82907 - protein, 355 aa, Setaria italica
  Transcript Sequence Number=SeqID_16933
  Homolog annotation: Hit_ID=B9T2M3; Match level="QueryCoverage=85%, HitCoverage=40%, E-value=6e-78, Identity=50%"; Hit description =Golgin-84, putative
EERWRLAEGRSRSAERLAAMAARAIAEREEAVARLEGEKAGLEKLLAEREKEQAQEASELQTSMIETMEAVEIEKQRHHSTRMEALARLATLEVTNAELAKSFAREQWNLEVQVDQVAQLREEVEMKTLAQDKYKRKLAKIQKTSTAPVDEIESLRRFKLEEEIIDAEYILTCDRIVSLKDKARKIEENIEMTRRAMVQPTEVEIELKKRLDQLTDRLIQKQMQVESLSSEKAALLMRIEAVSRLLDSSASSMASSSSSRMDIEAGAWQESHSPKFRDRIQAGQQQLGSAIRQLDSIFSAGHIFLRRNPKAQIWAFVYLVCLHLWVLYILKSHPTVSESHPGATFSLETLNKTSI

SEQ ID NO: 82908 - protein, 91 aa, Setaria italica
  Transcript Sequence Number=SeqID_16934
  Gene Ontology: Mol. function=nucleotide binding; Cellular component =myosin complex
  Homolog annotation: Hit_ID=Q6UAL2; Match level="QueryCoverage=100%, HitCoverage=5%, E-value=1e-41, Identity=89%"; Hit description=Myosin heavy chain class XI E2 protein
MDIVGIDQEEQDAIFRVVAAILHLGNIEFSKGKEIDSSKLRDDKSVHHLKTVAELLMCNEKALEDSLCQRVIVTPDGNITKPLDPDSAALS

SEQ ID NO: 82909 - protein, 113 aa, Setaria italica
  Transcript Sequence Number=SeqID_16935
  Gene Ontology: Cellular component=cytoplasm; Biological process =protein modification process
  Homolog annotation: Hit_ID=B6U6S0; Match level="QueryCoverage=100%, HitCoverage=100%, E-value=3e-43, Identity=76%"; Hit description =Ubiquitin domain containing 1
MGCAGSTPKTDDNGKKLKKPKPWKHTQAITLAQLRQMRDEFWDTAPHYGGQKEIWDALRAAADSDLALAQTIVDSAGIIVSNSDMTLCYDERGAKYELPKYVLSEPTNLIREG

SEQ ID NO: 82910 - protein, 90 aa, Setaria italica
  Transcript Sequence Number=SeqID_16936
  Gene Ontology: Mol. function=starch synthase activity; Biological process=glucan biosynthetic process
  Homolog annotation: Hit_ID=B2Z4A6; Match level="QueryCoverage=100%, HitCoverage=9%, E-value=1e-35, Identity=78%"; Hit description=Starch synthase IV
KISEFCLYFVDLLKKRVKSVEERFQACNHEMHSQIELYEHSIVEFHDTLSKLIKESEKKSMEHYAEGMPSEFWSRISLLIDGWSLEKKIS

SEQ ID NO: 82911 - protein, 177 aa, Setaria italica
  misc_feature (165)..(165): Xaa can be any naturally occurring amino acid
  Transcript Sequence Number=SeqID_16937
  Gene Ontology: Mol. function=protein binding
  Homolog annotation: Hit_ID=Q8S9Z7; Match level="QueryCoverage=89%, HitCoverage=25%, E-value=2e-44, Identity=60%"; Hit description=F-box protein-like
IDDVDLVKISALKNSLSYINIRNCTMLTDDGISNFLMKCTKIHSIVLSYTSFGNRSIQTLCTTNPDHNDGHAHVMAFNMQELHLGGCKGIDAAALSQLMSIINITKFLCLRETSLTDGALCKFVGSSLEYLDVSETMVSMVSLAPVIRRNCNLNCLETAGCRNLXLFERDEVEQSVV

SEQ ID NO: 82912 - protein, 64 aa, Setaria italica
  Transcript Sequence Number=SeqID_16938
IMDVCLYRMFLHLCFCFLYAHIALSVSLETTVIMSFSCEDDQTSTVLSPVLFVKSSASLILLLL

SEQ ID NO: 82913 - protein, 78 aa, Setaria italica
  Transcript Sequence Number=SeqID_16939
  Homolog annotation: Hit_ID=B6SN13; Match level="QueryCoverage=85%, HitCoverage=26%, E-value=3e-29, Identity=95%"; Hit description=ACI13
MAAPPPAPPSALKPEIGPDGLARDSPVIAYTEKVILEEQLQLKKYIQENYSKIRDVEKELENLTLEMKLTAGPKKAGI

SEQ ID NO: 82914 - protein, 125 aa, Setaria italica
  Transcript Sequence Number=SeqID_16940
RSRRNGGAAAGTAVGLEAGDRPRRPRPRFSRNRLHREGHFGGAAAAEEVSRSPAPLIFESLVRNCGSTLALFIYVDINFVHLQINGCTRVEISAVCVRMQLYEKDRSEAYTPHSFSGRDSSAETA

SEQ ID NO: 82915 - protein, 139 aa, Setaria italica
  Transcript Sequence Number=SeqID_16941
  Homolog annotation: Hit_ID=B6SN13; Match level="QueryCoverage=99%, HitCoverage=57%, E-value=4e-47, Identity=69%"; Hit description=ACI13
AWEAAAQVVKDEEDAKQKLCDDLNHLVQESAATQYTKLEELKKRLESLNPSRASVEVSHATTNSVSQPPMSQNPATPTGPLDNGIEPASIEQQQRPAEAEKKRRPSNARGRGGVMILPKGRGSSGSGWTGAGFDVDSGT

SEQ ID NO: 82916 - protein, 249 aa, Setaria italica
  Transcript Sequence Number=SeqID_16942
  Homolog annotation: Hit_ID=B6SN13; Match level="QueryCoverage=95%, HitCoverage=95%, E-value=3e-92, Identity=74%"; Hit description=ACI13
MAAPPPAPPSALKPEIGPDGLARDSPVIAYTEKVILEEQLQLKKYIQENYSKIRDVEKELENLTLEMKLTAGPKKAALEHLRKMIEISTEKIRLAKVKEEQAKKAWEAAAQVVKDEEDAKQKLCDDLNHLVQESAATQYTKLEELKKRLESLNPSRASVEVSGANTAQHATTNSVSQPPMSQNPATPTGPLDNGIEPASIEQQQRPAEAEKKRRPSNARGRGGVMILPKGRGSSGSGWTGAGFDVDSGT

SEQ ID NO: 82917 - protein, 81 aa, Setaria italica
  Transcript Sequence Number=SeqID_16943
  Gene Ontology: Mol. function=nucleotide binding; Biological process =small GTPase mediated signal transduction
RAVAQADAAALAEREGLSFVETSALDATNVDTAFETALTEIYRIVSKKAMAASSAGSVGEGQSIQVSAGDSGGLTTRCCGF

SEQ ID NO: 82918 - protein, 103 aa, Setaria italica
  Transcript Sequence Number=SeqID_16944
  Pfam annotation: Domain name=GRP; Domain location=1-95; Score=-26.5; E_value=0.044; Accession=PF07172.3; Description=Glycine rich protein family
MDRLLAGLLGFLLIASVGSHAARAPDQYWKTALPNTPAGGTTVNVGGGGVHVDAGHGKPGGTTVDVGKGGVGVNVNPGSGKPGGTTVGVGKGGVGVNVNPGYG

SEQ ID NO: 82919 - protein, 31 aa, Setaria italica
  Transcript Sequence Number=SeqID_16945
MAASWAAPPSGYPVGHGQAYGNQQAAAPHAP

SEQ ID NO: 82920 - protein, 269 aa, Setaria italica
  Transcript Sequence Number=SeqID_16946
RREDAIIHALEIERSRFPNNYDDDLEEDTDDDVCASQNIYSAKSKNINGFNKRSSRGARSMYDIEESSAQDMSQALTVYKKPQNLSSSSTRYASSKKKKRKGRKNFEDDTVQGFQRMRDLREIGTKNVTKQKSGAGIFSDVPLLESGPSFGYDLSSTNGIKKGKQSHSSIKKKRSNIGQSYENSRKKDRHRPLSKLCEDPEASGTYYHWDPSGQSSSQYPGGQMPNMFEPSRAKTIFSTDVNNCSYSSGTSSLETLLDTSHNNHKGSAI

SEQ ID NO: 82921 - protein, 219 aa, Setaria italica
  Transcript Sequence Number=SeqID_16947
  Gene Ontology: Mol. function=ligase activity, forming aminoacyl-tRNA and related compounds; Cellular component=cytoplasm; Biological process=alanyl-tRNA aminoacylation
  Homolog annotation: Hit_ID=Q9FFC7; Match level="QueryCoverage=98%, HitCoverage=22%, E-value=3e-61, Identity=58%"; Hit description =Alanyl-tRNA synthetase
  Pfam annotation: Domain name=DHHA1; Domain location=134-208; Score =62.2; E_value=1.9e-15; Accession=PF02272.11; Description=DHHA1 domain
  Pfam annotation: Domain name=tRNA_SAD; Domain location=1-30; Score =18.2; E_value=0.0038; Accession=PF07973.6; Description=Threonyl and Alanyl tRNA synthetase s
  Pfam module annotation: Pfam domain module=DHHA1::tRNA_SAD; Domain location=134-208::1-30
GGTHVSNTAEIRGFKIISEQGIASGIRRIEAVAGDAFVDYVCARDNYMRRLCSSLKVKAEDVNGRVETILEELRATRNEVSTLRSKIAVLKAASLASKATTVEPHNVRVVVENMGDVDADALKSAAEYLIGTLQDPAAVILGSSPGDGKVSLVAAFSPAVVKMGLQAGKFVGGIAKLCGGGGGGKPNFAQAGGRKPENLLDALEKARDEIVAAVSSSSS

SEQ ID NO: 82922 - protein, 144 aa, Setaria italica
  misc_feature (118)..(118): Xaa can be any naturally occurring amino acid
  Transcript Sequence Number=SeqID_16948
  Gene Ontology: Mol. function=N-acetyltransferase activity; Biological process=metabolic process
  Homolog annotation: Hit_ID=B6U5J1; Match level="QueryCoverage=79%, HitCoverage=39%, E-value=2e-38, Identity=72%"; Hit description=N -acetyltransferase
RAPPKQLLLLRDREQCEAPARPRVGPAPAASFARSSNSGFHAMIWPATANNPNRIILPSVRAAHRRPYRAGGRATAGVCCASQTVELLPALCPEIVVRDARLEDCWEVADTHCGSFFXPGYKFPLDLVLRIDRYIALLSGFTVP

SEQ ID NO: 82923 - protein, 157 aa, Setaria italica
  misc_feature (88)..(88): Xaa can be any naturally occurring amino acid
  misc_feature (112)..(112): Xaa can be any naturally occurring amino acid
  Transcript Sequence Number=SeqID_16949
  Gene Ontology: Mol. function=N-acetyltransferase activity; Biological process=metabolic process
  Homolog annotation: Hit_ID=B6U5J1; Match level="QueryCoverage=93%, HitCoverage=51%, E-value=5e-61, Identity=84%"; Hit description=N -acetyltransferase
  Pfam annotation: Domain name=Acetyltransf_1; Domain location=46-137; Score=67.9; E_value=3.8e-17; Accession=PF00583.16; Description =Acetyltransferase (GNAT) family
PNTRNLQVTNPGSTRTCLVAVNSNSVTNGFDIECRDLREAEFQKYNLSRGSIAGILTVDTVADYLPRRGSLKQRRTGIAYIANVAVRXEERRKGIAKMLVQEAEARARSWGXCRSMALHCDVNNTAALRLYENQGFKRIRVPEGARWPEPKIAKGVQ

SEQ ID NO: 82924 - protein, 83 aa, Setaria italica
  Transcript Sequence Number=SeqID_16950
  Gene Ontology: Mol. function=N-acetyltransferase activity; Biological process=metabolic process
  Homolog annotation: Hit_ID=B6T0X9; Match level="QueryCoverage=98%, HitCoverage=53%, E-value=3e-37, Identity=90%"; Hit description=N -acetyltransferase
  Pfam annotation: Domain name=Acetyltransf_1; Domain location=1-52; Score=32.6; E_value=1.6e-06; Accession=PF00583.16; Description =Acetyltransferase (GNAT) family
AVREEERRKGIAKMLVQEAEARARSWGCRSMALHCDVNNTAALRLYENQGFKRIRVPEGARWPEPKIAKGVQYSFMMKLVPKI

SEQ ID NO: 82925 - protein, 268 aa, Setaria italica
  Transcript Sequence Number=SeqID_16951
  Gene Ontology: Mol. function=N-acetyltransferase activity; Biological process=metabolic process
  Homolog annotation: Hit_ID=B6U5J1; Match level="QueryCoverage=89%, HitCoverage=83%, E-value=1e-112, Identity=85%"; Hit description=N -acetyltransferase
  Pfam annotation: Domain name=Acetyltransf_1; Domain location=147-237; Score=77.2; E_value=5.8e-20; Accession=PF00583.16; Description =Acetyltransferase (GNAT) family
  Subcellular localization annotation: CTP_CleavageSite=48; ConfidenceScore=5.48e-01
MITPALSLSRAPSSSFSASPVDRCHRSTGAFRRYGPSFAYKPAAGICYASQAVELLPSLYPEIVVRDARLEECWEVADTHCSSFFPDYKFPLDLVLRIDRYIALLSGFSVPPGCTRTCLVAVNSNSVTNGFDIECRDLREAEFQKYNLSRGSIAGILTVDTVADYLPRRGPLKQRRTGIAYIANVAVRKEERRKGIAKMLVQEAEARARSWGCRTMALHCDVNNIAALRLYKNQGFKCIRVPEGAKWPEPKIAKGVQYNFMMKLVPKI

SEQ ID NO: 82926 - protein, 858 aa, Setaria italica
  misc_feature (339)..(339): Xaa can be any naturally occurring amino acid
  Transcript Sequence Number=SeqID_16952
  Gene Ontology: Mol. function=metal ion binding; Cellular component =nucleus
  Homolog annotation: Hit_ID=B9RUU8; Match level="QueryCoverage=96%, HitCoverage=40%, E-value=1e-128, Identity=36%"; Hit description=DNA binding protein, putative
  Pfam annotation: Domain name=PHD; Domain location=1-37; Score=23.8; E_ value=6.5e-05; Accession=PF00628.21; Description=PHD-finger
SVLLCDNCDSEYHTYCLNPPLARIPLGNWYCPSCLSGQNRTNIDDNTHVLMQEEKKCVGEEAHVFLEKLNKLAMAMDEKEYWELSVPERIYLLKFLCDELLNTALIREHLDQCSDKSNDLQQKLRYLNYELKELKYQVEIRSTYATQSRWMKNDHVSNSSGPVENQQRSMPTALEHLEEAERVNVGVNLNTAAEGAPTGPLNVGKPYSTDNDISSTSVTEGNRSLGLSKQASDIVTDRIDGSSIGEGSQSCEKSVGGRSGTCDNLNMGEDHSAAVISTPNGELPDDNARTPSQDNLEASTTKLADHDADNNETNNLLDRISQVQDSISTSELQLSMASXERECLGRDSVGRLYWVTGRPGKRPRLVADGSMLIPKDRDISMVTSYPQSTFDCRGWNSASIVIYESDEEIKCLVDWLRDTDPREKDLKDSILHWQKSLYHQASFSVSDSPASKFSKSEPLTDLPDTKAFIVLEQKYGLQLDQDTTELSKKRGRKTKSGSEEGIYRCDCLEPVWPSRHHCLTCHETYLTSTEYEGHDGGKCNSSDDSPNQSKESDESKLKGTKSDIKEKDPVDHSCSVEPSNSGNLDPCPVDFEEICKKFITNDSNKEIVKEIGLLGSNGVPSFVPSPAFFLDPPALLSENKRNDDIPNDWSSSLEECQAMSAKKSGQEGVQADQDCPGNTGDEQMPKSKKPVRDSASAKEASSLTDKPTRLLTVNGGLVPEGSLMPLIGRNFHILKQLKINLLDVEAALPEEALIASKSQQIRRRSWRAFVKGAESISHVVLATNFLQSMIKAEFLKKDWWYWSSFTAAIKTTTVSALALRIYTLDDCIMYTKDPAPNPDPADNARSGNKGKRKRDADS

SEQ ID NO: 82927 - protein, 322 aa, Setaria italica
  Transcript Sequence Number=SeqID_16953
  Gene Ontology: Mol. function=metal ion binding; Cellular component =nucleus; Biological process=protein modification process
  Homolog annotation: Hit_ID=B9RUU8; Match level="QueryCoverage=90%, HitCoverage=13%, E-value=2e-94, Identity=56%"; Hit description=DNA binding protein, putative
  Pfam annotation: Domain name=Bromodomain; Domain location=26-120; Score=-10.4; E_value=0.029; Accession=PF00439.17; Description =Bromodomain
  Pfam annotation: Domain name=PHD; Domain location=177-225; Score =59.0; E_value=1.8e-14; Accession=PF00628.21; Description=PHD-finger
  Pfam module annotation: Pfam domain module=Bromodomain::PHD; Domain location=26-120::177-225
KVPQNPEKPRKERNIISISEAILKKCRIVLRRAISSDESKPFGNLLGTTLTNSNENEDEGILGFPGMVSRPLDFRTIDIRLAMGAYCGSWEAFLDDVQEVIHNLQTAFADRPEVLVMVVALSQSFESLYKSEVQDLVKKFDKYLSNENGNSEIHNQLQDALMAANNKLPKAPWEDGVCKVCGIDRDDESVLLCDNCDSEYHTYCLNPPLARIPLGNWYCPSCLSGQNRTNIDDNTHVLMQEEKKCVGEEAHVFLEKLNKLAMAMDEKEYWELSVPERIYLLKFLCDELLNTALIREHLDQCSRIKYKIEYYQDKKVNVNTRN

SEQ ID NO: 82928 - protein, 68 aa, Setaria italica
  Transcript Sequence Number=SeqID_16954
MALRALDNTMPAVVEERPKKVAKVAVPAPAAAVKAASPGSGKKKKKNDENSAPRATAAAGEQAVEYIP

SEQ ID NO: 82929 - protein, 83 aa, Setaria italica
  misc_feature (40)..(40): Xaa can be any naturally occurring amino acid
  Transcript Sequence Number=SeqID_16955
  Subcellular localization annotation: CTP_CleavageSite=41; ConfidenceScore=5.47e-01
SPARSTSSGSARCFSWCPTSREASSCRTTYSGSTTGEARXRAVAERKWMLVGCFGAAWTRRARDPLFSFPSFAFSLPRCSFRM

SEQ ID NO: 82930 - protein, 120 aa, Setaria italica
  Transcript Sequence Number=SeqID_16956
  Gene Ontology: Mol. function=translation elongation factor activity; Cellular component=cytoplasm; Biological process=translational elongation
  Homolog annotation: Hit_ID=B9FBM7; Match level="QueryCoverage=100%, HitCoverage=28%, E-value=2e-65, Identity=99%"; Hit description =Elongation factor 1-alpha
  Pfam annotation: Domain name=GTP_EFTU; Domain location=5-120; Score =78.0; E_value=3.4e-20; Accession=PF00009.19; Description=Elongation factor Tu GTP binding domain
MGKEKSHINIVVIGHVDSGKSTTTGHLIYKLGGIDKRVIERFEKEAAEMNKRSFKYAWVLDKLKAERERGITIDIALWKFETTKYYCTVIDAPGHRDFIKNMITGTSQADCAVLIIDSTT

SEQ ID NO: 82931 - protein, 201 aa, Setaria italica
  misc_feature (190)..(190): Xaa can be any naturally occurring amino acid
  Transcript Sequence Number=SeqID_16957
  Gene Ontology: Mol. function=translation elongation factor activity; Cellular component=cytoplasm; Biological process=translational elongation
  Homolog annotation: Hit_ID=P13905; Match level="QueryCoverage=98%, HitCoverage=44%, E-value=1e-111, Identity=97%"; Hit description =Elongation factor 1-alpha
  Pfam annotation: Domain name=GTP_EFTU; Domain location=1-200; Score =307.7; E_value=2.4e-89; Accession=PF00009.19; Description=Elongation factor Tu GTP binding domain
  Pfam annotation: Domain name=MMR_HSR1; Domain location=4-152; Score= -3.3; E_value=0.002; Accession=PF01926.15; Description=GTPase of unknown function
  Pfam module annotation: Pfam domain module=GTP_EFTU::MMR_HSR1; Domain location=1-200::4-152
VPTINIVVIGHVDSGKSTTTGHLIYKLGGIDKRVIERFEKEAAEMNKRSFKYAWVLDKLKAERERGITIDIALWKFETTKYYCTVIDAPGHRDFIKNMITGTSQADCAVLIIDSTTGGFEAGISKDGQTREHALLAFTLGVKQMICCCNKMDATTPKYSKARYDEIVKEVSSYLKKVGYNPDKIAFVPSXFEGDNMIERSN

SEQ ID NO: 82932 - protein, 144 aa, Setaria italica
  Transcript Sequence Number=SeqID_16958
  Gene Ontology: Mol. function=protein dimerization activity; Cellular component=endoplasmic reticulum lumen; Biological process=proteolysis
  Homolog annotation: Hit_ID=B6SVQ9; Match level="QueryCoverage=95%, HitCoverage=28%, E-value=3e-70, Identity=95%"; Hit description=IAA -amino acid hydrolase ILR1-like 6
  Pfam annotation: Domain name=Peptidase_M20; Domain location=58-142; Score=28.4; E_value=7e-06; Accession=PF01546.20; Description =Peptidase family M20M25M40
LRRVRRRIHERPELAYEEVETSRLVRDELAAMGVGFRHPLARTGVVATLGTGRPPVVALRADMDALPIQEAVEWEHKSRNPGKMHACGHDAHVAMLLGAARILKAREHHLKGTVKLLFQPAEESGCGAKRMIEDGALEGVEAIF

SEQ ID NO: 82933 - protein, 71 aa, Setaria italica
  Transcript Sequence Number=SeqID_16959
  Gene Ontology: Mol. function=protein dimerization activity; Cellular component=endoplasmic reticulum lumen; Biological process=proteolysis
  Homolog annotation: Hit_ID=Q5Z678; Match level="QueryCoverage=61%, HitCoverage=8%, E-value=4e-17, Identity=90%"; Hit description=IAA -amino acid hydrolase ILR1-like 6
RGACALFLPLPRVLFQEAVEWEHKSRNPGKMHACGHDAHVAMLLGAARILKAREHHLKVRTPPLPYVTEEN

SEQ ID NO: 82934 - protein, 91 aa, Setaria italica
  misc_feature (77)..(77): Xaa can be any naturally occurring amino acid
  Transcript Sequence Number=SeqID_16960
  Gene Ontology: Mol. function=nucleotide binding; Cellular component =plasma membrane; Biological process=small GTPase mediated signal transduction
  Homolog annotation: Hit_ID=P16976; Match level="QueryCoverage=45%, HitCoverage=19%, E-value=1e-13, Identity=95%"; Hit description=GTP -binding protein YPTM1
GDSPWGVLHLLTSRHFFYPLAEVSSPTSECQSLYHSASLLVSGIEGRRGAMSHEFDYLFKLLLIGDSSVGKSCFLLXRFADDSYVDSYIST

SEQ ID NO: 82935 - protein, 74 aa, Setaria italica
  Transcript Sequence Number=SeqID_16961
VGNADADEDNDNQEGEQEEDVVISAYTNSNYQAVNNSVLVSGSCAVNDPGVHVVVVEHVDEIRDYDDDLDAQEF

SEQ ID NO: 82936 - protein, 73 aa, Setaria italica
  Transcript Sequence Number=SeqID_16962
FYLYITRCISELPLVFQQSLRFLLCSTIEYTRIYLLLNIARTVGSAGMVPCIYLYITRCISELPLVSRRGSTR

SEQ ID NO: 82937 - protein, 61 aa, Setaria italica
  Transcript Sequence Number=SeqID_16963
SWPIYKPDISFRVADTKLLLLKHLVISCPSTYKNVNTHSFCHGKSAFNFLYNSIQAIQCRF

SEQ ID NO: 82938 - protein, 197 aa, Setaria italica
  Transcript Sequence Number=SeqID_16964
  Gene Ontology: Cellular component=plasma membrane
  Homolog annotation: Hit_ID=Q9ZVS8; Match level="QueryCoverage=98%, HitCoverage=40%, E-value=1e-88, Identity=77%"; Hit description =F15K9.13 protein
  Pfam annotation: Domain name=DUF21; Domain location=1-152; Score =81.7; E_value=2.6e-21; Accession=PF01595.12; Description=Domain of unknown function DUF21
GLVELEILQRSGTDAEKAQAAAILPVVQKQHQLLVTLLLCNAAAMEALPIFLDRIFHPVVAVILSVTFVLAFGEVIPQAICTRYGLAVGANFVWLVRILMVMCYPISYPIGKLLDCALGHNESALFRRAQLKALVSIHSKEAGKGGELTHDETTIISGALDLTEKTAAEAMTPIESTFSLDVDSKLDWEAIGGIHLL

SEQ ID NO: 82939 - protein, 333 aa, Setaria italica
  Transcript Sequence Number=SeqID_16965
  Gene Ontology: Cellular component=plasma membrane
  Homolog annotation: Hit_ID=Q9ZVS8; Match level="QueryCoverage=98%, HitCoverage=64%, E-value=3e-93, Identity=57%"; Hit description =F15K9.13 protein
  Pfam annotation: Domain name=CBS; Domain location=67-171; Score=29.9; E_value=1e-05; Accession=PF00571.20; Description=CBS domain
LNYVFSPQLLDCALGHNESALFRRAQLKALVSIHSKEAGKGGELTHDETTIISGALDLTEKTAAEAMTPIESTFSLDVDSKLDWEAIGKILARGHSRVPVYSGTPKNIIGLLLVKSLLTVRAETETPVSAVSIRRIPRVPSDMPLYDILNEFQKGSSHMAAVVKAKPKTEPPPDKTEPNREAVGPAQLTAPLLSNAEERADNVVVDIERPHNRQVNGNPASNAVARSSEDIEDGEVVGIITLEDVFEELLQEEIVDETDEYVDVHKRIRVAAAAAASSVARAPSVRRLTGQKAAGAQNRQGQQPTGILKKPAEGESNPSKQVNLVEPLLENKR

SEQ ID NO: 82940 - protein, 184 aa, Setaria italica
  Transcript Sequence Number=SeqID_16966
  Gene Ontology: Cellular component=plasma membrane
  Homolog annotation: Hit_ID=Q9ZVS8; Match level="QueryCoverage=83%, HitCoverage=29%, E-value=3e-55, Identity=68%"; Hit description =F15K9.13 protein
  Pfam annotation: Domain name=DUF21; Domain location=20-182; Score =102.3; E_value=1.6e-27; Accession=PF01595.12; Description=Domain of unknown function DUF21
VTTRIVQGEDTAFGSLEWWAYAGTSCFLVLFAGIMSGLTLGLMSLGLVELEILQRSGTDAEKAQAAAILPVVQKQHQLLVTLLLCNAAAMEALPIFLDRIFHPVVAVILSVTFVLAFGEVIPQAICTRYGLAVGANFVWLVRILMVMCYPISYPIGKVNQRNDMIKFCVPTVLQFYELLSWHIF

SEQ ID NO: 82941 - protein, 76 aa, Setaria italica
  Transcript Sequence Number=SeqID_16967
  Gene Ontology: Mol. function=calcium ion binding; Cellular component =flagellin-based flagellum; Biological process=ciliary or flagellar motility
  Homolog annotation: Hit_ID=Q9AYE7; Match level="QueryCoverage=96%, HitCoverage=8%, E-value=6e-29, Identity=83%"; Hit description=Centrin
FKMRTLLELLGVVADRRGGLPIAICVSSRDELDAVCAAVANLPFVSMSPLYSDQAEAERASILEKFRQETIQWNQT

SEQ ID NO: 82942 - protein, 194 aa, Setaria italica
  misc_feature (110)..(110): Xaa can be any naturally occurring amino acid
  Transcript Sequence Number=SeqID_16968
  Gene Ontology: Mol. function=electron carrier activity; Biological process=chromatin modification
  Homolog annotation: Hit_ID=Q6Z690; Match level="QueryCoverage=100%, HitCoverage=22%, E-value=1e-102, Identity=91%"; Hit description =Lysine-specific histone demethylase 1 homolog 1
GVLKKGNIKFMPELPAQKKEAIQRLGFGLLNKVVMLFPYDFWDGRIDTFGHLTEDSGQRGEFFLFYSYSSVSGGPLLIALVAGESAVKFEQASPMENVEKVLETLRKSFXPKGIEVPNPLQAICTRWGTDSFTYGSYSYVAIGASGDDYDILAESVHDRVFFAGEATNRRYPATMHGALLSGYREAANILRAAR

SEQ ID NO: 82943 - protein, 142 aa, Setaria italica
  misc_feature (18)..(18): Xaa can be any naturally occurring amino acid
  misc_feature (23)..(23): Xaa can be any naturally occurring amino acid
  misc_feature (137)..(137): Xaa can be any naturally occurring amino acid
  Transcript Sequence Number=SeqID_16969
  Gene Ontology: Mol. function=serine-type endopeptidase activity; Cellular component=cell wall; Biological process=negative regulation of catalytic activity
  Homolog annotation: Hit_ID=Q94EM3; Match level="QueryCoverage=99%, HitCoverage=47%, E-value=7e-38, Identity=57%"; Hit description =Subtilisin-like protease (Fragment)
  Pfam annotation: Domain name=PA; Domain location=6-112; Score=105.1; E_value=2.4e-28; Accession=PF02225.14; Description=PA domain
WYGAPALEPGKMYELVYXAGASXGASSAADGYSASMCLDGSLDPAAVRGKIVVCDRGVNSRAAKGDVVRRAGAVGMVLANGAFDGEGLVADCHVLPATAVGAAAGDKLRKYIASSTKQRPATGTIVFEGTHLGVHPXPVVAA

SEQ ID NO: 82944 - protein, 87 aa, Setaria italica
  Transcript Sequence Number=SeqID_16970
  Gene Ontology: Mol. function=protein tyrosine kinase activity; Cellular component=plasma membrane; Biological process=protein amino acid phosphorylation
  Homolog annotation: Hit_ID=Q10E34; Match level="QueryCoverage=100%, HitCoverage=10%, E-value=6e-38, Identity=86%"; Hit description =Receptor protein kinase CLAVATA1, putative, expressed
  Pfam annotation: Domain name=LRR_1; Domain location=16-38; Score =10.0; E_value=3.7; Accession=PF00560.25; Description=Leucine Rich Repeat
  Pfam annotation: Domain name=LRR_1; Domain location=40-59; Score =13.2; E_value=0.91; Accession=PF00560.25; Description=Leucine Rich Repeat
  Pfam annotation: Domain name=LRR_1; Domain location=64-86; Score=6.3; E_value=19; Accession=PF00560.25; Description=Leucine Rich Repeat
  Pfam module annotation: Pfam domain module=LRR_1::LRR_1::LRR_1; Domain location=16-38::40-59::64-86
NKLRGSIPELVGDLPSLEVLQLWENNFTGGIPRRLGRNGRLQLVDLSSNRLTGTLPPDLCAGGKLETLIALGNFLFGSIPESLGKCE

SEQ ID NO: 82945 - protein, 382 aa, Setaria italica
  Transcript Sequence Number=SeqID_16971
  Gene Ontology: Mol. function=protein serine/threonine kinase activity; Cellular component=plasma membrane; Biological process =protein amino acid phosphorylation
  Homolog annotation: Hit_ID=Q30KI3; Match level="QueryCoverage=100%, HitCoverage=75%, E-value=0.0, Identity=56%"; Hit description=RLK1 (Fragment)
  Pfam annotation: Domain name=LRR_1; Domain location=107-129; Score =3.9; E_value=54; Accession=PF00560.25; Description=Leucine Rich Repeat
  Pfam annotation: Domain name=LRR_1; Domain location=11-33; Score =12.7; E_value=1.1; Accession=PF00560.25; Description=Leucine Rich Repeat
  Pfam annotation: Domain name=LRR_1; Domain location=131-152; Score =7.1; E_value=13; Accession=PF00560.25; Description=Leucine Rich Repeat
  Pfam annotation: Domain name=LRR_1; Domain location=35-57; Score=7.4; E_value=12; Accession=PF00560.25; Description=Leucine Rich Repeat
  Pfam annotation: Domain name=LRR_1; Domain location=59-81; Score=5.6; E_value=26; Accession=PF00560.25; Description=Leucine Rich Repeat
  Pfam annotation: Domain name=LRR_1; Domain location=83-105; Score =15.9; E_value=0.16; Accession=PF00560.25; Description=Leucine Rich Repeat
  Pfam annotation: Domain name=Pkinase; Domain location=249-382; Score=- 97.3; E_value=0.011; Accession=PF00069.17; Description=Protein kinase domain
  Pfam annotation: Domain name=Pkinase_Tyr; Domain location=249-382; Score=-92.7; E_value=1.5e-07; Accession=PF07714.9; Description =Protein tyrosine kinase
  Pfam module annotation: Pfam domain module=LRR_1::LRR_1::LRR_1::LRR _1::LRR_1::LRR_1::Pkinase::Pkinase_Tyr; Domain location=107-129::11 -33::131-152::35-57::59-81::83-105::249-382::249-382
  Subcellular localization annotation: CTP_CleavageSite=4; ConfidenceScore=5.26e-01
FPAVAGAAASNLGSITLSNNQLTGALPASIGNFSGLQKLLLDQNAFNGAVPPEIGRLQQLSKADLSGNSLDGGVPPEIGKCRLLTYLDLSRNNLSGEIPPAISGMRILNYLNLSRNHLDGEIPATIAAMQSLTAVDFSYNNLSGLVPATGQFSYFNATSFVGNPGLCGPYLGPCHSGGAGTDHGARSHGGISNTFKLLIVLGLLVCSIAFAAMAILKARSLKKASEARAWRLTAFQRLDFTCDDVLDSLKEENIIGKGGAGIVYKGTMPDGEHVAVKRLSAMSRGSSHDHGFSAEIQTLGRIRHRYIVRLLGFCSNNETNLLVYEYMPNGSLGELLHGKKGGHLHWDTRYKIAVEAAKGLSYLHHDCSPPILHRDVKSNNIL

SEQ ID NO: 82946 - protein, 208 aa, Setaria italica
  misc_feature (168)..(168): Xaa can be any naturally occurring amino acid
  Transcript Sequence Number=SeqID_16972
  Gene Ontology: Mol. function=protein tyrosine kinase activity; Cellular component=integral to membrane; Biological process=protein amino acid phosphorylation
  Homolog annotation: Hit_ID=Q10E34; Match level="QueryCoverage=100%, HitCoverage=66%, E-value=3e-78, Identity=40%"; Hit description =Receptor protein kinase CLAVATA1, putative, expressed
  Pfam annotation: Domain name=LRR_1; Domain location=106-128; Score =8.7; E_value=6.5; Accession=PF00560.25; Description=Leucine Rich Repeat
  Pfam annotation: Domain name=LRR_1; Domain location=130-152; Score =18.4; E_value=0.03; Accession=PF00560.25; Description=Leucine Rich Repeat
  Pfam annotation: Domain name=LRR_1; Domain location=154-176; Score =8.8; E_value=6.4; Accession=PF00560.25; Description=Leucine Rich Repeat
  Pfam annotation: Domain name=LRR_1; Domain location=178-200; Score =12.7; E_value=1.1; Accession=PF00560.25; Description=Leucine Rich Repeat
  Pfam annotation: Domain name=LRR_1; Domain location=33-55; Score =15.7; E_value=0.2; Accession=PF00560.25; Description=Leucine Rich Repeat
  Pfam annotation: Domain name=LRR_1; Domain location=57-80; Score=3.8; E_value=57; Accession=PF00560.25; Description=Leucine Rich Repeat
  Pfam annotation: Domain name=LRR_1; Domain location=82-104; Score =13.9; E_value=0.66; Accession=PF00560.25; Description=Leucine Rich Repeat
  Pfam annotation: Domain name=LRR_1; Domain location=9-31; Score=10.0; E_value=3.7; Accession=PF00560.25; Description=Leucine Rich Repeat
  Pfam module annotation: Pfam domain module=LRR_1::LRR_1::LRR_1::LRR _1::LRR_1::LRR_1::LRR_1::LRR_1; Domain location=106-128::130-152::154- 176::178-200::33-55::57-80::82-104::9-31
PLGVAALPALRHLHLGGNFFSGEIPPEYGTWGRLQYLAVSGNELSGRIPPELGNLTSLRELYIGYYNSYSGGIPPELGNMTELVRLDAANCGLSGEIPPELGNLANLDTLFLQVNGLAGGIPPELGRLRSLSSLDLSNNALTGEIPATFAALKNLTLLNLFRNKLRGXIPELVGDLPSLEVLQLWENNFTGALPASIGNFSGLQKLLL

SEQ ID NO: 82947 - protein, 52 aa, Setaria italica
  Transcript Sequence Number=SeqID_16973
YNVQGYLRTHPISMILYIDIMVDSGSNVWLPPGNCQIDSWLCFPLAILSTDM

SEQ ID NO: 82948 - protein, 85 aa, Setaria italica
  Transcript Sequence Number=SeqID_16974
  Gene Ontology: Mol. function=protein kinase activity; Cellular component=integral to membrane; Biological process=protein amino acid phosphorylation
  Homolog annotation: Hit_ID=C0LGS3; Match level="QueryCoverage=83%, HitCoverage=8%, E-value=1e-20, Identity=70%"; Hit description =Leucine-rich repeat receptor-like protein kinase (Fragment)
RGVARGLAYIHEKKGVHGNLKPSNILLGADMEPWIGDLGLDRLLSGEAAGHRAGASARLFGSKRSMHSTSSLPDLSQMPGPGASP

SEQ ID NO: 82949 - protein, 42 aa, Setaria italica
  Transcript Sequence Number=SeqID_16975
MAGPTERDQFTDEEEDDFLDEELDEQGLGSEDEEGVVGVGGK

SEQ ID NO: 82950 - protein, 119 aa, Setaria italica
  misc_feature (4)..(4): Xaa can be any naturally occurring amino acid
  Transcript Sequence Number=SeqID_16976
  Gene Ontology: Cellular component=cytoskeleton
  Homolog annotation: Hit_ID=Q5NB83; Match level="QueryCoverage=100%, HitCoverage=37%, E-value=2e-51, Identity=82%"; Hit description =Probable protein ABIL3
  Subcellular localization annotation: CTP_CleavageSite=54; ConfidenceScore=5.84e-01
RSPXPTPNDAYHRSRSLSPSRKARAKSPSPRIMNSNTKDTRAGSPIPNSNPLARSSTVARRPPANSKHLRQTSMQLHTDWDHHKEQEKSSSKGRGFLKSLLTRRRWRNDESLYSYLDEY

SEQ ID NO: 82951 - protein, 84 aa, Setaria italica
  misc_feature (45)..(45): Xaa can be any naturally occurring amino acid
  Transcript Sequence Number=SeqID_16977
MERKTVVLYPGVGFGHLAPMLELAKAFLLHGGGDGALDVAVALVXPPVMGNGFAAAVAREEAANTSVAFHVLAPARAGSRRRGR

SEQ ID NO: 82952 - protein, 240 aa, Setaria italica
  Transcript Sequence Number=SeqID_16978
  Gene Ontology: Mol. function=UDP-glucose:hexose-1-phosphate uridylyltransferase activity; Biological process=galactose metabolic process
  Homolog annotation: Hit_ID=B6TFN9; Match level="QueryCoverage=99%, HitCoverage=66%, E-value=1e-122, Identity=87%"; Hit description =Galactose-1-phosphate uridylyltransferase
  Pfam annotation: Domain name=GalP_UDP_tr_C; Domain location=90-240; Score=-56.2; E_value=0.028; Accession=PF02744.9; Description =Galactose-1-phosphate uridyl transferase, C-terminal domain
PGERALSGFGFHDVVIETPRHDVRLWDLDAEGVRDVLLAYAARVRQLGEHLAVKYVQVFKNHGASAGASMAHSHSQMLGTPFVPPSVKSRLNCMKEVFDKSGNCSLCEIRSKDILISETPNFSAIVPFAASYPFEIWIIPRQHLSYFHEIDQNKALDLGSLLKTMLQKLSKQLNDPPFNFMVHSAPFGLSSSCLPYAHWFLQIVPQLSVIGGFELGSGCYINPVFPEDAAKILRELDCST

SEQ ID NO: 82953 - protein, 75 aa, Setaria italica
  Transcript Sequence Number=SeqID_16979
MAGLQRSSQTFRRSGSSGLVWDERLMSSQDDGNQVEPEDGAMEFKELRHSRSVGSAGLQRRRDDGEERRRRSDDG

SEQ ID NO: 82954 - protein, 151 aa, Setaria italica
  misc_feature (126)..(126): Xaa can be any naturally occurring amino acid
  Transcript Sequence Number=SeqID_16980
  Homolog annotation: Hit_ID=Q2RAM9; Match level="QueryCoverage=88%, HitCoverage=51%, E-value=4e-51, Identity=75%"; Hit description=DTW domain containing protein
  Pfam annotation: Domain name=DTW; Domain location=2-139; Score=-32.3; E_value=0.0012; Accession=PF03942.7; Description=DTW domain
  Subcellular localization annotation: CTP_CleavageSite=51; ConfidenceScore=5.20e-01
PLLPPPSPNPVLLLYPSPGAADLATWCRSTPPSARASPTLLLLDGTWRQAKEMHAASLPFLSSLVVIPVALPVDSGVDGDSMFESELVVRKEPHKGCMSTMEAVARSLRLLEPEGKGEEIEEAMLXVLRAMVAFQTEHLQNRTVEPRVKMR

SEQ ID NO: 82955 - protein, 45 aa, Setaria italica
  Transcript Sequence Number=SeqID_16981
MVLVSVYLMMHNLVFLKGALGLLTLPSALVILSGMLLKEVHIPNF

SEQ ID NO: 82956 - protein, 361 aa, Setaria italica
  misc_feature (248)..(248): Xaa can be any naturally occurring amino acid
  Transcript Sequence Number=SeqID_16982
  Homolog annotation: Hit_ID=B9RGP6; Match level="QueryCoverage=90%, HitCoverage=70%, E-value=7e-87, Identity=49%"; Hit description =Transporter, putative
  Pfam annotation: Domain name=BT1; Domain location=2-304; Score=88.8; E_value=1.9e-23; Accession=PF03092.8; Description=BT1 family
  Pfam annotation: Domain name=PgpA; Domain location=131-260; Score= -49.7; E_value=0.032; Accession=PF04608.5; Description=Phosphatidylgly cerophosphatase A
  Pfam module annotation: Pfam domain module=BT1::PgpA; Domain location= 2-304::131-260
ENSILYPHLAADMISLNGFCSSVGGLIGFSISGFLVHAIGAQGALGLLTLPSALVILSGMLLKEVHIPNFPYGQAHKKFVEASGKMLTTLKCPEVWRPCVYMYMSLALSVDIQEGMFYWYTDRKSGLSFHEGFIGFMFAVGSVGSLVGVILYQNILKDRPFRSLLFSSQLLLSLSGMLDLILVLRLNLKMGIPDYYFAVIDEGVSKMINRVKWMPLLVLCSKLSPPGIEGTFYALLMSIDNIGGLTGXSWVGGLLLHLLRITRTEFKNLWAAIMIRNVMRLLPLALLFLVPSSDPNSALLPSDLLNEDDDGEGHQMENIELTSLAVDKGSFPDKSPQERGNREGIDVEQDDDEVSLLANRG

SEQ ID NO: 82957 - protein, 48 aa, Setaria italica
  Transcript Sequence Number=SeqID_16983
LKWQSFWLLNIRRRFTLFASVVTCNTLLCLLSVHLVPRLLQNCTYLKS

SEQ ID NO: 82958 - protein, 87 aa, Setaria italica
  misc_feature (47)..(47): Xaa can be any naturally occurring amino acid
  misc_feature (53)..(53): Xaa can be any naturally occurring amino acid
  Transcript Sequence Number=SeqID_16984
  Gene Ontology: Mol. function=aspartic-type endopeptidase activity; Cellular component=chromatin; Biological process=DNA integration
  Homolog annotation: Hit_ID=Q10F54; Match level="QueryCoverage=98%, HitCoverage=3%, E-value=6e-11, Identity=44%"; Hit description =Retrotransposon protein, putative, Ty1-copia subclass
MQRTERYDDDEINEEKAVAKFLHVVLKKYSQLTISIETLLDLSTLSXEELTGXLNAVDDREELTSGGPITIGGKLHLTEEQWLARQR

SEQ ID NO: 82959 - protein, 81 aa, Setaria italica
  misc_feature (46)..(46): Xaa can be any naturally occurring amino acid
  Transcript Sequence Number=SeqID_16985
  Gene Ontology: Mol. function=protein serine/threonine kinase activity; Cellular component=apoplast; Biological process=protein amino acid phosphorylation
  Homolog annotation: Hit_ID=B9RTY0; Match level="QueryCoverage=81%, HitCoverage=10%, E-value=7e-25, Identity=75%"; Hit description =Mitogen activated protein kinase kinase kinase 3, mapkkk3, mekk3, putative
ATGKPPWSHEYQEVSLLYYVGTTKSHPPIPEHLSAEAKDFLLKCYXREPEMRSAASDLLQHPFVTGGMEDFCQINHAAPKV

SEQ ID NO: 82960 - protein, 366 aa, Setaria italica
  Transcript Sequence Number=SeqID_16986
  Gene Ontology: Mol. function=protein serine/threonine kinase activity; Cellular component=chloroplast; Biological process=protein amino acid phosphorylation
  Homolog annotation: Hit_ID=Q1KMP8; Match level="QueryCoverage=99%, HitCoverage=98%, E-value=1e-175, Identity=82%"; Hit description =Serine/threonine kinase-like protein ABC1063
  Pfam annotation: Domain name=Pkinase; Domain location=75-357; Score =165.9; E_value=1.2e-46; Accession=PF00069.17; Description=Protein kinase domain
  Pfam annotation: Domain name=Pkinase_Tyr; Domain location=75-357; Score=114.3; E_value=4e-31; Accession=PF07714.9; Description=Protein tyrosine kinase
  Pfam module annotation: Pfam domain module=Pkinase::Pkinase_Tyr; Domain location=75-357::75-357
  Subcellular localization annotation: CTP_CleavageSite=56; ConfidenceScore=5.76e-01
MGNCAGVEGNAEINPSFSAPNSSGTGSKNSSTFGTKTSGSSSSVPPTPRTETEILESSNVRKFSFSELKGSTRNFRPDSLLGEGGFGSVFKGWMDERTLAPVKPGTGMIVAVKKLKLDSFQGHREWLAEVNYLGQLSHPNLVKLIGYCLEDEQRLLVYEYMPRGSLEHHLFRRGSHFQPLPWNLRMKVALEAARGLAFLHGDQAKVIYRDFKTSNILLDSEYNAKLSDFGLAKDGPSGDKSHVSTRVMGTQGYAAPEYLATGHLTAKSDVYSYGVVLLELLSGQRALDKNRPPGQHNLVEWARPYITNKRRVIHVLDSRLGSQYSLPAAQKTAALALQCLSMDARCRPGMDQVVTVLEGLQDARVR

SEQ ID NO: 82961 - protein, 43 aa, Setaria italica
  Transcript Sequence Number=SeqID_16987
MAKARRQPFAAAERFLGFPRGGSPGAVAPAPDGDDDLPDLAEY

SEQ ID NO: 82962 - protein, 79 aa, Setaria italica
  Transcript Sequence Number=SeqID_16988
IVLSTQLRVEICKLKISATVIEIRKLLCLLNYWGGRCRTVTAKTGAPVLSSSVEKIHCSVYMISRKKNTQRTACLNFGI

SEQ ID NO: 82963 - protein, 76 aa, Setaria italica
  Transcript Sequence Number=SeqID_16989
  Gene Ontology: Mol. function=unfolded protein binding; Biological process=protein folding
  Subcellular localization annotation: CTP_CleavageSite=61; ConfidenceScore=5.60e-01
MAPALSGTLGASSVAALRPCAERRAPSAASSVAPRGSGAVRCPRGVRWEAERSRGRLVTVRCDAAVVEKPAGEEAA

SEQ ID NO: 82964 - protein, 127 aa, Setaria italica
  misc_feature (39)..(39): Xaa can be any naturally occurring amino acid
  Transcript Sequence Number=SeqID_16990
MPLSSTCSGIRISSYSYPLEDHYKITHSLHPPLLDEPRXILVLDPYHMQEPQHVPPKYYHQVSTSSLNHQPHMDILHERTAAKATVRDPLLARDYGALPGELAARSERVDELYSSYKLSTRAMDLQP

SEQ ID NO: 82965 - protein, 125 aa, Setaria italica
  Transcript Sequence Number=SeqID_16991
MGSSFYSQVRTCIFFTVLYMINIEFLNFTVASRTAAKATVRDPLLARDYGALPGELAARSERVDELYRSYKLSTRAMDLQPGPSYVSPYQNSSSLYYGESLQRPVVARVRGPSVPVSSRYSFGPP

SEQ ID NO: 82966 - protein, 280 aa, Setaria italica
  Transcript Sequence Number=SeqID_16992
  Homolog annotation: Hit_ID=B9RA64; Match level="QueryCoverage=26%, HitCoverage=9%, E-value=2e-19, Identity=56%"; Hit description =Nucleotide binding protein, putative
  Pfam annotation: Domain name=Dev_Cell_Death; Domain location=10-130; Score=218.4; E_value=1.9e-62; Accession=PF10539.1; Description =Development and cell death domain
EEEDGDERWFIFMCNARTKPECYRSGVFGLPRGKMDVVERIRPGAKLFLYDFDLKLMYGVYKADTSGGLDLVRHAFEGKFPAQVKFSVDIDCLPVPESSFKHAIKENYNSKGRFTQELSPKQVHRLLEIFQPIGRSQPAPQHIEETRRPLLVEDRRESYDYEEIRLPEHVEERGIPIHARSYPLEDHYKITHSLHPPLLDEPRCILVLDPYHMQEPQHVPPKYYHQVSTSSLNHQPHMDILHESAAGVPSTQVKRTAALRDPWLQAVQCRGSTGVHEEHP

SEQ ID NO: 82967 - protein, 310 aa, Setaria italica
  Transcript Sequence Number=SeqID_16993
  Gene Ontology: Mol. function=metal ion binding
  Homolog annotation: Hit_ID=B9SV90; Match level="QueryCoverage=52%, HitCoverage=17%, E-value=1e-45, Identity=59%"; Hit description =Bromodomain-containing protein
  Pfam annotation: Domain name=Bromodomain; Domain location=106-189; Score=119.4; E_value=1.2e-32; Accession=PF00439.17; Description =Bromodomain
DRRRRKLKLVVKLSQLPPEQQHRRAPPPPSYSDDSDGAGEVGGDGSDDDEQVKPPKKRRIEPRADRSRHREVGGGGRSDPASAPRTKRLPVPGTARTTPLPDRKALEMILEKLQKKDTYGVFAEPVDLEELPDYHDVIEHPMDFGTVRRKLARNAYRSFEQFEDDVFLICSNAMQYNAPDTIYFRQAHSIQELARKKFQELRDEGIPIENHHIKIEQKARPNSCNREPIKKPILRYQDDDLDFLSRKEQVKRPNPKNSEDDISFKDQVKKPVPRNSHDESSLFHKERVKKPISRNSENDLSSSFHKDRPK

SEQ ID NO: 82968 - protein, 148 aa, Setaria italica
  Transcript Sequence Number=SeqID_16994
  Gene Ontology: Mol. function=hydrolase activity
  Homolog annotation: Hit_ID=Q7XSV9; Match level="QueryCoverage=99%, HitCoverage=52%, E-value=1e-42, Identity=60%"; Hit description =OSJNBa0027H06.16 protein
  Pfam annotation: Domain name=DUF303; Domain location=1-73; Score =64.3; E_value=4.6e-16; Accession=PF03629.10; Description=Domain of unknown function (DUF303)
PCAVGGTRMADWARGTDLYAQMLRRARVALETGGRIGALLWYQGESDTVRWSDANEYGRRMGMFVRDIRADLGIPHLLVIQVGLASGLGHYTQLVREAQKGIKLRNVRFVDAMGLPLQDGHLHLSTQAQVQLGHMLAQSYLNYGTSRP

SEQ ID NO: 82969 - protein, 362 aa, Setaria italica
  Transcript Sequence Number=SeqID_16995
  Gene Ontology: Mol. function=metallopeptidase activity; Cellular component=vacuole; Biological process=proteolysis
  Homolog annotation: Hit_ID=Q8LF32; Match level="QueryCoverage=99%, HitCoverage=76%, E-value=1e-157, Identity=71%"; Hit description =Aspartyl aminopeptidase-like protein
  Pfam annotation: Domain name=Peptidase_M18; Domain location=1-348; Score=348.1; E_value=1.6e-101; Accession=PF02127.7; Description =Aminopeptidase I zinc metalloprotease (M18)
GGLWYTWFDRDLTVAGRVIIREKRDGGDSCAHKLVRVQEPILRIPTLAIHLDRTISSEGLKINNQNHLVPVLATSIKNEMQKLVGENGPKESSENKNTKHHPLLLQLIAKEANCEPDEICDFELQLCDTQPSAVAGAMKEFIFSGRLDNLCMSFCSLKALIDSTSAEHSLDHESGVRMVALFDHEEVGSSSAQGAGSPAMLDALSRITGSFNSSNSKLLEKAIQRSFLVSADMAHALHPNYMDKHEENHQPKLHGGLVIKHNANQRYATNAVTAFIFREIAERHQLPVQDFVVRNDMGCGSTIGPILASGVGIRTVDIGAPQLSMHSIREMCAVDDISHSYEHFKAYFEEFTELDRKVKVDY

SEQ ID NO: 82970 - protein, 93 aa, Setaria italica
  Transcript Sequence Number=SeqID_16996
  Subcellular localization annotation: CTP_CleavageSite=83; ConfidenceScore=5.75e-01
TSAAAGAGHWSSPASLTHPPFPPSPPSLCPPQVHCQTMKRIAPQIRPNNPTISANPQTLAPNPPTSGIRSAGVRRRANPGGFEAAAGGCGGRG

SEQ ID NO: 82971 - protein, 138 aa, Setaria italica
  misc_feature (113)..(113): Xaa can be any naturally occurring amino acid
  Transcript Sequence Number=SeqID_16997
  Gene Ontology: Mol. function=transferase activity
  Homolog annotation: Hit_ID=Q5EXL9; Match level="QueryCoverage=98%, HitCoverage=25%, E-value=9e-29, Identity=42%"; Hit description=HGA1
  Pfam annotation: Domain name=DUF563; Domain location=1-138; Score =11.6; E_value=5.1e-10; Accession=PF04577.6; Description=Protein of unknown function (DUF563)
RMKPHARKNDRHALARVTEVTVASSHAADHPAPRCTTNHTAPAVVFSAGGYAGNMFHDLTDVLVPLFITTRRFGGDVHLLVSDAQPWWLDRFRPLLRRLSFHDVVDMGRGAGXAAGGVICYPHVVLGLEFHKEMSVDA

SEQ ID NO: 82972 - protein, 95 aa, Setaria italica
  misc_feature (72)..(72): Xaa can be any naturally occurring amino acid
  Transcript Sequence Number=SeqID_16998
  Gene Ontology: Mol. function=RNA-directed DNA polymerase activity; Biological process=RNA-dependent DNA replication
  Homolog annotation: Hit_ID=Q2R019; Match level="QueryCoverage=98%, HitCoverage=11%, E-value=3e-13, Identity=35%"; Hit description =Retrotransposon protein, putative, Ty3-gypsy subclass
  Pfam annotation: Domain name=Retrotrans_gag; Domain location=16-95; Score=19.1; E_value=0.00082; Accession=PF03732.9; Description =Retrotransposon gag protein
SLLVQAAGGNDDTKVLYFPICVEAGPLTWLKSLEKNSIDTWKHLKAAFTNNFAGAMQCPSNRINLSQVKQQXGETLHSYLRRFFDKKATIMDITE

SEQ ID NO: 82973 - protein, 86 aa, Setaria italica
  Transcript Sequence Number=SeqID_16999
CNDGGDAARRWLRLETMNKWGMGVCTCHTQTLCETISLSDFRTGNKNKNTSAMIAQSFKLLIISLRIPYFFLIKLPPGSDRVLFPQ

SEQ ID NO: 82974 - protein, 92 aa, Setaria italica
  Transcript Sequence Number=SeqID_17000
  Gene Ontology: Mol. function=metal ion binding
  Homolog annotation: Hit_ID=B6UIJ0; Match level="QueryCoverage=44%, HitCoverage=25%, E-value=5e-17, Identity=100%"; Hit description =Multiple stress-responsive zinc-finger protein ISAP1
  Pfam annotation: Domain name=zf-A20; Domain location=18-42; Score =22.5; E_value=0.0017; Accession=PF01754.8; Description=A20-like zinc finger
  Subcellular localization annotation: CTP_CleavageSite=85; ConfidenceScore=5.06e-01
MAQRDKKEEPTELRAPEITLCANNCGFPGNPATQNLCQSCFSAATASMSSPTSSSSSVPAPAAVAAQPRPALAGAPPVELVSPAGAAADWPA

SEQ ID NO: 82975 - protein, 88 aa, Setaria italica
  Transcript Sequence Number=SeqID_17001
  Gene Ontology: Mol. function=metal ion binding; Biological process =response to stress
  Homolog annotation: Hit_ID=A8QZ73; Match level="QueryCoverage=72%, HitCoverage=39%, E-value=3e-27, Identity=92%"; Hit description=AN15
  Pfam annotation: Domain name=zf-AN1; Domain location=29-69; Score =70.0; E_value=8.7e-18; Accession=PF01428.8; Description=AN1-like Zinc finger
  Subcellular localization annotation: CTP_CleavageSite=23; ConfidenceScore=5.13e-01
SPAGAAADWPAAAAPAPAPEAARASVNRCSSCRKRVGLTGFWCRCGELFCGAHRYSDRHGCSYDYKGAARDAIARENPVVRAAKIVRF

SEQ ID NO: 82976 - protein, 178 aa, Setaria italica
  misc_feature (100)..(100): Xaa can be any naturally occurring amino acid
  Transcript Sequence Number=SeqID_17002
  Gene Ontology: Mol. function=metal ion binding; Biological process =response to stress
  Homolog annotation: Hit_ID=Q84PD8; Match level="QueryCoverage=100%, HitCoverage=100%, E-value=4e-46, Identity=60%"; Hit description=Zinc finger A20 and AN1 domain-containing stress-associated protein 11
  Pfam annotation: Domain name=zf-A20; Domain location=19-43; Score =19.5; E_value=0.0046; Accession=PF01754.8; Description=A20-like zinc finger
  Pfam annotation: Domain name=zf-AN1; Domain location=119-159; Score =77.6; E_value=4.5e-20; Accession=PF01428.8; Description=AN1-like Zinc finger
  Pfam module annotation: Pfam domain module=zf-A20::zf-AN1; Domain location=19-43::119-159
MAQRDKKVEEPTELHAPELTLCANSCGFPGNPATKNLCQNCFLAASASASASVSPPSPSPSTTTAAFDKPWPAAASAFSAPTPLAVVAPFSPAVDRPGGXPVESSSSNKAPRTSSVNRCHNCRKRVGLTGFRCRCGELFCGAHRYSDRHDCNFDYKGVGRDAIARENPVVRAAKIVRF

SEQ ID NO: 82977 - protein, 185 aa, Setaria italica
  misc_feature (13)..(13): Xaa can be any naturally occurring amino acid
  Transcript Sequence Number=SeqID_17003
  Homolog annotation: Hit_ID=B6SSJ3; Match level="QueryCoverage=86%, HitCoverage=35%, E-value=2e-57, Identity=75%"; Hit description =Mutant cincinnata
SHSQELRLSLQSXPQTPMFQQQQDRSHGHGGNGSAQQALFPGAASYSFGGGGAMWAEQAQGQQRMVPWNVPDPGGGSTGGYLFNVSQQAAHMQAALAGQSQFFFQRGPLQSSNQPSDRGWPETVEADNPMQHHQGQGGLSPTVFAPGVGFPGFRIPTRIQGDEEHNGGGGNGDKTPPSVSSASHH

SEQ ID NO: 82978 - protein, 193 aa, Setaria italica
  Transcript Sequence Number=SeqID_17004
  Gene Ontology: Mol. function=substrate-specific transmembrane transporter activity; Cellular component=integral to membrane; Biological process=transmembrane transport
  Homolog annotation: Hit_ID=B6TZX8; Match level="QueryCoverage=100%, HitCoverage=37%, E-value=1e-70, Identity=72%"; Hit description =Carbohydrate transporter/ sugar porter
  Pfam annotation: Domain name=Sugar_tr; Domain location=1-193; Score= -163.4; E_value=0.015; Accession=PF00083.16; Description=Sugar (and other) transporter
  Subcellular localization annotation: CTP_CleavageSite=51; ConfidenceScore=5.06e-01
NICAVVGSLTAGRVSDWAGRRRTISFAACIFFVGSVLMGLAPNFATLLVGRCVAGVGVGYALMIAPVYAAEISSAESRGALSSLPDICISLGILLGYVANYLLAKLPLVYGWRAMLGLGALPSAALAVGVFAMPESPRWLVMQGRAEEALAVLRRECETEDEAQVRLAEIKTAAGLAVDSAPGVPAPRSSGKG

SEQ ID NO: 82979 - protein, 468 aa, Setaria italica
  Transcript Sequence Number=SeqID_17005
  Gene Ontology: Mol. function=hydrolase activity; Cellular component =nucleus; Biological process=mRNA transport
  Homolog annotation: Hit_ID=Q8H7L6; Match level="QueryCoverage=98%, HitCoverage=96%, E-value=0.0, Identity=74%"; Hit description =Nucleoside-triphosphatase, putative, expressed
  Pfam annotation: Domain name=GDA1_CD39; Domain location=57-468; Score= 460.1; E_value=3.3e-135; Accession=PF01150.9; Description=GDA1CD39 (nucleoside phosphatase) family
QQTEAVADRVHRYRGVLLVVLAPVLLISFVLLLMPRAPTSASGGGLLAAGGRRWGPRAVEDGPNKYAVIFDAGSSGSRVHVYCFDENLDLVPIGKEIELFKQKKPGLSAHANDPQEAAESLISLLEEAEKVVPVELRKQTPVRVGATAGLRALGTERSEEILQAVRELLRDKSSFKSQPDWVTVLDGSQEGAFQWVTINYLLGKLGKPYSDTVGVVDLGGGSVQMAYAISEKDAVKAPDVSDDEDSYVKKLLLKGTTYYLYVHSYLHYGLLAARAEIFKAGEGNDHSDCMLEGHHGKYSYGDNTFEASGSPSGASYSKCRALAVRALKVDEPACTHMKCTFGGVWNGGGGDGQKNLFVASFFFDRAAEAGFVDPKAATAEVKPSDFEEAARRVCKLNVKDAHATYPDVSEENIPYLCIDLVYQYTLLVDGFGVDPYQDITLVKKVSYGDSYVEAAWPLGSAIEVASSS

SEQ ID NO: 82980 - protein, 444 aa, Setaria italica
  misc_feature (29)..(29): Xaa can be any naturally occurring amino acid
  Transcript Sequence Number=SeqID_17006
  Homolog annotation: Hit_ID=B6TEY6; Match level="QueryCoverage=100%, HitCoverage=100%, E-value=0.0, Identity=86%"; Hit description=T-snare
  Pfam annotation: Domain name=Filament; Domain location=58-350; Score=- 192.3; E_value=0.069; Accession=PF00038.13; Description=Intermediate filament protein
  Pfam annotation: Domain name=M; Domain location=174-194; Score=9.7; E_ value=7.6; Accession=PF02370.8; Description=M protein repeat
  Pfam annotation: Domain name=M; Domain location=230-250; Score=4.7; E_ value=35; Accession=PF02370.8; Description=M protein repeat
  Pfam annotation: Domain name=M; Domain location=398-418; Score=3.3; E_ value=53; Accession=PF02370.8; Description=M protein repeat
  Pfam annotation: Domain name=M; Domain location=44-64; Score=6.0; E _value=23; Accession=PF02370.8; Description=M protein repeat
  Pfam module annotation: Pfam domain module=Filament::M::M::M::M; Domain location=58-350::174-194::230-250::398-418::44-64
MEAHHASRGRRTLEEIRQKRAAERMQHAXPTAAVSLVEPYGNQRAGAELLARVQELENGNAELERENKMLLSKIAEKEVEKDALVNRLNDLERNVVPSLRKTLNDITLEKDAAVVAKEDALAQLRSMKKRLKEAEEEQYRAEEDSASLRAQLNTLQQQVMANSYSGFPVGTSSEESRAMEKEIQDLQAQLKQESLLRQQEQQKLAEESQLRQQELEKLAEEQSRIASLEAEKQQLEDQIAVLTKKATEDASEFAARKAFSMQDREKLENQLHDMALMVERLEGSRQKLLMEIDSQSTEIENLFEENSALSTSYQEAIAVTVQWENQVRDCLKQNEELRSHLDKLRLEQASLLKVSNINTQSDWQNDNSISNPPELVTENLSLKDQLIKEQSRSEGLSAEIMKLSAELRKAVQAQNNLTRLYRPVLRDIESNLMKMKQETYATIQ

SEQ ID NO: 82981 - protein, 253 aa, Setaria italica
  misc_feature (52)..(52): Xaa can be any naturally occurring amino acid
  misc_feature (104)..(104): Xaa can be any naturally occurring amino acid
  misc_feature (120)..(120): Xaa can be any naturally occurring amino acid
  Transcript Sequence Number=SeqID_17007
  Gene Ontology: Mol. function=pyruvate kinase activity; Cellular component=cytoplasm; Biological process=glycolysis
  Homolog annotation: Hit_ID=Q2RAK2; Match level="QueryCoverage=85%, HitCoverage=44%, E-value=1e-76, Identity=66%"; Hit description =Pyruvate kinase
  Pfam annotation: Domain name=PK_C; Domain location=144-246; Score= -2.0; E_value=3e-05; Accession=PF02887.8; Description=Pyruvate kinase, alphabeta domain
THISVILLGCIIIHVLLLVYFSFDLCLSVFLFKRSALHKCNMAGKPAVVTHXHGVDSMTDDARPAQEEATDVANAVLDSNDAILLGAETRDLHTVETISTVGKXCVEAEKVFHHDLSASXTVKHVGEPMTHLDLWIKCFLGVTVRAAIKVNTSVIICFTTSGRAARLTAKYRPSMLVLSVAIPHLKTNQLKWSFTGAFEAESTSAANESVLKVYLDHGKASGVMNFHDCVVVRQIAGESLVVKILSWMTGHVY

SEQ ID NO: 82982 - protein, 53 aa, Setaria italica
  Transcript Sequence Number=SeqID_17008
INQSINQLISPKNPELPNQFDKIHRQRRDLSPLYGVPELGGGLLGLLPRRRRE

SEQ ID NO: 82983 - protein, 190 aa, Setaria italica
  Transcript Sequence Number=SeqID_17009
  Gene Ontology: Mol. function=binding; Cellular component=mitochondrion
  Homolog annotation: Hit_ID=B9SQC8; Match level="QueryCoverage=99%, HitCoverage=76%, E-value=6e-70, Identity=34%"; Hit description =Pentatricopeptide repeat-containing protein, putative
  Pfam annotation: Domain name=PPR; Domain location=105-139; Score =28.7; E_value=2.4e-05; Accession=PF01535.12; Description=PPR repeat
  Pfam annotation: Domain name=PPR; Domain location=140-174; Score =34.6; E_value=4.1e-07; Accession=PF01535.12; Description=PPR repeat
  Pfam annotation: Domain name=PPR; Domain location=35-69; Score=36.2; E_value=1.3e-07; Accession=PF01535.12; Description=PPR repeat
  Pfam annotation: Domain name=PPR; Domain location=70-104; Score=46.9; E_value=8e-11; Accession=PF01535.12; Description=PPR repeat
  Pfam module annotation: Pfam domain module=PPR::PPR::PPR::PPR; Domain location=105-139::140-174::35-69::70-104
EIRTNFDALAKAERYDLACELFQELKENCGSSSARVYAVMIKHLGKAGRLNDAINMFEEMNKLGCTPDVYAYNALMSGLARKGMLDEALTTMRRMQEHGCIPDINSYNIILNGLAKVGGPHRAMEMLSNMKQSAIRPDAVSYNTVLGALSHAGMFEAAAKLMKEMNTLGFEYDLITYSSILEAIGNVDHE

SEQ ID NO: 82984 - protein, 285 aa, Setaria italica
  misc_feature (52)..(52): Xaa can be any naturally occurring amino acid
  misc_feature (66)..(66): Xaa can be any naturally occurring amino acid
  misc_feature (77)..(77): Xaa can be any naturally occurring amino acid
  misc_feature (195)..(195): Xaa can be any naturally occurring amino acid
  Transcript Sequence Number=SeqID_17010
  Gene Ontology: Mol. function=binding; Cellular component=mitochondrion
  Homolog annotation: Hit_ID=B9SQC8; Match level="QueryCoverage=96%, HitCoverage=79%, E-value=1e-100, Identity=34%"; Hit description =Pentatricopeptide repeat-containing protein, putative
  Pfam annotation: Domain name=PPR; Domain location=100-134; Score =33.6; E_value=7.8e-07; Accession=PF01535.12; Description=PPR repeat
  Pfam annotation: Domain name=PPR; Domain location=135-170; Score=6.4; E_value=1.6; Accession=PF01535.12; Description=PPR repeat
  Pfam annotation: Domain name=PPR; Domain location=171-205; Score =35.5; E_value=2.1e-07; Accession=PF01535.12; Description=PPR repeat
  Pfam annotation: Domain name=PPR; Domain location=206-240; Score =22.6; E_value=0.0016; Accession=PF01535.12; Description=PPR repeat
  Pfam annotation: Domain name=PPR; Domain location=241-275; Score =36.2; E_value=1.3e-07; Accession=PF01535.12; Description=PPR repeat
  Pfam annotation: Domain name=PPR; Domain location=30-64; Score=23.5; E_value=0.00085; Accession=PF01535.12; Description=PPR repeat
  Pfam annotation: Domain name=PPR; Domain location=65-99; Score=43.3; E_value=9.4e-10; Accession=PF01535.12; Description=PPR repeat
  Pfam module annotation: Pfam domain module=PPR::PPR::PPR::PPR::PPR::PP R::PPR; Domain location=100-134::135-170::171-205::206-240::241 -275::30-64::65-99
QLAAFRSPSSHSTTELLNEMKENGMQPTAKIYTMLIALFFKLDDVHGALSLXEEMRYQYCRPDVFXYTELIRGLGKXGRIDEAYHFFHEMQREGCRPDTIVMNNMINFLGKAGRLDDAIKLFQEMGTLRCIPSVVTYNTIIKALFESKPHASEVPSWLERMKESGISPSSFTYSILIDGFCKTNRTEKAMMLLEXVVLKGFPPCPAAYCSLIDALGKAKRYDLACELFQELKENCGSSSARVYAVMIKHLGKAGRLNDAINMFEEMNKLGCTPDVYAYKAPRTVL

SEQ ID NO: 82985 - protein, 199 aa, Setaria italica
  Transcript Sequence Number=SeqID_17011
  Gene Ontology: Cellular component=chloroplast
  Homolog annotation: Hit_ID=B9SQC8; Match level="QueryCoverage=99%, HitCoverage=63%, E-value=6e-68, Identity=35%"; Hit description =Pentatricopeptide repeat-containing protein, putative
  Pfam annotation: Domain name=PPR; Domain location=11-45; Score=12.3; E_value=0.31; Accession=PF01535.12; Description=PPR repeat
  Pfam annotation: Domain name=PPR; Domain location=118-152; Score =39.4; E_value=1.5e-08; Accession=PF01535.12; Description=PPR repeat
  Pfam annotation: Domain name=PPR; Domain location=153-187; Score =29.6; E_value=1.2e-05; Accession=PF01535.12; Description=PPR repeat
  Pfam annotation: Domain name=PPR; Domain location=47-81; Score=4.6; E_ value=2.6; Accession=PF01535.12; Description=PPR repeat
  Pfam annotation: Domain name=PPR; Domain location=82-116; Score=24.9; E_value=0.00034; Accession=PF01535.12; Description=PPR repeat
  Pfam module annotation: Pfam domain module=PPR::PPR::PPR::PPR::PPR; Domain location=11-45::118-152::153-187::47-81::82-116
TKRRNYEHDTSTYMALIRCLEVIEQYGEMWKMIQEMVRNPICVVTPTELSEVIRMLGNAKMISKAIAIFYQIKTRKCQPTAQAYNSMIIMLMHEGQYEKVHELYNEMSNEGHCFPDTVTYSALIFTFCKLGRRDSAIQLLNEMKENGMQPTAKIYTMLIALFFKLDDVHGALSLFEEMRYQYCRPDVFTYTELIRKDLR

SEQ ID NO: 82986 - protein, 180 aa, Setaria italica
  misc_feature (90)..(90): Xaa can be any naturally occurring amino acid
  Transcript Sequence Number=SeqID_17012
GKHLLWSVESIEESEEVQEEEHSRILPEIISMTLNISIKLLPSAAKCITVDMVHTTGEFISELLSLTESSILQIKKIHGAAPDIARAAPXFLDETTKLCWAYSEAAKADNCKTSIPDEDTTVKHIEQGLASDVTRITLSTIQTLCKLGTYAASSGGSQVTLLNVSWKGVVSLLQSGKGMI

SEQ ID NO: 82987 - protein, 534 aa, Setaria italica
  misc_feature (276)..(276): Xaa can be any naturally occurring amino acid
  Transcript Sequence Number=SeqID_17013
  Homolog annotation: Hit_ID=Q1RSI3; Match level="QueryCoverage=99%, HitCoverage=48%, E-value=6e-72, Identity=32%"; Hit description =Contains similarity to Chlamydia outer membrane protein , related
VSWDDSGCSGVSHCVLHKSILQVALKCSCIDMTDCLGQFLALIAKASSWCGKHLLWSVESIEESEEVQEEEHSRILPEIISMTLNISIKLLPSAAKCITVDMVHTTGDFISELLSLTESSIKIHGAAPDIARAAPVFLDETTKLCRAYSEAAKADNCKMSIPDEDTTVKHIEQGLASDVTRITLSTIQTLCKLGTYAASSGGSQVTLLNVSWKGVVSLLQSGKGMIEEKINVREIILTLLSLSIKSLRVAAETWCMPLPEAIGTSEARRAFLPIKXFLINAVRICSAYPSESMIIHKNIIRCALVITSASILLSKKPQLKAANEALVELLEPTLFVLLDTLMKSSEVTPDSKCQLARYFFENEEANSSDHMRQANQIEINLASLDCIFSTDSDVDHRNRALLPAELVVFLHLLNASSWLTEEVVIELSNKLQTLLNILTSEDIYSYVLGFEIPALYGADHSPAVVWQPVYTSLIQALKTFMISAVASSAAWNELEAFLLENLFHPHFLCLEIITELWCFFMRYAETETYINIVS

SEQ ID NO: 82988 - protein, 267 aa, Setaria italica
  Transcript Sequence Number=SeqID_17014
  Gene Ontology: Cellular component=integral to membrane
  Homolog annotation: Hit_ID=B6T3P3; Match level="QueryCoverage=100%, HitCoverage=100%, E-value=1e-142, Identity=92%"; Hit description =Protein YIF1A
  Pfam annotation: Domain name=YIF1; Domain location=34-263; Score =366.2; E_value=6.1e-107; Accession=PF03878.7; Description=YIF1
  Pfam annotation: Domain name=Yip1; Domain location=69-231; Score= -24.5; E_value=0.0078; Accession=PF04893.9; Description=Yip1 domain
  Pfam module annotation: Pfam domain module=YIF1::Yip1; Domain location=34-263::69-231
  Subcellular localization annotation: CTP_CleavageSite=36; ConfidenceScore=5.01e-01
MAAMNSDLGGLGGRPTNPQANPFGGALNGTGSGLIRTGLEAYGGRILDSSSEFMQSNITQYLSDPQYYFQVNSQYVRNKLKVILFPFLHRGHWTRITEPVGGRLSYKPPVQDINAPDLYIPLMAFGTYIVVAGYALGVLGRFTPEALTLQFSKGILGWFLQVILIKGLLYSLGSGEAPLLDIVAYAGYGFAGTSLAMLARIFWNYLYYFIMPWFCICTGVFLVKTMKRVLLGGPRSYERHPSRNHYFLLFLAVVQFPMLFWLGNISG

SEQ ID NO: 82989 - protein, 103 aa, Setaria italica
  Transcript Sequence Number=SeqID_17015
  Gene Ontology: Mol. function=binding
QESSSMWEFDEDPPPSPPQPRPEARRRGGPRRGRGGGWELAEPPAAAPTATLMEAEEYGEMMESVDEVMFALDGIRPAAQKRTRRASLLALLGICASAERRRV

SEQ ID NO: 82990 - protein, 221 aa, Setaria italica
  misc_feature (87)..(87): Xaa can be any naturally occurring amino acid
  Transcript Sequence Number=SeqID_17016
  Gene Ontology: Mol. function=protein serine/threonine kinase activity; Cellular component=ubiquitin ligase complex; Biological process=ubiquitin-dependent protein catabolic process
  Homolog annotation: Hit_ID=Q652P2; Match level="QueryCoverage=71%, HitCoverage=48%, E-value=2e-72, Identity=80%"; Hit description =Putative serine/threonine protein kinase
  Pfam annotation: Domain name=Pkinase; Domain location=89-220; Score= -91.3; E_value=0.0047; Accession=PF00069.17; Description=Protein kinase domain
  Pfam annotation: Domain name=Pkinase_Tyr; Domain location=89-220; Score=-102.6; E_value=6.6e-07; Accession=PF07714.9; Description =Protein tyrosine kinase
  Pfam module annotation: Pfam domain module=Pkinase::Pkinase_Tyr; Domain location=89-220::89-220
LEKENFQIFNELQKANEQRADLENKLLQTNSLLEQLQQLQGELQREKEDALREAEEMRKLYGNSDFISAGEVSLTEFSYSEIQEATXNFDESMEIGHGGCASVYKGFLRHTTVAIKKFNREGIVGEREFNDEVEILGRMRHPNLVTLIGVCRDPKVLVYEFLPNGSLEDRLQCKHHTEPLPWRMRIRIAADICTALIFLHSNKPKSIAHGDLKPVKEDIVR

SEQ ID NO: 82991 - protein, 60 aa, Setaria italica
  Transcript Sequence Number=SeqID_17017
  Gene Ontology: Mol. function=metal ion binding
  Homolog annotation: Hit_ID=B6SWT5; Match level="QueryCoverage=66%, HitCoverage=7%, E-value=5e-17, Identity=100%"; Hit description =Pollen ankyrin-like protein
MSQRVKCHDAMLTLFSVRSGCSHEFCIKCALYLCSTSNIRVEFTGPPGSIPCPLCRNGIK

SEQ ID NO: 82992 - protein, 124 aa, Setaria italica
  misc_feature (87)..(87): Xaa can be any naturally occurring amino acid
  Transcript Sequence Number=SeqID_17018
  Gene Ontology: Mol. function=metal ion binding
  Homolog annotation: Hit_ID=B6SWT5; Match level="QueryCoverage=97%, HitCoverage=17%, E-value=3e-39, Identity=70%"; Hit description =Pollen ankyrin-like protein
  Pfam annotation: Domain name=Ank; Domain location=21-53; Score=38.8; E_value=2.1e-08; Accession=PF00023.22; Description=Ankyrin repeat
  Pfam annotation: Domain name=Ank; Domain location=95-124; Score=10.9; E_value=0.96; Accession=PF00023.22; Description=Ankyrin repeat
  Pfam module annotation: Pfam domain module=Ank::Ank; Domain location =21-53::95-124
SLGQKFNEPARVRYINKPADGGVTALHMAALNGQLDCMHLLIDLGANVSAVTFPYGTTTNLIGKYWFLAQMAYNKQWLFFLTQMRFXQCTGGAGAGSTPLHYAAGGGKQECCELLISKGASRLT

SEQ ID NO: 82993 - protein, 472 aa, Setaria italica
  misc_feature (194)..(194): Xaa can be any naturally occurring amino acid
  Transcript Sequence Number=SeqID_17019
  Gene Ontology: Mol. function=metal ion binding
  Homolog annotation: Hit_ID=B6SWT5; Match level="QueryCoverage=100%, HitCoverage=90%, E-value=0.0, Identity=93%"; Hit description=Pollen ankyrin-like protein
  Pfam annotation: Domain name=Ank; Domain location=1-28; Score=25.8; E_ value=0.00017; Accession=PF00023.22; Description=Ankyrin repeat
  Pfam annotation: Domain name=Ank; Domain location=137-169; Score =38.8; E_value=2.1e-08; Accession=PF00023.22; Description=Ankyrin repeat
  Pfam annotation: Domain name=Ank; Domain location=180-213; Score =26.0; E_value=0.00015; Accession=PF00023.22; Description=Ankyrin repeat
  Pfam annotation: Domain name=Ank; Domain location=29-61; Score=33.6; E_value=7.9e-07; Accession=PF00023.22; Description=Ankyrin repeat
  Pfam annotation: Domain name=Ank; Domain location=63-96; Score=17.5; E_value=0.055; Accession=PF00023.22; Description=Ankyrin repeat
  Pfam annotation: Domain name=zf-C3HC4; Domain location=280-329; Score= 12.2; E_value=0.0041; Accession=PF00097.17; Description=Zinc finger, C3HC4 type (RING finger)
  Pfam module annotation: Pfam domain module=Ank::Ank::Ank::Ank::Ank::zf -C3HC4; Domain location=1-28::137-169::180-213::29-61::63-96::280-329
LHFAAAKGHLDIVTMLLEKGADVNARNYCGQTALMHACRHGHWEVVQMLLLFRCNVTRADYLSGRTALHFAAHDGFVRCVRLLLADFVPSVALEDIASSVVDGGDCQTNSGSSPNSSLGQKFNEPARVRYINKPADGGVTALHMAALNGQLDCMHLLIDLGANVSAVTFPYGTTTNLIGAGSTPLHYAAGGGKXQECCELLISKGASRLTLNCNGWLPIDVARIFGRRSLEPLLSPNSHSSVPVFQPSSYLALPLMSILHIAREFGLQYTLPSVDDSDLCSVCLERSCSVAAEGCSHEFCIKCALYLCSTSNIRVEFTGPPGSIPCPLCRNGITSFNKLPSTPMEGLKSSSALTFCNPCILNTRSMNSPASVSKAEIRRNRVAAVSSELVCPITCSPFPSSALPTCRCSDDDPCGATEAQDGSEVQSPRPSHSASMELDKRGEDLDRTSCSGMFWSRRSCHREQQCDAEINA

SEQ ID NO: 82994 - protein, 129 aa, Setaria italica
  Transcript Sequence Number=SeqID_17020
  Gene Ontology: Mol. function=potassium ion transmembrane transporter activity; Cellular component=integral to membrane; Biological process=potassium ion transport
  Homolog annotation: Hit_ID=Q84MS3; Match level="QueryCoverage=100%, HitCoverage=15%, E-value=2e-59, Identity=85%"; Hit description =Probable potassium transporter 16
NGLKLRAPHLTTDQTVWITVGILVVLFAVQRFGTDKIGYTFAPVVFVWLLLMAGIGIYNMVKYDIGTLKAFNAKYIIDYFRRNKKKGWVSLGEILLCFTGTEALFADLGYFSIRSIQLSFTFGLLPSVL

SEQ ID NO: 82995 - protein, 112 aa, Setaria italica
  Transcript Sequence Number=SeqID_17021
TTKELISSQRWVHRQRVASPWKYGSGGRPRNDWGMQSVAVAGDDEGNIILGNNDGLVVYDVRKGETVRTVNSVMQRKNRVFVSKHVFKGSTVQHTCFFTPSSADSPLIHSWS

SEQ ID NO: 82996 - protein, 214 aa, Setaria italica
  Transcript Sequence Number=SeqID_17022
  Gene Ontology: Mol. function=N-acetyltransferase activity
  Homolog annotation: Hit_ID=B6UHR7; Match level="QueryCoverage=98%, HitCoverage=69%, E-value=3e-74, Identity=68%"; Hit description =Acetyltransferase, GNAT family protein
  Pfam annotation: Domain name=Acetyltransf_1; Domain location=122-213; Score=24.6; E_value=0.00041; Accession=PF00583.16; Description =Acetyltransferase (GNAT) family
PGPGVFLSPRALSQLDELAAFRYEHAFPHGLLTVRALTRGPEDDAVAEALVRLLASSFSETVRWAPAQRYAQLLTFVIRRYLHERRGLAPHAAVLVGFYRPADAAADSTGDDGDEGGEDGEGKDEGEMACTAEVSFNAVGAPGAPPTPTPPLDFPYICNMTVKTALRRRGLGKQLLKACEDLVIKMDARRCVYLHCRVIDQVPFNIYRKAGYNI

SEQ ID NO: 82997 - protein, 197 aa, Setaria italica
  Transcript Sequence Number=SeqID_17023
  Homolog annotation: Hit_ID=B6TDI2; Match level="QueryCoverage=100%, HitCoverage=69%, E-value=1e-104, Identity=89%"; Hit description=F -box domain containing protein
QLVPEITTHALSYLDYTSLCRLSMTNSAMRRAANDDGAWKALYHKDFTVEQGTINPPNGWKAYYAATKAIMNLNAEFYNIIREGSLPAMSRFWLNADYVKCIHANGEFFTGYNAVMGGWSLLFNWGQDGGQGVGFQIRDVRVRVLGEVAWVNLKANIDLDPVLCHVTNVFEFRNGRWYMVHHHSSLMAEPAPHNMFG

SEQ ID NO: 82998 - protein, 81 aa, Setaria italica
  Transcript Sequence Number=SeqID_17024
  Gene Ontology: Mol. function=protein serine/threonine kinase activity; Cellular component=plasma membrane; Biological process =protein amino acid phosphorylation
  Homolog annotation: Hit_ID=B6T8S1; Match level="QueryCoverage=95%, HitCoverage=18%, E-value=2e-35, Identity=94%"; Hit description =Serine/threonine protein kinase
LQRNRPVLLKLAVKQALDVARGMAYVHGLGFIHRDLKSDNLLISGDKSIKIADFGVARIEVKTEGMTPETGTYRWMAPLFC

SEQ ID NO: 82999 - protein, 410 aa, Setaria italica
  misc_feature (11)..(11): Xaa can be any naturally occurring amino acid
  Transcript Sequence Number=SeqID_17025
  Gene Ontology: Mol. function=protein serine/threonine kinase activity; Cellular component=plasma membrane; Biological process =protein amino acid phosphorylation
  Homolog annotation: Hit_ID=B6T8S1; Match level="QueryCoverage=96%, HitCoverage=93%, E-value=0.0, Identity=90%"; Hit description =Serine/threonine protein kinase
  Pfam annotation: Domain name=Pkinase; Domain location=129-383; Score =227.3; E_value=3.8e-65; Accession=PF00069.17; Description=Protein kinase domain
  Pfam annotation: Domain name=Pkinase_Tyr; Domain location=129-383; Score=276.3; E_value=6.8e-80; Accession=PF07714.9; Description =Protein tyrosine kinase
  Pfam module annotation: Pfam domain module=Pkinase::Pkinase_Tyr; Domain location=129-383::129-383
AVGGHDGGVNXGGGFCDMAFYQKLGEGSNMSVDSLNSLQTSMHGGSIAMSVDNSSVGSNSDSRTGMLGHPGLKGPVVVGSYSVGNSIFRPGRVSHALSEDALAQALMDNRFPTETLQNYEEWTIDLGKLHLGMPFAQGAFGKLYRGTYNGMDVAIKLLERPEADPEKAQLLEQQFVQEVMMLSTLRHPNIVKFIGACRKPMVWCIVTEYAKGGSLKNFLSRRQNRSVPLKLAVKQALDVARGMAYVHGLGFIHRDLKSDNLLISGDKSIKIADFGVARIEVKTEGMTPETGTYRWMAPEMIQHRPYNQKVDVYSFGIVLWELVTGSVPFANMTAVQAAFAVVNKGVRPTIPHDCLPALGEIMTRCWDANPDVRPPFTEIVMMLEQVESEVLTTVRRARFRCCIAQPMTLD

SEQ ID NO: 83000 - protein, 216 aa, Setaria italica
  misc_feature (13)..(13): Xaa can be any naturally occurring amino acid
  misc_feature (33)..(33): Xaa can be any naturally occurring amino acid
  Transcript Sequence Number=SeqID_17026
  Gene Ontology: Mol. function=catalytic activity; Cellular component =endoplasmic reticulum; Biological process=metabolic process
  Homolog annotation: Hit_ID=B6UE76; Match level="QueryCoverage=98%, HitCoverage=34%, E-value=6e-91, Identity=74%"; Hit description=CER1
KLNRNGELYVIRXPNLKTKIVDGTSLAVAAVLXLIPQGTKDVLLLGDATKVSTVLASALCEREIQVQIVDKDLYDCLKQELRPELHKHLLLSCSYSSKVWLVGDGLTDEEQRKAQAGVHFVPYSQFPPAAARVDDCVYHSTPALVVPGSFENLHACENWLPRRVMSAWRAAGIVHALEKWDAHECGGRVTGVDKAWRAALAHGFRPYDRHHAAVAK

SEQ ID NO: 83001 - protein, 125 aa, Setaria italica
  Transcript Sequence Number=SeqID_17027
LEQSGQEEDRGPWRTTRVRKCNNREGPTWYSQASNCVINFIHQPSRGAVFATAKKAAWPIMVPSRQGQVTCHGILYTTCGRRRFRCRKLRQHQSQVNQAGAQPSAHDELMTRISKIAMLKCICKL

SEQ ID NO: 83002 - protein, 118 aa, Setaria italica
  Transcript Sequence Number=SeqID_17028
  Gene Ontology: Mol. function=transferase activity, transferring glycosyl groups; Cellular component=chloroplast; Biological process =starch biosynthetic process
  Homolog annotation: Hit_ID=Q9SBL2; Match level="QueryCoverage=100%, HitCoverage=21%, E-value=4e-53, Identity=79%"; Hit description =Soluble starch synthase
GAVVTADRIVTVSKGYSWEVTTAEGGQGLDELLSSRKSVLNDKHIPCHYSADDLSGKAKCKAELQKELGLPIRPDVPLIGFIGRLDYQKGIDLIKLIMPDLMREDIQFAMLGSGDPEL

SEQ ID NO: 83003 - protein, 122 aa, Setaria italica
  Transcript Sequence Number=SeqID_17029
  Homolog annotation: Hit_ID=B6SX35; Match level="QueryCoverage=87%, HitCoverage=98%, E-value=9e-53, Identity=92%"; Hit description =Hypoxia induced protein conserved region containing protein
  Pfam annotation: Domain name=HIG_1_N; Domain location=27-94; Score =16.3; E_value=2.1e-05; Accession=PF04588.5; Description=Hypoxia induced protein conserved region
RKRTRKRQKAKIRRKEEEENAKQMAEGPSKMESMRKWVVEHKLRAVGCLWLTGISSSIAYNWSRPNMKPSVKIIHARLHAQALTLAALVGSACVEYYDNKYGSSGPKVDKYTSQYLAHSHKD

SEQ ID NO: 83004 - protein, 138 aa, Setaria italica
  Transcript Sequence Number=SeqID_17030
  Gene Ontology: Mol. function=nucleotide binding; Cellular component =intracellular; Biological process=small GTPase mediated signal transduction
  Homolog annotation: Hit_ID=P36397; Match level="QueryCoverage=98%, HitCoverage=74%, E-value=4e-32, Identity=51%"; Hit description=ADP -ribosylation factor 1
  Pfam annotation: Domain name=Arf; Domain location=1-134; Score=179.9; E_value=7.1e-51; Accession=PF00025.13; Description=ADP-ribosylation factor family
FLSTAFNIETIEYKSISFTFWDVGGSAPNRPLWKYYFQDTQGIVFVVDSSDRDRVRLARDELNALLNEEELRDAALLVFANKQDLPNAMTAAEMAEELGLHRSLGTRRRWHIQSARATSGEGLYEGLDWLCTNVNTKA

SEQ ID NO: 83005 - protein, 90 aa, Setaria italica
  Transcript Sequence Number=SeqID_17031
  Gene Ontology: Mol. function=transferase activity, transferring glycosyl groups; Cellular component=cytosol; Biological process =pyridine nucleotide biosynthetic process
  Homolog annotation: Hit_ID=B6UET1; Match level="QueryCoverage=84%, HitCoverage=13%, E-value=6e-37, Identity=93%"; Hit description =Nicotinate phosphoribosyltransferase-like protein
  Subcellular localization annotation: CTP_CleavageSite=8; ConfidenceScore=5.08e-01
MAATSAPPASAHANGNGTHAGMAAQVGAPTNPMATALLTDQYQFSMAYAYWKAGKHADRAVFDLYFRKNPFGGEFTVFAGLEECIKFIAK

SEQ ID NO: 83006 - protein, 315 aa, Setaria italica
  Transcript Sequence Number=SeqID_17032
  Gene Ontology: Mol. function=protein dimerization activity; Cellular component=nucleus; Biological process=regulation of transcription, DNA-dependent
  Homolog annotation: Hit_ID=B6T330; Match level="QueryCoverage=100%, HitCoverage=100%, E-value=1e-130, Identity=76%"; Hit description =BZO2H2
  Pfam annotation: Domain name=bZIP_1; Domain location=140-200; Score =63.7; E_value=7.1e-16; Accession=PF00170.13; Description=bZIP transcription factor
  Pfam annotation: Domain name=bZIP_2; Domain location=140-194; Score =42.9; E_value=1.3e-09; Accession=PF07716.7; Description=Basic region leucine zipper
  Pfam module annotation: Pfam domain module=bZIP_1::bZIP_2; Domain location=140-200::140-194
MKKCASELELEAFIRSREDAAAAAVAAAEHKPGHDIAAQAAFGAGVFSPGDLSGFSFADSNTLNGSIPNHVWSHNHNVRHPAVSTTIESQSSICAAASPTSATNLYLKESQTLGGTSGSDSDSESLLDIEGGPCEQSTNPQDVKRMRRMVSNRESARRSRKRKQAHLADLETQVDQLRGENASLFKQLTDANQQFTTAVTDNRILKSDVEALRVKVKLAEDMVARGALTCGLGSLGLSPVLNPRQACRGPDVLSGLDFAGDDPCFAGLSPTEQVQNSPLQSIASLESLENRIASEVTSCGGPGVDVWPWDGGLSK

SEQ ID NO: 83007 - protein, 92 aa, Setaria italica
  Transcript Sequence Number=SeqID_17033
  Subcellular localization annotation: CTP_CleavageSite=52; ConfidenceScore=5.25e-01
PCAWWNTRIGHILCNLFAMAFMLGLPRKSRRRRCGCLSSAWLDCLFVNAFVMASGTDAFVMASGTDAFVMQEVLDQLLLMMYCSCKMIYWSS

SEQ ID NO: 83008 - protein, 239 aa, Setaria italica
  misc_feature (187)..(187): Xaa can be any naturally occurring amino acid
  Transcript Sequence Number=SeqID_17034
RPRTDEKQGEGGSKSQLHKSFYTNVPNECLDDMEVSSVKRMALEFDSSKEHYHVKVFDKHHSDSTISCKCTVEEDGSLAIHKVEWNKVRHLVEDISCLFKDLDLRLMLCTKRILKTLDPEVENALKSLVSSAVIDPDVKGGLRWPLGKESIGERFSIVGVWHTNYKAFRNETLRLKLRHGDRFDHQXSAGEVSNEVTFKLIGMSRRLEDVDPEETSLKEMLEPVVQMVWDNALNYKIVP

SEQ ID NO: 83009 - protein, 75 aa, Setaria italica
  Transcript Sequence Number=SeqID_17035
FSLKWILEIALSPECPTKRLATVVRKSDLTWVQDLHYIHKFISDITVSRGMTCKGLAVCGSLQHDKEFLEFSKLT

SEQ ID NO: 83010 - protein, 73 aa, Setaria italica
  Transcript Sequence Number=SeqID_17036
  Gene Ontology: Cellular component=mitochondrion
  Homolog annotation: Hit_ID=B6UCR5; Match level="QueryCoverage=98%, HitCoverage=13%, E-value=4e-30, Identity=90%"; Hit description=ATP binding protein
RTEDASALLDEVINRDMKLSYKKFDAIMLRLSAVGDLSAIHRLSEHMRRFYNVAMSRRFAITQKKKSIGLRRR

SEQ ID NO: 83011 - protein, 74 aa, Setaria italica
  Transcript Sequence Number=SeqID_17037
VAYMLVSWFSFSFIRWGYMSFCQVFINEIMAKGYCESYYSFLDNFISRLVKDVTCSPLAIIFQFGFAKQEFSLF

SEQ ID NO: 83012 - protein, 158 aa, Setaria italica
  Transcript Sequence Number=SeqID_17038
  Homolog annotation: Hit_ID=Q7XQ84; Match level="QueryCoverage=92%, HitCoverage=57%, E-value=5e-27, Identity=51%"; Hit description =OSJNBa0011J08.5 protein
  Subcellular localization annotation: CTP_CleavageSite=47; ConfidenceScore=5.59e-01
MALHHSGPATSALTTGHRGSSAAATAVLLRPTTESRSRLRLHARKPAAESRAAGADTDTSSRSENAVLKAAWYGSELLGIAASLLRPAPSSTEGDAGGDAKGGAAVSLDHAGVVEAIKDDFERSYFVTGNLTLRAYEEDCEFADPAGSFRGLRRFKRT

SEQ ID NO: 83013 - protein, 152 aa, Setaria italica
  misc_feature (70)..(70): Xaa can be any naturally occurring amino acid
  misc_feature (86)..(86): Xaa can be any naturally occurring amino acid
  Transcript Sequence Number=SeqID_17039
  Gene Ontology: Mol. function=zinc ion binding; Cellular component =intracellular
  Homolog annotation: Hit_ID=Q9FYI5; Match level="QueryCoverage=77%, HitCoverage=31%, E-value=1e-22, Identity=50%"; Hit description =F17F8.14
RKETVGERRSAMGGVAIHVLQVHKESVTKVPNAKPDRESTDIEIFGMQGIPAHVLAAHYGEEEDPSAKVXKVEVPQVRPVIMPNSXLGMAFPPRPTYGVAPPIYNPALNPLMARPPIWPTPPAQAWYPQQVAYPQQPAVSVAPVVAGLPPQQ

SEQ ID NO: 83014 - protein, 59 aa, Setaria italica
  misc_feature (44)..(44): Xaa can be any naturally occurring amino acid
  Transcript Sequence Number=SeqID_17040
VPSLNCKYHLPSKAQLLHRAMRPASRLSDILRSIAASTEFISDXWSKTLVTFSTKIKLQ

SEQ ID NO: 83015 - protein, 59 aa, Setaria italica
  Transcript Sequence Number=SeqID_17041
VPSLNCKYHLPSKAQLLHRAMRPASRLSDILRSIAASTEFIWLTWSKTLVTFSTKIKLQ

SEQ ID NO: 83016 - protein, 97 aa, Setaria italica
  Transcript Sequence Number=SeqID_17042
  Gene Ontology: Mol. function=zinc ion binding; Cellular component =intracellular
  Homolog annotation: Hit_ID=Q56YA6; Match level="QueryCoverage=81%, HitCoverage=36%, E-value=8e-29, Identity=75%"; Hit description =Putative 11-zinc finger protein
  Subcellular localization annotation: CTP_CleavageSite=30; ConfidenceScore=5.09e-01
MVQDMLSMNLQVTPCVHCTGGLAVGSSPAVSNNKASGNQPATNEVYLVWDDEAMSMEERRLSLPKYQVHDETSQMNSVDAAIDRRISESRLAGRMAL

SEQ ID NO: 83017 - protein, 349 aa, Setaria italica
  Transcript Sequence Number=SeqID_17043
  Gene Ontology: Mol. function=zinc ion binding; Cellular component =intracellular; Biological process=regulation of transcription, DNA -dependent
  Homolog annotation: Hit_ID=Q9FYI5; Match level="QueryCoverage=100%, HitCoverage=100%, E-value=1e-83, Identity=51%"; Hit description =F17F8.14
  Pfam annotation: Domain name=zf-C2H2; Domain location=11-34; Score =10.5; E_value=0.89; Accession=PF00096.18; Description=Zinc finger, C2H2 type
  Pfam annotation: Domain name=zf-C2H2; Domain location=35-58; Score =19.6; E_value=0.013; Accession=PF00096.18; Description=Zinc finger, C2H2 type
  Pfam module annotation: Pfam domain module=zf-C2H2::zf-C2H2; Domain location=11-34::35-58
MGKKKKRVEKVFCYYCDREFDDEKILVQHQKAKHFKCHVCHKKLSTASGMAIHVLQVHKESVTKVPNAKPDRESTDIEIFGMQGIPAHVLAAHYGEEEDPSAKVAKVEVPQVRPVIMPNSLGMAFPPRPTYGVAPPIYNPALNPLMARPPIWPTPPAQAWYPQQVAYPQQPAVSVAPVVAGLPPQQPLFPIQNVPTPMTSAPANVLQSSFPMAPPGVPSPVAPQVSQPLFPVNTSTVNGAASSPFVASVAPGTIPASSPAAVGYGVNSQGTGGLAVGSSPAVSNNKASGNQPATNEVYLVWDDEAMSMEERRLSLPKYQVHDETSQMNSVDAAIDRRISESRLAGRMAL

SEQ ID NO: 83018 - protein, 78 aa, Setaria italica
  Transcript Sequence Number=SeqID_17044
TKELLQPWPPPPDPEPPPTAPPADPTPLPAPPPLLPLASPYPPPPPTALPERPTPLPPPEPPPPSPPPTPTPPPPPPP

SEQ ID NO: 83019 - protein, 199 aa, Setaria italica
  Transcript Sequence Number=SeqID_17045
  Gene Ontology: Mol. function=oxidoreductase activity, acting on the CH-OH group of donors, NAD or NADP as acceptor; Biological process =metabolic process
  Homolog annotation: Hit_ID=B4FA28; Match level="QueryCoverage=100%, HitCoverage=64%, E-value=2e-75, Identity=73%"; Hit description =Glyoxylate reductase
  Pfam annotation: Domain name=2-Hacid_dh_C; Domain location=1-166; Score=209.3; E_value=1e-59; Accession=PF02826.11; Description=D -isomer specific 2-hydroxyacid dehydr
RRVAAAEAYLRRGRWATDGKYPLATKVSGKRVGIVGLGRIGSLVARRLAAFGCPVAYHSRLPRPSSPYAFFPTVVALAAESDVLVLSCALTEETRHMVNREVMEALGGGGVLVNVGRGGLVDEPELVRCLREGIIAGAGLDVYDKEPDVPPELFAMENVVLSDHRAVLTPESMAAALDIVSVNLEAFFAGRPLLSPVTL

SEQ ID NO: 83020 - protein, 85 aa, Setaria italica
  Transcript Sequence Number=SeqID_17046
  Subcellular localization annotation: CTP_CleavageSite=26; ConfidenceScore=5.16e-01
PRLRSRTAPLLLVILVAVFAVTELLRTSSRGGLPASTRRLGSSHAKANHSVAQRKILLDPDFTPRLPRQSPLSLSLSARNALPPP

SEQ ID NO: 83021 - protein, 353 aa, Setaria italica
  Transcript Sequence Number=SeqID_17047
  Gene Ontology: Mol. function=serine-type endopeptidase activity; Biological process=proteolysis
  Homolog annotation: Hit_ID=B6SW49; Match level="QueryCoverage=82%, HitCoverage=40%, E-value=1e-162, Identity=95%"; Hit description =Protease 2
  Pfam annotation: Domain name=Peptidase_S9_N; Domain location=53-352; Score=224.5; E_value=2.8e-64; Accession=PF02897.7; Description =Prolyl oligopeptidase, N-terminal beta-propeller domain
  Subcellular localization annotation: CTP_CleavageSite=21; ConfidenceScore=5.18e-01
MLRLLPRHLLPPRAHRAISPTASTLSRRRALLLVGFGCCRGPPPAHSYASMAPPPVAKKVPRQLVDHGDVRVDNYYWLRDDSRSDPDVLAHLRAENDYTAAVMSDAKQLEDEIYAEIRGRIKEDDIDAPLRKGQYYYYERTLTGKEYVQHCRRPVPTDAPITVHDVMPTGPDAPDEHIILDENVKAEGHDYYSIGAFKVSPNNKLVAYAEDTKGDEIYTVYIIDAESGEYVGQPLKGITSDIEWAGDDHLVYITMDSILRPDKVWLHKLESDQSSDACLYHEKDDTFSLGLQASESKKYLFVESGSKNTSFIFYLDTSKQNKELVVLTPRVSGIDTTASHRGNHFFITRRSVL

SEQ ID NO: 83022 - protein, 92 aa, Setaria italica
  misc_feature (75)..(75): Xaa can be any naturally occurring amino acid
  Transcript Sequence Number=SeqID_17048
  Gene Ontology: Mol. function=serine-type endopeptidase activity; Biological process=proteolysis
  Homolog annotation: Hit_ID=Q0WYN8; Match level="QueryCoverage=94%, HitCoverage=13%, E-value=2e-41, Identity=83%"; Hit description =Oligopeptidase B (Fragment)
PCPYFPILLWLQICIDPTFRGSRLSLVDRGFIYVIAHIRGGGEMGRKWYEDGKLLKKKNTFTDFIDCAEHLIKNXYCSKEKLCINGRSAGGL

SEQ ID NO: 83023 - protein, 488 aa, Setaria italica
  Transcript Sequence Number=SeqID_17049
  Gene Ontology: Mol. function=serine-type endopeptidase activity; Biological process=proteolysis
  Homolog annotation: Hit_ID=B6SW49; Match level="QueryCoverage=97%, HitCoverage=67%, E-value=0.0, Identity=90%"; Hit description =Protease 2
  Pfam annotation: Domain name=Peptidase_S15; Domain location=227-448; Score=-99.1; E_value=0.0096; Accession=PF02129.10; Description=X-Pro dipeptidyl-peptidase (S15 family)
  Pfam annotation: Domain name=Peptidase_S9; Domain location=264-482; Score=364.5; E_value=2e-106; Accession=PF00326.13; Description =Prolyl oligopeptidase family
  Pfam annotation: Domain name=Peptidase_S9_N; Domain location=1-205; Score=-132.5; E_value=7e-05; Accession=PF02897.7; Description=Prolyl oligopeptidase, N-terminal beta-propeller domain
  Pfam module annotation: Pfam domain module=Peptidase_S15::Peptidase _S9::Peptidase_S9_N; Domain location=227-448::264-482::1-205
VVLVVFYFILDEKDDTFSLGLQASESKKYLFVESGSKNTSFIFYLDTSKQNKELVVLTPRVSGIDTTASHRGNHFFITRRSDEFYNSELVACPLDNVAETTVLLPHRESVKIQEVQLFDNHIAVYERENGLPKVTLYRLPAIGESIGQLQGGRTIDFIDPTYAVDPEESEFHSSVLRFNYSSMRTPPSVYDYDMDSGVSVLKKIKPVLGGFDASNYVTERKWAAAADGTQIPMSVLYRKDLVKLDGSDPMLLYGYGSYEICIDPTFRGSRLSLVDRGFIYVIAHIRGGGEMGRKWYEDGKLLKKKNTFTDFIDCAEHLIKNKYCSKEKLCINGRSAGGLLMGAVLNMRPDLFKAAVAGVPFVDVVTTMLDPTIPLTTAEWEEWGDPRKEEYYYYMKSYSPVDNVAAQEYPNILVTAGLNDPRVMYSEPAKYVAKLRDLKTDGNLLLFKCELGAGHFSKSGRFEKLQEDAFTYAFILKALGMTPKMASV

SEQ ID NO: 83024 - protein, 209 aa, Setaria italica
  Transcript Sequence Number=SeqID_17050
  Gene Ontology: Mol. function=gamma-glutamyltransferase activity; Cellular component=integral to membrane; Biological process =glutathione biosynthetic process
  Homolog annotation: Hit_ID=Q5ZEJ5; Match level="QueryCoverage=97%, HitCoverage=33%, E-value=4e-85, Identity=78%"; Hit description =Putative gamma-glutamyl transpeptidase
  Pfam annotation: Domain name=G_glu_transpept; Domain location=2-206; Score=-172.3; E_value=3.2e-08; Accession=PF01019.13; Description =Gamma-glutamyltranspeptidase
SSVDVRAAGGIVTAGDLSGYRVEVSDAMRADAMGYTFLGMPPPSSGTVGMAMILNVLGGYKSLEFLKGFLGVHRLIEAIKHMLATRMDLGDPDFVNVTGDVAEMLSLPFADRIRQRIADNTTFPPGYYLPKWRQLDDHGTSHLCVVDSDRNAVAMTTTVNYYFGGKVLSPSTGIVLNNEMDDFSVPAVKLAPDHLPPAPANFIAPGKTA

SEQ ID NO: 83025 - protein, 68 aa, Setaria italica
  Transcript Sequence Number=SeqID_17051
  Pfam annotation: Domain name=DUF617; Domain location=2-67; Score= -67.4; E_value=2.9e-05; Accession=PF04759.5; Description=Protein of unknown function, DUF617
CTVVSPVGVPYGRSLLRYVVVARVERVVGSKDSEAFYMINPEEGGNAGDCGAGGGGAPELSIFLVRMK

SEQ ID NO: 83026 - protein, 113 aa, Setaria italica
  Transcript Sequence Number=SeqID_17052
TTRIINHKYEYITELKEYRHYRRNQLIISAGIAIRLLLCTQQWSLLSLHGGHASKNKLPLRARRCCSSGGHLRPRPAPPRHARALRPRLFFLSVLSFPFLRFFSFSFSFSFPF

SEQ ID NO: 83027 - protein, 97 aa, Setaria italica
  Transcript Sequence Number=SeqID_17053
  Gene Ontology: Mol. function=microtubule motor activity; Cellular component=microtubule associated complex; Biological process =microtubule-based movement
  Homolog annotation: Hit_ID=Q2QMU6; Match level="QueryCoverage=100%, HitCoverage=3%, E-value=1e-44, Identity=83%"; Hit description =Kinesin motor domain containing protein, expressed
GFSTAGRGAPLSLGPATLVNSAEVPHFELREDPSFWMDNNVQVVIRVRPLNNNEKNLHSYNRCLKQESAQSITWIGQPETRFTFDHVACETVDQEVL

SEQ ID NO: 83028 - protein, 103 aa, Setaria italica
  Transcript Sequence Number=SeqID_17054
EYSQEQALRLLNIALLCTNTSPTQRPRMSSVVKMLCGQIPIEVVPDDDDLSEDLRLNIARSHSSMNNSKTDWSEMPSSDPSILLHNSKDSGYLPSSSSSSLKL

SEQ ID NO: 83029 - protein, 297 aa, Setaria italica
  misc_feature (255)..(255): Xaa can be any naturally occurring amino acid
  misc_feature (284)..(284): Xaa can be any naturally occurring amino acid
  Transcript Sequence Number=SeqID_17055
  Gene Ontology: Mol. function=protein serine/threonine kinase activity; Biological process=protein amino acid phosphorylation
  Homolog annotation: Hit_ID=Q49N12; Match level="QueryCoverage=100%, HitCoverage=28%, E-value=1e-86, Identity=55%"; Hit description =Putative receptor-like protein kinase 2
  Pfam annotation: Domain name=Pkinase; Domain location=134-297; Score=- 0.8; E_value=1.9e-08; Accession=PF00069.17; Description=Protein kinase domain
  Pfam annotation: Domain name=Pkinase_Tyr; Domain location=134-297; Score=-29.4; E_value=8.9e-12; Accession=PF07714.9; Description =Protein tyrosine kinase
  Pfam module annotation: Pfam domain module=Pkinase::Pkinase_Tyr; Domain location=134-297::134-297
EAGGAHRAITKTFAANITDNTLEIHLYWGGKGTTAIPYRGVYGPLISAISVTHTRRNHHGVSIGVVIAIVIAVTCLVIILMFIAFYFKVFQRMNAKGKGRHSFYKGRKTNTSELQNTGTVFFSMKEIESATRHFDPANKIGEGGFGPVYKGTLSDGTTVAVKKLSSKSSQGNREFLNEIGIISALRHPNLVRLFGCCIDGDQLLLIYEFLENNSLGRALFGRSEHQLKLDWPTRYSICLGTAKGLFYLHEESTLXKIVHRDIKPSNILLDEKLQPKISDFGLAXKLNDDCGRVSTRI

SEQ ID NO: 83030 - protein, 728 aa, Setaria italica
  misc_feature (33)..(33): Xaa can be any naturally occurring amino acid
  misc_feature (173)..(173): Xaa can be any naturally occurring amino acid
  misc_feature (408)..(408): Xaa can be any naturally occurring amino acid
  Transcript Sequence Number=SeqID_17056
  Gene Ontology: Mol. function=protein serine/threonine kinase activity; Biological process=protein amino acid phosphorylation
  Homolog annotation: Hit_ID=C0LGG9; Match level="QueryCoverage=91%, HitCoverage=77%, E-value=0.0, Identity=50%"; Hit description=Leucine- rich repeat receptor-like protein kinase (Fragment)
  Pfam annotation: Domain name=LRR_1; Domain location=31-53; Score =14.2; E_value=0.55; Accession=PF00560.25; Description=Leucine Rich Repeat
  Pfam annotation: Domain name=LRR_1; Domain location=55-78; Score =12.8; E_value=1.1; Accession=PF00560.25; Description=Leucine Rich Repeat
  Pfam annotation: Domain name=Pkinase; Domain location=405-662; Score =94.7; E_value=3.2e-25; Accession=PF00069.17; Description=Protein kinase domain
  Pfam annotation: Domain name=Pkinase_Tyr; Domain location=409-662; Score=55.2; E_value=2.1e-17; Accession=PF07714.9; Description =Protein tyrosine kinase
  Pfam annotation: Domain name=SKG6; Domain location=323-363; Score =13.2; E_value=0.023; Accession=PF08693.2; Description=Transmembrane alpha-helix domain
  Pfam module annotation: Pfam domain module=LRR_1::LRR_1::Pkinase::Pkin ase_Tyr::SKG6; Domain location=31-53::55-78::405-662::409-662::323-363
VQANTLQNALHLTEVVLEIAYMVYYLGRMQYLXVLDISFNKLTGQVPANFGGMMALQYLYLTDNMLTGDLPAWMLKNKASNKVNMDISYNNFTGNPPSECQQANVNMVSSFSSSNDNSLQSCLRKNLPCMGKSHYSNLFINCGGKTVVVNGVTYKDDSYQIGTSTFVLSNDRXWAYSSTGDFVGNENADYIARNTSELTLAHPELYTEARLASLSLKYYGLCMDNGEYMVKLHFAEIVFTEDHTYSSNGKRVFDVFIQGAKVLGDFNIQDEAGGVRRAITKYFATNITENTLEIHLYWGGKGSTAIPYRGMYGPLISAISVTQTRRNHRGVSTGVVIAIIAVPCLAVILLLIACYFKIWKRKNVIGRQFCNQGRKTTISELQTRAQYFFTLKEIEHATKHFDPANKIXGTLADGTAIAVKKLSSKSSQGNREFLNETGIISTLRHPNLVRLFGCCIDGDQLLLIYEFLENNSLGRALFGRAEHKLKLDWPTRYNICLGTAKGLVYLHEESTLKIIHRDIKPSNILLDEKLQPKISDFGLAKLNDDSGPVSTRIAGTVGYMAPEYATRGCLTRKADIYSYGVVTLEIVSGMSNTNSVSNEEYLHLLDWAEGLKQQGRLLEVVDRRLGSDYSQEQALRLLNVALLCTSTLPTQRPRMSSVVKMLCGQIPIEVSPDDADLIEDLHIAQPHHSLNNSQIDWSQIPSSDCSILLHDSKDSGCLPSSSSSSLKL

SEQ ID NO: 83031 - protein, 225 aa, Setaria italica
  Transcript Sequence Number=SeqID_17057
  Gene Ontology: Mol. function=protein binding; Cellular component =Golgi transport complex; Biological process=protein transport
  Homolog annotation: Hit_ID=B9RQS5; Match level="QueryCoverage=99%, HitCoverage=38%, E-value=1e-92, Identity=79%"; Hit description =Conserved oligomeric Golgi complex component, putative
  Pfam annotation: Domain name=Dor1; Domain location=1-225; Score =141.6; E_value=2.4e-39; Accession=PF04124.4; Description=Dor1-like family
DGQEPELLRVDAERVRRQMQEVAVENYAAFIAASEALSFVRAQLEGFDSHLEALIEEIPNLTSGCTEFVESAQQILEERKLNQTLLANHSTLLDLLEIPQLMDTCIRNGNYDEALDLEAFVSKISKLHPDLPVIQGLAAEVKKTVQSLISQLLQKLRSNIQLPECLRIVAHLRRIGVFSESELRLQFLRCREAWLSGILEDLDQRNVYDYLKGMVTCHRVHLFDV

SEQ ID NO: 83032 - protein, 463 aa, Setaria italica
  Transcript Sequence Number=SeqID_17058
  Gene Ontology: Mol. function=protein binding; Cellular component =Golgi transport complex; Biological process=protein transport
  Homolog annotation: Hit_ID=B9RQS5; Match level="QueryCoverage=88%, HitCoverage=71%, E-value=1e-172, Identity=72%"; Hit description =Conserved oligomeric Golgi complex component, putative
  Pfam annotation: Domain name=Dor1; Domain location=1-224; Score =165.4; E_value=1.7e-46; Accession=PF04124.4; Description=Dor1-like family
GNACRCIRNGNYDEALDLEAFVSKISKLHPDLPVIQGLAAEVKKTVQSLISQLLQKLRSNIQLPECLRIVAHLRRIGVFSESELRLQFLRCREAWLSGILEDLDQRNVYDYLKGMVTCHRVHLFDVVNQYRAIFNNDKSGNEENYDGGLLFSWAMQQVSNHLTTLQVMLPNITEGGSLSNILDQCMYCAMGLGLVGLDFRGLLPPIFENAVLNLFSKNMSTAVENFQVVLDSHRWVPMPSVGFVANGVVDETSDDVTPPSVLMEHPPLAVFVNGVSAAMNELRPCAPLSLKHVLAQEVVKGLQAVSDSLVRYNAMRMLRGNESALFLSLCQAFIEVVHPYCAACFGRCYPNGATLITECQSTFNGVSQLLTVPARSNSSSIERRQSGGIDRKQSGNIERKQSGSIERRQSGGIERKQSIESAGSTVTDNGLPTDGSVSEVNSDAATPASAVQDGAQTSPPSSK

SEQ ID NO: 83033 - protein, 67 aa, Setaria italica
  Transcript Sequence Number=SeqID_17059
  Subcellular localization annotation: CTP_CleavageSite=48; ConfidenceScore=5.78e-01
RYTSPLLSSSFLPSVPRSKSPASLSSLDSSPLPPSRSCSPVPTPRPLSCSQLASLILGLRVSDLAAS

SEQ ID NO: 83034 - protein, 292 aa, Setaria italica
  Transcript Sequence Number=SeqID_17060
  Gene Ontology: Mol. function=protein binding; Cellular component =integral to membrane; Biological process=protein amino acid phosphorylation
  Homolog annotation: Hit_ID=B6U792; Match level="QueryCoverage=100%, HitCoverage=55%, E-value=1e-127, Identity=76%"; Hit description =Protein binding protein
  Pfam annotation: Domain name=LRRNT_2; Domain location=135-174; Score =29.1; E_value=1.8e-05; Accession=PF08263.4; Description=Leucine rich repeat N-terminal domain
  Pfam annotation: Domain name=LRR_1; Domain location=180-202; Score =9.8; E_value=4.1; Accession=PF00560.25; Description=Leucine Rich Repeat
  Pfam annotation: Domain name=LRR_1; Domain location=204-225; Score =9.3; E_value=5.1; Accession=PF00560.25; Description=Leucine Rich Repeat
  Pfam annotation: Domain name=LRR_1; Domain location=227-249; Score =11.4; E_value=2; Accession=PF00560.25; Description=Leucine Rich Repeat
  Pfam annotation: Domain name=LRR_1; Domain location=251-274; Score =11.5; E_value=1.9; Accession=PF00560.25; Description=Leucine Rich Repeat
  Pfam module annotation: Pfam domain module=LRRNT_2::LRR_1::LRR_1::LRR_ 1::LRR_1; Domain location=135-174::180-202::204-225::227-249::251-274
PDSKHAVSSTQNVTSADFWNLPPPNVFNTAFVAEQDAPLVLQWPPMPVQNDSYYVALYFADTLPENSRTFNVYINDYLFIGDLTVTSAGLSVFATQWILSGLTRVILQPASPSALPPLINAGEVFGLFPLGRLTYARDVRALESIKKNLQNVPEDWNGDPCMPSGYSWTGVTCDEGSRIRVISLNLSGMGLSGSISPEIASLTALTNISFGHNSLLGPIPDLSNLSKLERLHLQENNLSGSVPRTLGTINTLRELFLYSNSLSGPVPDNLLNKQGLTYRFLPGNLFAPPPPH

SEQ ID NO: 83035 - protein, 281 aa, Setaria italica
  Transcript Sequence Number=SeqID_17061
  Gene Ontology: Mol. function=thymidine kinase activity; Cellular component=cytoplasm; Biological process=DNA replication
  Homolog annotation: Hit_ID=B6TJV8; Match level="QueryCoverage=83%, HitCoverage=83%, E-value=1e-124, Identity=90%"; Hit description =Thymidine kinase
  Pfam annotation: Domain name=TK; Domain location=77-254; Score=250.1; E_value=5.4e-72; Accession=PF00265.10; Description=Thymidine kinase
  Pfam annotation: Domain name=cobW; Domain location=78-228; Score= -63.3; E_value=0.005; Accession=PF02492.11; Description=Cobalamin synthesis proteinP47K
  Pfam module annotation: Pfam domain module=TK::cobW; Domain location =77-254::78-228
  Subcellular localization annotation: CTP_CleavageSite=72; ConfidenceScore=5.40e-01
MRSICAMRSLLAAAAAASAPKVLRAGAFPLLPPLLSLPLRRGRAARNMLGAARTVSAAAQSRLGGGAAMDVRAAQSGEIHVIVGPMFAGKTTALLRRVQAEAGGGRSVVLIKSDKDNRYGLDSVVTHDGTKMACWALSELSSFHDKLGMEAYDKVDVIGIDEAQFFDDLYDFCCKAADRDGKIVVVAGLDGDYKRKKFGSVLDVVPLADSVTKLTARCELCGRRAFFTLRKTQETKTELIGGADVYMPVCRHHYLDGQVVIEATRVVLGLDRSTVTAQALK

SEQ ID NO: 83036 - protein, 70 aa, Setaria italica
  Transcript Sequence Number=SeqID_17062
  Homolog annotation: Hit_ID=B6T0U0; Match level="QueryCoverage=100%, HitCoverage=82%, E-value=5e-18, Identity=68%"; Hit description=Wound induced protein
VGAVEALKDQAGLCRWNYALRSIPRTAKANAPSFAQAKKLAPAAVAERRRADKAEEGMRTVMYLSCWGPN

SEQ ID NO: 83037 - protein, 37 aa, Setaria italica
  Transcript Sequence Number=SeqID_17063
PASRRMPRKVVSGPDYDDEYDDYDEYDDDYDEYDDTG

SEQ ID NO: 83038 - protein, 179 aa, Setaria italica
  Transcript Sequence Number=SeqID_17064
  Homolog annotation: Hit_ID=Q1H8M6; Match level="QueryCoverage=92%, HitCoverage=62%, E-value=3e-45, Identity=49%"; Hit description =Cytochrome B561-related protein
NSEQSYKIAQPLELTPKLSLQLKLHAFLLWSSVGFLMPIGVLLIRASSNVKTAKSVKLLFYFHVGSQIVAVVLATAGAVLSISNFENAFNNTHQRIGLALYGFIWLQPLIGFLRPDRGMRFRSAWYLTHWLLGIGICVVGVANVYIGLHTYQERTGRSARLWTVLLTVEVAAMAFVYLV

SEQ ID NO: 83039 - protein, 50 aa, Setaria italica
  Transcript Sequence Number=SeqID_17065
RHLSEACAAFYGALFSHAARLRATVRRRRRGGESLLDEYLRNALLTTPSD

SEQ ID NO: 83040 - protein, 83 aa, Setaria italica
  Transcript Sequence Number=SeqID_17066
  Gene Ontology: Mol. function=sucrose synthase activity; Biological process=sucrose metabolic process
YTFWKTLNKEERAAKQRYLQMFYNLQFRNLAKTVPRVFEHPPQTPAGAGPSTVAVVRPKERKPQTRIQRIMTSLMGNKSSTSD

SEQ ID NO: 83041 - protein, 80 aa, Setaria italica
  Transcript Sequence Number=SeqID_17067
  Gene Ontology: Mol. function=transferase activity, transferring glycosyl groups; Biological process=metabolic process
  Homolog annotation: Hit_ID=Q852C2; Match level="QueryCoverage=100%, HitCoverage=16%, E-value=7e-24, Identity=67%"; Hit description =Putative UDP-glucosyltransferase
IFQAANCLGVPTLALRTGSAVSFACFTAYPMLCEKGYLPVQDSQLDTPVVELPPYRVRDLMDIGKDGHEVECEMMARAVA

SEQ ID NO: 83042 - protein, 446 aa, Setaria italica
  misc_feature (182)..(182): Xaa can be any naturally occurring amino acid
  Transcript Sequence Number=SeqID_17068
  Gene Ontology: Mol. function=transferase activity, transferring glycosyl groups; Biological process=metabolic process
  Homolog annotation: Hit_ID=Q852C2; Match level="QueryCoverage=94%, HitCoverage=84%, E-value=1e-166, Identity=71%"; Hit description =Putative UDP-glucosyltransferase
  Pfam annotation: Domain name=UDPGT; Domain location=22-443; Score= -82.7; E_value=6e-07; Accession=PF00201.10; Description=UDP -glucoronosyl and UDP-glucosyl transferase
MTPPPAPTMAAESNANHGGRHRHVLLFPLPYQGHINPMFRLAGVLHARGFAVTVFHTHFNAPDPASHPHYRFVPVPDGMSGPDPVAIEDVVAHIVSIGGACEAAFRDRLAAVLEEYSRDAVACLVADAHLLPIFQAANCLGVPTLALRTGSAVSFACFTAYPMLCEKGYLPVQGTPSSSSTXFVAYQVHAHVIHGSTCSCFVPADSQLDTPVVELPPCRVRDLMGIGKDGHEVLCEMMARAVAAVKASSGLILNTFDALERRELEGLRQDLAVPVFDIGPLHKFYPAGDSSLLCQDRSCLEWLDAWPPEWVLYVSFGSLACMSLRDLEETAWGIAGSGVPFLWVVRPGLVGGCAENHLPERFEAATRGRGMVVGWAPQEEVLRHRAVGGFWTHNGWNSTTESICEGVPMLCRPYFADQMGNARYVEHVWEVGFEVSGELERGSVEA

SEQ ID NO: 83043 - protein, 209 aa, Setaria italica
  Transcript Sequence Number=SeqID_17069
  Homolog annotation: Hit_ID=B6T7H3; Match level="QueryCoverage=100%, HitCoverage=100%, E-value=1e-109, Identity=89%"; Hit description =EREBP-4 like protein
  Pfam annotation: Domain name=DUF862; Domain location=10-147; Score =258.0; E_value=2.2e-74; Accession=PF05903.6; Description=Eukaryotic protein of unknown function (DUF862)
MGGRNSAAATPVLLNVYDLTAANDYLYWLGFGVFHSGIEVHGTEYGFGAHDFPSSGVFEVESKTCPGFVYRRTVWLGTTDMSQEEFRTFIEKLAGKYHGNTYHLISKNCNHFTDDVCQNLTGKPIPSWVNRLARVGSVFDCLLPESVQVSPVGRVPTLRQNSDDELHSIHSPIIEDSDNDEDEAKHLLPTPANDMHSVDVPPKLAKDLL

SEQ ID NO: 83044 - protein, 156 aa, Setaria italica
  Transcript Sequence Number=SeqID_17070
  Subcellular localization annotation: CTP_CleavageSite=36; ConfidenceScore=5.42e-01
SPCPWPTRGPGLSSPPASRLCFDACARPVRPHCLVRSATRPHQPINRRVASFPPPARPDSPRLASPSRQKKPGCSRHPKPQPPPLRPPTPRRRPRSARTPHSLASPPPPALPPLCGEGSCEGGPHFLGGTAGGGIVPHCGAARLVGLSGWLAVSRR

SEQ ID NO: 83045 - protein, 94 aa, Setaria italica
  Transcript Sequence Number=SeqID_17071
  Gene Ontology: Mol. function=calcium ion binding; Cellular component =plasma membrane; Biological process=abscisic acid mediated signaling
  Homolog annotation: Hit_ID=Q7XC27; Match level="QueryCoverage=82%, HitCoverage=36%, E-value=1e-36, Identity=97%"; Hit description =Calcineurin B-like protein 1
  Pfam annotation: Domain name=efhand; Domain location=20-48; Score =20.4; E_value=0.0077; Accession=PF00036.24; Description=EF hand
  Pfam annotation: Domain name=efhand; Domain location=57-85; Score =18.5; E_value=0.027; Accession=PF00036.24; Description=EF hand
  Pfam module annotation: Pfam domain module=efhand::efhand; Domain location=20-48::57-85
INKEEFQLALFKNQRKENLFANRIFDLFDVKKRGVIDFGDFVRALNVFHPNIPMEEKIDFSFKLYDMDGTGFIERKEVIAGLFLDLCFCACFLI

SEQ ID NO: 83046 - protein, 213 aa, Setaria italica
  Transcript Sequence Number=SeqID_17072
  Gene Ontology: Mol. function=calcium ion binding; Cellular component =plasma membrane; Biological process=abscisic acid mediated signaling
  Homolog annotation: Hit_ID=Q7XC27; Match level="QueryCoverage=100%, HitCoverage=100%, E-value=1e-113, Identity=93%"; Hit description =Calcineurin B-like protein 1
  Pfam annotation: Domain name=efhand; Domain location=108-136; Score =26.5; E_value=0.00011; Accession=PF00036.24; Description=EF hand
  Pfam annotation: Domain name=efhand; Domain location=152-180; Score =25.6; E_value=0.0002; Accession=PF00036.24; Description=EF hand
  Pfam annotation: Domain name=efhand; Domain location=71-99; Score =20.4; E_value=0.0077; Accession=PF00036.24; Description=EF hand
  Pfam module annotation: Pfam domain module=efhand::efhand::efhand; Domain location=108-136::152-180::71-99
MGCFHSTAKRQHPGYEDPVHLASQTAFSVSEVEALFELFKSISGSVIDDGLINKEEFQLALFKNQRKENLFANRIFDLFDVKKRGVIDFGDFVRALNVFHPNIPMEEKIDFSFKLYDMDGTGFIERKEVKQMLIALLGESEMRLSDEIIETILDKTFSDADANQDGKIDRAEWENFVTRNPSLMKIMTLPYLKDITTTFPSFVFNSEVDDLVT

SEQ ID NO: 83047 - protein, 107 aa, Setaria italica
  Transcript Sequence Number=SeqID_17073
  Gene Ontology: Cellular component=anchored to membrane
TPTAAVKDLEKSCRNASYSGCCCLHCWIMQLKGNVSREVTGGDRARRMLGRDCQLMGLTWLLAKNKTAYIPTVSAVLRAMLYTAHPTESGSGGAAPRCSPDQENMPL

SEQ ID NO: 83048 - protein, 54 aa, Setaria italica
  Transcript Sequence Number=SeqID_17074
  Gene Ontology: Mol. function=DNA binding; Cellular component=nucleus; Biological process=regulation of transcription, DNA-dependent
  Homolog annotation: Hit_ID=Q9SJL7; Match level="QueryCoverage=100%, HitCoverage=18%, E-value=4e-24, Identity=88%"; Hit description =Transcription factor RAX2
MGRAPCCDKNNVKKGPWSPEEDAKLKEFIEKHGTGGNWIALPQKAGLRRCGKSC

SEQ ID NO: 83049 - protein, 97 aa, Setaria italica
  Transcript Sequence Number=SeqID_17075
CPYIDKRKMFFLCNISCCIFLLPFQAFLWSVLSITKSYILATQDLQWPVVVVTIHSGAISLRNKVYEILIRSTCVIHAGLACPTGRSSSNKTSFLVL

SEQ ID NO: 83050 - protein, 97 aa, Setaria italica
  Transcript Sequence Number=SeqID_17076
RYEAIRKIHKGRRVDGDGSRLGTPQKCLSIIGKADGHAFLECHPEYSPDWSDLMDFVECEEGRDYSNTLKQQRKFRKFKYEKKWSRKRQSNMEWFLT

SEQ ID NO: 83051 - protein, 265 aa, Setaria italica
  misc_feature (96)..(97): Xaa can be any naturally occurring amino acid
  misc_feature (125)..(125): Xaa can be any naturally occurring amino acid
  misc_feature (208)..(208): Xaa can be any naturally occurring amino acid
  misc_feature (228)..(228): Xaa can be any naturally occurring amino acid
  Transcript Sequence Number=SeqID_17077
SGDKAGGFVQGERPGGAAAHRQVLGAGVAAADGGGAAQRPFPAGRRRLLRSRRRLQRDVQLPPPACLSGPPPPRRQQRLHGEQRRRQVGLRGRRRXXREHVPWHRPAVQRARGRRARRGRRHHHXGQEDGGRQHLPPAAHRRQRRHRDCPEHLLPLRRRCGHGAERGDGDGGGAGHHGPRGDPHRRDDRRRGRRAAAALEAGSRHGRXTTATAMVTPRMTRTRRRRGXLLQELPVHCRVLRRVVARRLHVGSGTPWLPVRGAARP

SEQ ID NO: 83052 - protein, 153 aa, Setaria italica
  Transcript Sequence Number=SeqID_17078
  Gene Ontology: Mol. function=nucleic acid binding; Cellular component= nucleus; Biological process=regulation of transcription, DNA-dependent
  Homolog annotation: Hit_ID=Q67W65; Match level="QueryCoverage=99%, HitCoverage=8%, E-value=6e-52, Identity=67%"; Hit description =Transcription initiation factor TFIID subunit 1
EIFGIQEPVRKVKTDHHKRPVNKELQISNVADSVEEDEEIILRSTTIQNFSTLKHIQMNEDFVETDSDESVADVTLRLKDSCLSEQPMKVAHTVQRSPVCPDFYPLEHDDWENDIIWNNSPSNDCQPYAKICESEESVDTHGEDQAKGLWSGL

SEQ ID NO: 83053 - protein, 106 aa, Setaria italica
  Transcript Sequence Number=SeqID_17079
TSDKSYTDFVREACTEQQFDAYSIYCNPASKEEFIISTMGLICEQFCSKSKRLTRPASTKRAISMLDMGTAREPSSFDLSSREVMKRADWSWPLPWGRLEPLPVTI

SEQ ID NO: 83054 - protein, 109 aa, Setaria italica
  Transcript Sequence Number=SeqID_17080
  Gene Ontology: Mol. function=protein binding; Biological process=cell division
  Homolog annotation: Hit_ID=Q7XC35; Match level="QueryCoverage=85%, HitCoverage=38%, E-value=2e-20, Identity=58%"; Hit description =Cyclin-P4-1
PVKFMDDVRYNNAYFARVGGISLPEMNYLEVDFLFAVGFDLNVSPETFGHYCTVLQAEMLSLELGKTPPPTTMTTPAAAGPRLHSCCLSEDDGATSSSASGSSQQQLAA

SEQ ID NO: 83055 - protein, 55 aa, Setaria italica
  Transcript Sequence Number=SeqID_17081
LKRKILLLLFSRTCRFIRENSWSNKHFTGKLLVHEFSLINLHVLKRKDLVNFSFG

SEQ ID NO: 83056 - protein, 210 aa, Setaria italica
  misc_feature (66)..(66): Xaa can be any naturally occurring amino acid
  Transcript Sequence Number=SeqID_17082
  Gene Ontology: Mol. function=homocysteine S-methyltransferase activity; Biological process=methionine biosynthetic process
  Homolog annotation: Hit_ID=Q9FUM9; Match level="QueryCoverage=95%, HitCoverage=59%, E-value=1e-108, Identity=94%"; Hit description =Homocysteine S-methyltransferase 2
  Pfam annotation: Domain name=S-methyl_trans; Domain location=1-210; Score=61.7; E_value=2.7e-15; Accession=PF02574.8; Description =Homocysteine S-methyltransferase
VHMDYLEAGANIIITASYQATIQGFESKGFSKEQSENLLTKSVEIALEAREMFLKEHLEQSTPTQXPILVAASIGSYGAYLADGSEYSGDYGEAGTVQFLKDFHRRRLQVLAEAAPDLIAFETIPNKLEAQAYVELLEECNIHIPAWFSFNSKDGVHIVSGDSLIECATIADKCAKVGAVGINCTPPRFIHGLILSIRKVSTTLCPSIQI

SEQ ID NO: 83057 - protein, 309 aa, Setaria italica
  Transcript Sequence Number=SeqID_17083
  Gene Ontology: Mol. function=homocysteine S-methyltransferase activity; Biological process=methionine biosynthetic process
  Homolog annotation: Hit_ID=Q9FUM9; Match level="QueryCoverage=100%, HitCoverage=91%, E-value=1e-173, Identity=94%"; Hit description =Homocysteine S-methyltransferase 2
  Pfam annotation: Domain name=S-methyl_trans; Domain location=13-309; Score=355.8; E_value=8e-104; Accession=PF02574.8; Description =Homocysteine S-methyltransferase
AVRRWVEAGGGRLVLDGGLATELEANGADLNDPLWSAKCLLASPHLIRKVHMDYLEAGANIIITASYQATIQGFESKGFSKEQSENLLTKSVEIALEAREMFLKEHLEQSTPTQKPILVAASIGSYGAYLADGSEYSGDYGEAGTVQFLKDFHRRRLQVLAEAAPDLIAFETIPNKLEAQAYVELLEECNIHIPAWFSFNSKDGVHIVSGDSLIECATIADKCAKVGAVGINCTPPRFIHGLILSIRKVTDKPILIYPNSGERYDGEKKEWVECTGVSDGDFVSYVSEWCKDGAALIGGCCRTTPNTIR

SEQ ID NO: 83058 - protein, 121 aa, Setaria italica
  Transcript Sequence Number=SeqID_17084
  Gene Ontology: Mol. function=homocysteine S-methyltransferase activity; Biological process=methionine biosynthetic process
  Homolog annotation: Hit_ID=Q9FUM9; Match level="QueryCoverage=90%, HitCoverage=32%, E-value=7e-53, Identity=87%"; Hit description =Homocysteine S-methyltransferase 2
FFVFVIVVLQICTIADKCAKVGAVGINCTPPRFIHGLILSIRKVTDKPILIYPNSGERYDGEKKEWVECTGVSDGDFVSYVSEWCKDGAALIGGCCRTTPNTIRAIQRTLNQGSNARFTMA

SEQ ID NO: 83059 - protein, 66 aa, Setaria italica
  Transcript Sequence Number=SeqID_17085
  Gene Ontology: Mol. function=acetate-CoA ligase activity; Biological process=metabolic process
  Homolog annotation: Hit_ID=B9RGS6; Match level="QueryCoverage=80%, HitCoverage=7%, E-value=9e-24, Identity=92%"; Hit description=Acetyl- CoA synthetase, putative
TAWRWFYDVIGDSRCPISDTWWQTETGGFMITPLPGAWPQKPGSATFPFFGVQGGKWRRMQWISFP

SEQ ID NO: 83060 - protein, 39 aa, Setaria italica
  Transcript Sequence Number=SeqID_17086
  Gene Ontology: Mol. function=acetate-CoA ligase activity; Biological process=metabolic process
  Homolog annotation: Hit_ID=Q8LPV1; Match level="QueryCoverage=82%, HitCoverage=13%, E-value=3e-11, Identity=100%"; Hit description =Acetyl CoA synthetase (Fragment)
PVIVDEKGQEIEGECSGYLCIKKSWPGAFRTLMISIESP

SEQ ID NO: 83061 - protein, 77 aa, Setaria italica
  Transcript Sequence Number=SeqID_17087
  Gene Ontology: Mol. function=acetate-CoA ligase activity; Cellular component=cytoplasm; Biological process=metabolic process
  Homolog annotation: Hit_ID=Q9ZR69; Match level="QueryCoverage=74%, HitCoverage=9%, E-value=1e-18, Identity=77%"; Hit description=Acetyl- CoA synthetase
PSDDGKLTYSELLDQVCQLANYLKSVGVGKGDAVVIYLPMLMELPIAMLACARINSILCTFNQSSVNYIFERDGFQP

SEQ ID NO: 83062 - protein, 61 aa, Setaria italica
  Transcript Sequence Number=SeqID_17088
  Gene Ontology: Mol. function=acetate-CoA ligase activity; Biological process=metabolic process
  Homolog annotation: Hit_ID=B9RGS6; Match level="QueryCoverage=100%, HitCoverage=8%, E-value=1e-27, Identity=96%"; Hit description=Acetyl- CoA synthetase, putative
IGAFAAPDKIHWAPGLPKTRSGKIMRRILRKIASRQLDELGDTSTLADPGVVDQLIALSDS

SEQ ID NO: 83063 - protein, 175 aa, Setaria italica
  misc_feature (62)..(62): Xaa can be any naturally occurring amino acid
  misc_feature (103)..(103): Xaa can be any naturally occurring amino acid
  misc_feature (138)..(138): Xaa can be any naturally occurring amino acid
  Transcript Sequence Number=SeqID_17089
  Gene Ontology: Mol. function=acetate-CoA ligase activity; Biological process=metabolic process
  Homolog annotation: Hit_ID=B9RGS6; Match level="QueryCoverage=99%, HitCoverage=23%, E-value=2e-90, Identity=89%"; Hit description =Acetyl-CoA synthetase, putative
YVSRYSRKSLRVLGSVGEPINPTAWRWFYDVIGDSRCPISDTWWQTETGGFMITPLPGAWPXKPGSATFPFFGVQPVIVDEKGREMEGECSGYLCIKKSWPGXAFRTLYGDQDRYETTYFKPFAGYYFSGDGCRRDKXGYHWLTGRVDDVINVSGHRIGTAEVESALVSHPKCAL

SEQ ID NO: 83064 - protein, 706 aa, Setaria italica
  misc_feature (483)..(483): Xaa can be any naturally occurring amino acid
  Transcript Sequence Number=SeqID_17090
  Gene Ontology: Mol. function=acetate-CoA ligase activity; Cellular component=intracellular membrane-bounded organelle; Biological process=metabolic process
  Homolog annotation: Hit_ID=B9RGS6; Match level="QueryCoverage=98%, HitCoverage=92%, E-value=0.0, Identity=82%"; Hit description=Acetyl -CoA synthetase, putative
  Pfam annotation: Domain name=AMP-binding; Domain location=162-606; Score=465.0; E_value=1.1e-136; Accession=PF00501.20; Description=AMP- binding enzyme
MGTANGEQPAAGASSDKLRHVESMSHLPSGAGKISGINAVVLGESLAAEENDLIFPSPEFSADALVSSPKQYREMYERSIKDPAGFWSEIADTFYWKEKWNPSEVCSENLDVTKGPVHISWFKGGKTNICYNAVDRNIESGNGDNIAMYWEGNEPGQDGKLTYSELLEKVCQLANYLKSVGVGKGDAVIIYLPMLLELPIAMLACARIGAVHSVVFAGFSADSLAQRIVDCKPKLVITCNAVKRGVKPILLKDIVDAALVESEKNGVSVGLCLTYENQSAMKREDTKWQAERDIWWQDVVTKFPTKCDVEWVDAEDPLFLLYTSGSTGKPKGVLHTSGGYMLYTATTFKYAFDYRPTDIYWCTADCGWITGHSYVTYGPLLNGATVLVFEGTPNYPDSGRCWDIVDKYNVTIFYTAPTLVRSLMRDGSEYVTRYSRKSLRVLGSVGEPINPSAWRWFYNIVGDSRCPISDTWWQTETGGFMIXPLPGAWPQKPGSATFPFFGVQPVIVDEKGQEIEGECSGYLCIKKSWPGAFRTLYGDHERYETTYFKPFAGYYFTGDGCSRDKDGYHWLTGRVDDVINVSGHRIGTAEVESALVSHPQCAEAAVVGVEHEVKGQGIYAFVTLVDGVPYSEELRKSLIVTVRNQIGAFAAPDKIHWAPGLPKTRSGKIMRRILRKIAARQLDELGDTSTLADPGVVDQLIALSDC

SEQ ID NO: 83065 - protein, 671 aa, Setaria italica
  misc_feature (496)..(496): Xaa can be any naturally occurring amino acid
  Transcript Sequence Number=SeqID_17091
  Gene Ontology: Mol. function=acetate-CoA ligase activity; Cellular component=intracellular membrane-bounded organelle; Biological process=metabolic process
  Homolog annotation: Hit_ID=B9RGS6; Match level="QueryCoverage=97%, HitCoverage=87%, E-value=0.0, Identity=84%"; Hit description=Acetyl -CoA synthetase, putative
  Pfam annotation: Domain name=AMP-binding; Domain location=126-571; Score=465.7; E_value=6.8e-137; Accession=PF00501.20; Description=AMP- binding enzyme
AVLGDPLPALDDDPGLLVHPSADFAAQALVSSTQQYREMYQRSIDDPAGFWSEIAEEFYWKQKWNPDAVCSENLDVTKGPIKIEWFKGGKTNICYNAVDRNVESGNGDKIAMYWEGNEPSDDGKLTYSELLDQVCQLANYLKSVGVGKGDAVVIYLPMLMELPIAMLACARIGAVHSVVFAGFSADAIAQRIIDCKPKVVITCNAVKRGLKAIPLKDIVDTALVESAKNGVDVGICLTYENQSALNKVDTRWKPGRDVWWQDVVPNFPTKCDVEWVDAEDPLFLLYTSGSTGKPKGVLHTTGGYMVYSATTFKHAFDYKPADVYWCTADCGWITGHSYVTYGPLLNGATVLVFEGAPNYPDPGRCWDIVDKYGVTIFYTAPTLIRSLMRDGTEYVSRYSRKSLRVLGSVGEPINPTAWRWFYDVIGDSRCPISDTWWQTETGGFMITPLPGAWPQKPGSATFPFFGVQPVIVDEKGREMEGECSGYLCIKKSWPGXAFRTLYGDQDRYETTYFKPFAGYYFSGDGCRRDKDGYHWLTGRVDDVINVSGHRIGTAEVESALVSHPKCAEAAVVGIDHEVKGQGIYAFVTLVDGVAYSDDLRKSLIMTVRGQIGAFAAPDKIHWAPGLPKTRSGKIMRRILRKIASRQLDELGDTSTLADPGVVDQLIALSDS

SEQ ID NO: 83066 - protein, 120 aa, Setaria italica
  misc_feature (79)..(79): Xaa can be any naturally occurring amino acid
  Transcript Sequence Number=SeqID_17092
  Gene Ontology: Mol. function=DNA binding; Biological process =regulation of transcription
  Homolog annotation: Hit_ID=Q10PU3; Match level="QueryCoverage=64%, HitCoverage=9%, E-value=2e-21, Identity=69%"; Hit description=No apical meristem protein, expressed
MRENFFQFPTMQKKEASYSTEKMLEEDAYTNDEGGSYCSRRRRKKTAMDSIETALDEDAPGLLQILLNRGISVEEIKLXYGAEEDSDMLPDSTESSFEDLENVIANVRCSLAVLSTTTDG

SEQ ID NO: 83067 - protein, 568 aa, Setaria italica
  Transcript Sequence Number=SeqID_17093
  Gene Ontology: Mol. function=DNA binding; Biological process =regulation of transcription
  Homolog annotation: Hit_ID=Q10PU3; Match level="QueryCoverage=100%, HitCoverage=77%, E-value=1e-151, Identity=47%"; Hit description=No apical meristem protein, expressed
QFHIRNTVKDEGEVVVSKFFESRNNPSELAGITPIEAKQDVSTPDDSREECTACFNPGICTETDELDHISLKERYRILLADKSSCPDTASARKSVMGVEASRTSSKRNNEGTACKEDICSMLQEISSAPPIIESNPMDDNNSRLLGENDPGFSSISVTSSRTDPSLCEAGCPRDPLEGSENQVGGSATCGSEHSELVVRKQCLLVADVKLEPALEDYEIGPSESPQENSTHAKGSVPSLGVKDELNESELPGICEKISFSFRQCRKRKASYSTEKMLEEDAYTNDEGGSYCSRRRRKKTAMDSIETALDEDAPGLLQILLNRGISVEEIKLYGAEEDSDMLPDSTESSFEDLENVIANIFPKRASLLKLSVARHEKGEKAIYCLSCLISLIEQSRYLQFRDCPVEWGWCRDLQSFIFVFRSHNRIVLERPEYGYATYFFEVVQSLPIEWQIRRLVIAMKLSGCGRTALIENRPLMVGEDLSEGEADVLQQYGWIRNTGLGTMVNYRDRVVHDRWTERSVVDWKAKIGKLLMSGYAEGQSITIHGPKNVADLLEATGDAEVDIKLEDPF

SEQ ID NO: 83068 - protein, 122 aa, Setaria italica
  Transcript Sequence Number=SeqID_17094
  Gene Ontology: Mol. function=coproporphyrinogen oxidase activity; Cellular component=chloroplast; Biological process=porphyrin biosynthetic process
  Homolog annotation: Hit_ID=Q7XPL2; Match level="QueryCoverage=100%, HitCoverage=30%, E-value=8e-63, Identity=90%"; Hit description =Coproporphyrinogen-III oxidase, chloroplastic
  Pfam annotation: Domain name=Coprogen_oxidas; Domain location=1-122; Score=34.5; E_value=4.6e-18; Accession=PF01218.10; Description =Coproporphyrinogen III oxidase
SYIIEEDVRHFHYVQKQTCDKFDSSFYPRFKKWCDEYFYIKHRGERRGVGGIFFDDLNDYDQETLLQFATECADSVLPAYIPIIERRKDIPFTEEHKAWQQLRRGRYVEFNLVYDRGTTFGL

SEQ ID NO: 83069 - protein, 111 aa, Setaria italica
  Transcript Sequence Number=SeqID_17095
  Gene Ontology: Mol. function=coproporphyrinogen oxidase activity; Cellular component=chloroplast; Biological process=porphyrin biosynthetic process
  Homolog annotation: Hit_ID=B9RXC7; Match level="QueryCoverage=90%, HitCoverage=25%, E-value=5e-49, Identity=91%"; Hit description =Coproporphyrinogen III oxidase, putative
  Pfam annotation: Domain name=Coprogen_oxidas; Domain location=1-111; Score=-17.2; E_value=7.6e-15; Accession=PF01218.10; Description =Coproporphyrinogen III oxidase
PKLCLLRCFPFISAECADSVLPAYIPIIERRKDIPFTEEHKAWQQLRRGRYVEFNLVYDRGTTFGLKTGGRIESILVSLPLTARWEYDHKPEVGSEEWKLLDTCINPKEWI

SEQ ID NO: 83070 - protein, 78 aa, Setaria italica
  Transcript Sequence Number=SeqID_17096
IWANWSTNRSDRFYKHCQISDWTSPLCRSHRGDRNAYVEHPIWSPDERVMALARFSPVLTGQTGWDGRSDRFDQPNAS

SEQ ID NO: 83071 - protein, 57 aa, Setaria italica
  Transcript Sequence Number=SeqID_17097
AMGFIVYISVPSFYRDGLHCSHFCAFILTAFRFPGLYDVYILEDLSAMQVLLRFTHL

SEQ ID NO: 83072 - protein, 525 aa, Setaria italica
  Transcript Sequence Number=SeqID_17098
  Gene Ontology: Mol. function=unfolded protein binding; Cellular component=cell wall; Biological process=cellular protein metabolic process
  Homolog annotation: Hit_ID=B9R8I3; Match level="QueryCoverage=100%, HitCoverage=99%, E-value=0.0, Identity=84%"; Hit description =Chaperonin containing t-complex protein 1, beta subunit, tcpb, putative
  Pfam annotation: Domain name=Cpn60_TCP1; Domain location=28-518; Score=581.6; E_value=8.9e-172; Accession=PF00118.16; Description=TCP- 1cpn60 chaperonin family
MERVLKDDAVEEKGERARMASFIGAMAIADLVKTTLGPKGMDKILQSTGRGRSVTVTNDGATILKSLHIDNPAAKVLVDISKVQDDEVGDGTTSVVVLAGELLRESEKLVNMKIHPMTIIAGFRMAAECARNALLQRTIDNKENTDKFRADLMNIAMTTLSSKILSQDKEYFAELAVDAVLRLKGSTNLEAIQILKKPGGSLKDSFLDEGFILDKKIGIGQPKRIENAKILVANTAMDTDKVKIYGARVRVDSMSKVADIEAAEKQKMREKVQKIIGHGINCFVNRQLIYNFPEELFADAGILAIEHADFEGIERLALVTGGEIASTFDNPESVKLGHCKVIEEIMIGEDRLIHFSGVEMGQACTIVLRGASEHVLDEAERSLHDALCVLSQTVNDTRVLFGGGWPEMVMAKEVDELARKTPGKKSHAIDAFSRALQAIPTTIADNAGLDSAEMISQLRAEHHKENCTAGIDVITGTVGDMQKLGIQESFKVKQAILLSATEAAEMILRVDEIITCAPRRREDRM

SEQ ID NO: 83073 - protein, 125 aa, Setaria italica
  misc_feature (98)..(98): Xaa can be any naturally occurring amino acid
  Transcript Sequence Number=SeqID_17099
  Homolog annotation: Hit_ID=B6TU07; Match level="QueryCoverage=85%, HitCoverage=21%, E-value=4e-20, Identity=53%"; Hit description =Cysteine-type peptidase
MPMAAVSREEVPCGEAGVSSNAEKEERERADAELRHLPDRELQEKKQRLQGMVTSGIRLPDGGRKLEATIDAIDREQDRRQARGGMARATGGDGCERXVRSRCAESSDTMKASHRHRMDQVGRKH

SEQ ID NO: 83074 - protein, 79 aa, Setaria italica
  misc_feature (20)..(20): Xaa can be any naturally occurring amino acid
  Transcript Sequence Number=SeqID_17100
  Homolog annotation: Hit_ID=B9R9Y4; Match level="QueryCoverage=86%, HitCoverage=16%, E-value=2e-14, Identity=57%"; Hit description =Catalytic, putative
MVGEDDAAAVRAEESVSGGXVDVWSDAVSSHDPDHLLVMVHGILGSTADWQYAANEFVKQLPDDVIVHCSEKNSSMLTL

SEQ ID NO: 83075 - protein, 132 aa, Setaria italica
  Transcript Sequence Number=SeqID_17101
  Gene Ontology: Mol. function=molecular_function; Cellular component =cellular_component; Biological process=biological_process
  Homolog annotation: Hit_ID=B6SRC4; Match level="QueryCoverage=84%, HitCoverage=85%, E-value=6e-53, Identity=93%"; Hit description=RAB5 -interacting protein isoform a
  Pfam annotation: Domain name=Rab5ip; Domain location=19-132; Score =204.2; E_value=3.5e-58; Accession=PF07019.4; Description=Rab5 -interacting protein (Rab5ip)
MAKARSSAKQSRAQAQAQQQNGGHALSSKLARYLDPEASWDKDQLLDAVHWIRQAVGLICGLLWGAVPLVGAVWIALFMAISTGIIYWYYAYVLKIDEEEYGGHGALLQEGLFASFTLFLLSWTLVYSLAHF

SEQ ID NO: 83076 - protein, 107 aa, Setaria italica
  Transcript Sequence Number=SeqID_17102
  Pfam annotation: Domain name=zf-LSD1; Domain location=63-88; Score =11.7; E_value=0.063; Accession=PF06943.4; Description=LSD1 zinc finger
  Subcellular localization annotation: CTP_CleavageSite=54; ConfidenceScore=5.03e-01
RCFAYHAGICPSQATSECATGPRRMMPRKTHITSDIFHLMFKFNTRPVGMASARAAAAAKSWCGHCGMSLAAPSRPGSSVRCTFCHRVTRVVEHHRGVGEGEGALAL

SEQ ID NO: 83077 - protein, 206 aa, Setaria italica
  Transcript Sequence Number=SeqID_17103
  Gene Ontology: Mol. function=hydrolase activity; Cellular component =endoplasmic reticulum membrane; Biological process=biological_process
  Homolog annotation: Hit_ID=B6TE78; Match level="QueryCoverage=100%, HitCoverage=74%, E-value=1e-111, Identity=97%"; Hit description =Gtk16 protein
  Pfam annotation: Domain name=SNARE_assoc; Domain location=46-167; Score=104.2; E_value=4.6e-28; Accession=PF09335.3; Description=SNARE associated Golgi protein
QILRLPRSLADVRLLKDNLAVYARDYQANFILGYCSIYIFMQTFMIPGTIFMSLLAGALFGVIKGGILVVFTATAGASSCYFVSKLIGRPLVSWLWPEKLRYFQSEIAKRKEKLLNYMLFLRITPTLPNTFISMASPIVDIPFHIFFAATLVGLIPASYITVKAGRALGDLKSVRELYDFKTLVVLFLIGSVAVAPAILKRKRTYE

SEQ ID NO: 83078 - protein, 741 aa, Setaria italica
  misc_feature (721)..(721): Xaa can be any naturally occurring amino acid
  Transcript Sequence Number=SeqID_17104
  Homolog annotation: Hit_ID=B2Z6N3; Match level="QueryCoverage=98%, HitCoverage=30%, E-value=1e-101, Identity=33%"; Hit description =Neuroblastoma-amplified gene
QIVFNKLQAINENIAGLDNLNFEHFNEEVCKNIHASTVTALADMVQALVSMYVDVLAKGLVSQQGVYKHYVLGLLASLEGRSEAGSNCTDYEKLQAFLCEIELNYDSCREYIQALPATDISYIIGRYCTLCFPSNLARSHPQEPSWKKPLATLLTFWSKLVDDIPGESIDASSYEMTEYLNSNRLSLCMGAFRQLLIHDEITVHQGWGAISMYVKDCLKSGMMVETSRFCRAMILSGCSFESVVEVYYGGQGQLGGESADPSNSLDLLELYNAATEECLSDLIEGSCEYQILFHQLLSSLSRSTGKHAGILEMVRSGVWGKLIRFSEDMQLESQLRVYALQLMQCITGRNLKTLPNEIVSQVEPWESWYEHGTGAAIADESINSSSTITGTLVALRSTQMVAAFLPDANITPESLATLDSAVSCFLQLSEHASAANVAVLEAVLEEWEQLFSPKEEHVPPHESPKETSDWSDGWDDGWEALPEELESPKNKQESAPLSVHPLHSCWMEIIRKRVELGELHKVIELLDRASSKHSVFLEEEEACSLVELMSALDCFMALKIVLLLPYETLRLQCLQMVELKMREGTVSTSSNADDHELLALVLTSGTMQKIAMEEAYSKFFSYLCHLVGHLARSFQTDLLMQWNDEATSKTNRSLLFGSILFPYFISELVLKGQYLLAAFVISRWMHTHPSLGLMDIAETSVRRFLQGQVAQAEESRGGDAXFTDDEVSVRLTISTLRSKFV

SEQ ID NO: 83079 - protein, 325 aa, Setaria italica
  Transcript Sequence Number=SeqID_17105
  Gene Ontology: Mol. function=hydrolase activity; Cellular component =integral to membrane; Biological process=metabolic process
  Homolog annotation: Hit_ID=B6T5H3; Match level="QueryCoverage=100%, HitCoverage=100%, E-value=1e-180, Identity=93%"; Hit description =Pyrimidine-specific ribonucleoside hydrolase rihA
  Pfam annotation: Domain name=IU_nuc_hydro; Domain location=8-325; Score=278.4; E_value=1.6e-80; Accession=PF01156.11; Description =Inosine-uridine preferring nucleoside hydrolase
MAAAEGTRKKVIIDTDPGIDDAMAIFVALRSPELEVLGLTTTFGNVHTALATRNALHLLEAVGRTDIPVAEGSHVTIKKASKLRIASFVHGSDGLGNQDFPAPATKPVDQTAAAFMVEQANLYPGQVTIVALGPLTNLALAIELDPLFPKKIGQIIILGGAYSVNGNVNPAAEANIFGDPDAADIVFTCGADILAVGLNVTHQVVLTDADREKLEQCDSKYARYLCKIMGIYFDYHKDAYFIKGVYLHDPTTLIAAVNPSLLTYTEGVVRVQTVGITKGLTVFDNTKKRYGEITAWTGMPTVKVAVTVDAPAVVELMMQRLMTDD

SEQ ID NO: 83080 - protein, 64 aa, Setaria italica
  misc_feature (54)..(54): Xaa can be any naturally occurring amino acid
  Transcript Sequence Number=SeqID_17106
MEFLTAWITQVGIGHNFHMNATGWKWKLSTCLGGDGVSQIRNKSKISMFPGFDXRIGWRAEYVL

SEQ ID NO: 83081 - protein, 196 aa, Setaria italica
  Transcript Sequence Number=SeqID_17107
MASSSGSGGGAEGGVGEGPTTLDELYQINVVPAELHFKFRKELQGLRVGLNLEFYNLEVNGFEAKIVLKPLDYERKWKFQYKPISGDVQLLSKKIPVTKFLNLQVGIGHNFHMNATGWKWKLSTCLGGDGVSQIRNKSKISMFPGFDLRIGWRAEYVLPEIHGAVGTGEPAFSLNYGRLHASIDRVEAIVTQSDQY

SEQ ID NO: 83082 - protein, 55 aa, Setaria italica
  Transcript Sequence Number=SeqID_17108
HSAHLNFINFTVCPYLQQDATHAAYQELGHCNLGAGSVTIPYVSYNFTPQSMLVI

SEQ ID NO: 83083 - protein, 451 aa, Setaria italica
  Transcript Sequence Number=SeqID_17109
  Gene Ontology: Mol. function=protein binding
  Homolog annotation: Hit_ID=B9SYZ5; Match level="QueryCoverage=98%, HitCoverage=90%, E-value=1e-174, Identity=67%"; Hit description =Protein binding protein, putative
WTAKVMLQDRIADLIGSCSPGNQFNDADSSDVRLTLTSKDGLSVTLCVHRHILVAHSRFFAAKLSDRWSKQQRTLPHIVEISDCDDIEVYAETLRLMYCKDLRRRLMREDVNKVLGILKVSAAIVFDAGVLSCLEYLEAAPWAEDDDEKVAALLTQLHLENSGAGEVLKRVSLELAPSAVVEEAEVGGSCSGGGTAGGGEEVLLRLLQVVLEGKDEKARREMKGLVSKMLRENSNSRGGAIGGDLRKESLYSACNGCLSLLLEQFVRAAGGDHSEVSQIARQADNLHWMLDILVERQIAEEFLRTWAMQTELAEMHRKVPAIHRYEVSRVTARLFVGVGKGQILVSKEARCQLLSTWLEPFYEDFGWMRRACKGLDRHLIEDGLANTILTLPLATQQEILLAWFNRFLNSGEDCPNIQRGFEVWWRRAFWKRNAEPEQPARLRITAICENS

SEQ ID NO: 83084 - protein, 57 aa, Setaria italica
  Transcript Sequence Number=SeqID_17110
MRRLLASAEHLAAVAAATPPPPGASAGVHTDTFLILAAVLCFLLCVVGLAFVARCSR

SEQ ID NO: 83085 - protein, 84 aa, Setaria italica
  Transcript Sequence Number=SeqID_17111
LRQMGRALTENLANYSKTDISADSWVRCSSCSTMQPSDVNEHHSPVSMFSPLFNAIPLYPARDNSGTRTQDKTKTSVGNKLYAN

SEQ ID NO: 83086 - protein, 124 aa, Setaria italica
  Transcript Sequence Number=SeqID_17112
  Homolog annotation: Hit_ID=Q7XS35; Match level="QueryCoverage=45%, HitCoverage=10%, E-value=3e-13, Identity=69%"; Hit description =OSJNBa0058K23.18 protein
  Subcellular localization annotation: CTP_CleavageSite=64; ConfidenceScore=5.53e-01
RTPFTGLHVFAFIQRHTSLSALRFLQAGALSPTKLRMKIMGAHNRVRVITSNSSSLSSPAKNIEASQAQNRLLVCDVLEEGTDKLLIYLFIYPFSWLKSITHPYILLVLQTVSDNSDGTKRASS

SEQ ID NO: 83087 - protein, 104 aa, Setaria italica
  Transcript Sequence Number=SeqID_17113
  Gene Ontology: Mol. function=protein disulfide oxidoreductase activity; Cellular component=extracellular region; Biological process=electron transport chain
  Homolog annotation: Hit_ID=Q0IMV4; Match level="QueryCoverage=100%, HitCoverage=100%, E-value=5e-45, Identity=86%"; Hit description =Putative glutaredoxin-C14
  Pfam annotation: Domain name=Glutaredoxin; Domain location=13-77; Score=55.9; E_value=1.6e-13; Accession=PF00462.16; Description =Glutaredoxin
MDRVMKLASERAVVVFTLSSCCMCHTVTKLMQDLSVNALVHELDSDPRGKEMERALLKMLGGRGPAVPAVFIGGKLVGGTNRIMSLHLGGELVPMLMNAGALWV

SEQ ID NO: 83088 - protein, 145 aa, Setaria italica
  misc_feature (135)..(135): Xaa can be any naturally occurring amino acid
  Transcript Sequence Number=SeqID_17114
  Gene Ontology: Mol. function=oxidoreductase activity; Biological process=cellular metabolic process
  Homolog annotation: Hit_ID=B6T983; Match level="QueryCoverage=98%, HitCoverage=21%, E-value=4e-76, Identity=95%"; Hit description=RHM1
  Pfam annotation: Domain name=Epimerase; Domain location=6-143; Score=- 49.6; E_value=0.002; Accession=PF01370.13; Description=NAD dependent epimerasedehydratase family
  Pfam annotation: Domain name=Polysacc_synt_2; Domain location=6-145; Score=-192.8; E_value=0.062; Accession=PF02719.7; Description =Polysaccharide biosynthesis protein
  Pfam module annotation: Pfam domain module=Epimerase::Polysacc_synt _2; Domain location=6-143::6-145
YKPKNILITGAAGFIASHVAIRITKKYPDYKIVVLDKLDYCSNLKNLLPVSSSPNFKFVKGDIASADLVNFLLVTENIDTIMHFAAQTHVDNSFGNSFEFTKNNIYGTHVLLEACKITGQIKRFIHVSTDEVYGXTDEDAVVATR

SEQ ID NO: 83089 - protein, 436 aa, Setaria italica
  Transcript Sequence Number=SeqID_17115
  Gene Ontology: Mol. function=acid phosphatase activity; Cellular component=extracellular region; Biological process=biological_process
  Homolog annotation: Hit_ID=B9RHA3; Match level="QueryCoverage=92%, HitCoverage=86%, E-value=0.0, Identity=79%"; Hit description=Purple acid phosphatase, putative
  Pfam annotation: Domain name=Metallophos; Domain location=129-327; Score=94.7; E_value=3.3e-25; Accession=PF00149.20; Description =Calcineurin-like phosphoesterase
CSFLLCYAVVLTYSQWGISTLTLIDFVLWKVHITQGNHDGTAMIISWVTTSEPGSSTVVYGTSEDNLNYTANGKNTQYTFYNYTSGYIHHCTIKKLEFDTKYYYAVGIGQTVRKFWFITPPKSGPDVPYTFGLVGDLGQSFDSNVTLAHYESNSKAQAVLFVGDLSYADNYPYHDNVRWDTWARFVERNVAYQPWIWTAGNHEIDFAPELGETKPFKPYSNRYPTPYKASGSTAPYWYSIKRASAYIIVLASYSSYGKYTPQYKWLEAEFPKVNRSETPWLIVLMHAPWYNSYNYHYMEGESMRVMYEPWFVKYKVDLVFAGHVHAYERTHRVSNVAYNVVNGLCTPVPDQSAPVYITIGDGGNQEGLATNMSEPQPRYSAFREASFGHAILDIKNRTHAYYTWHRNQDGSAVAADAMWFTNRYWQPTDDSADASQ

SEQ ID NO: 83090 - protein, 96 aa, Setaria italica
  Transcript Sequence Number=SeqID_17116
  Gene Ontology: Mol. function=transferase activity, transferring glycosyl groups; Cellular component=membrane
  Homolog annotation: Hit_ID=Q337B5; Match level="QueryCoverage=67%, HitCoverage=12%, E-value=2e-20, Identity=75%"; Hit description =Fringe protein, putative, expressed
EYVRLWWDPTAMRGHVWLDAGAPAAPGPSSAWEGSLPPIRVSEDTSRFRYTNPTGHPSGLRIARIAAEAVRLVGGGAGVRWVVLVDDDTVLCADNL

SEQ ID NO: 83091 - protein, 73 aa, Setaria italica
  Transcript Sequence Number=SeqID_17117
FFFFSGITESAVLIESGQRVQDTISESETFHLNNVKHNKRKAVCSDVRFARKIHDEATMILGYPFCNVSTKVF

SEQ ID NO: 83092 - protein, 136 aa, Setaria italica
  Transcript Sequence Number=SeqID_17118
  Gene Ontology: Mol. function=protein serine/threonine kinase activity; Biological process=protein amino acid phosphorylation
  Homolog annotation: Hit_ID=Q2RAY8; Match level="QueryCoverage=89%, HitCoverage=9%, E-value=1e-44, Identity=68%"; Hit description=D -mannose binding lectin family protein, expressed
  Pfam annotation: Domain name=B_lectin; Domain location=11-120; Score =93.4; E_value=8e-25; Accession=PF01453.16; Description=D-mannose binding lectin
VFFTFFCYGRTFTVFWTADRGRPVHARAAAVTLQKGGALVLTDYDGAVVWQAEGGDSAGVQYAQLLDTGNLVMKNSSGIVVWQSFDSPTDTLLPTQRITASTKLVSTTGLHVPGHNIFHFTDTSILSLMYDDADVH

SEQ ID NO: 83093 - protein, 280 aa, Setaria italica
  Transcript Sequence Number=SeqID_17119
  Gene Ontology: Mol. function=triacylglycerol lipase activity; Cellular component=chloroplast; Biological process=lipid metabolic process
  Homolog annotation: Hit_ID=B9RYC2; Match level="QueryCoverage=88%, HitCoverage=63%, E-value=6e-56, Identity=41%"; Hit description =Triacylglycerol lipase, putative
  Pfam annotation: Domain name=Lipase_3; Domain location=157-280; Score= 66.7; E_value=8.8e-17; Accession=PF01764.17; Description=Lipase (class 3)
TRAPRTLAAHMDASQGVLLSSALVGAAKGSASWPELLGSKHWDGLLDPLDLTLRRLILLCGDLCQVTYDSFNSDSHSKYCGSCRYSRSTLFARTLFPAAADVTPAAYLYGTSQASFPGGVMVFSLSREAWSKESNWIGYVSVSTDAAAAATGQRVIYVALRGTIRTLEWVDVLKPDLVFPDAILPEGHPGAHARVMKGWYLIYTSSDERSPFNKHSARDQLVAAVRGLAARYKGESLSVVCTGHSLGASLATLAAFDIAANGVCGADVPVTAIVFGTPPE

SEQ ID NO: 83094 - protein, 132 aa, Setaria italica
  Transcript Sequence Number=SeqID_17120
  Gene Ontology: Mol. function=triacylglycerol lipase activity; Cellular component=chloroplast; Biological process=lipid metabolic process
  Homolog annotation: Hit_ID=Q9SJI7; Match level="QueryCoverage=96%, HitCoverage=30%, E-value=4e-40, Identity=61%"; Hit description =Putative lipase
TIVFGSPQIGNPEFKERFDELPNLRALHVRNKPDLIPLYPSGLLGYANVGDVLPVDSKKSPYLKENTTNVGDYHNLQAILHTVAGWNGKDGEFKLQVHRSVALVNKSCAFLKDDNLVPESWWVERNKGWSSG

SEQ ID NO: 83095 - protein, 178 aa, Setaria italica
  misc_feature (27)..(27): Xaa can be any naturally occurring amino acid
  misc_feature (35)..(35): Xaa can be any naturally occurring amino acid
  misc_feature (173)..(173): Xaa can be any naturally occurring amino acid
  Transcript Sequence Number=SeqID_17121
TQAAFWNPLIQRPLYRFVLRTFLFCPXGAAIKNSXQVFSVWLAYMEPWKVTQEELDGYGKQQAGKEQELQKSNMVYSSSWKTYVLSNYLFYSSMVVHLLGFAHKFIHSDVASVLLMVYKVLEVLSSSPELLDLLRKVDVSYHTGLVESSPPYDDVLKYVPSIREQLKDWEDGXSETDA

SEQ ID NO: 83096 - protein, 89 aa, Setaria italica
  Transcript Sequence Number=SeqID_17122
  Gene Ontology: Mol. function=transferase activity, transferring hexosyl groups; Biological process=metabolic process
  Homolog annotation: Hit_ID=B4FG90; Match level="QueryCoverage=77%, HitCoverage=14%, E-value=2e-12, Identity=57%"; Hit description =Anthocyanidin 5,3-O-glucosyltransferase
MREEGQPSFRELGDTPLDIHGVVPLPASHLCAELLEDPESEIYKVMMNFMCRNTEADGILVNTFASLEERAVGALRDLQYLLPGAASAG

SEQ ID NO: 83097 - protein, 112 aa, Setaria italica
  Transcript Sequence Number=SeqID_17123
  Gene Ontology: Mol. function=structural constituent of ribosome; Cellular component=intracellular; Biological process=translation
  Homolog annotation: Hit_ID=B3TLX9; Match level="QueryCoverage=100%, HitCoverage=100%, E-value=9e-52, Identity=86%"; Hit description =Ribosomal protein L35A
  Pfam annotation: Domain name=Ribosomal_L35Ae; Domain location=12-106; Score=183.3; E_value=6.9e-52; Accession=PF01247.10; Description =Ribosomal protein L35Ae
MVKGRQGQRVRMYVRGTILGYKRSKSNQYENTSLLQIEGVSTKQDVAWYGGKRIAYVYKAKTKSDGTSIRCIWGKVTRPHGNSGVVRAKFRSNLPPSSMGKKVRVFMYPSSI

SEQ ID NO: 83098 - protein, 81 aa, Setaria italica
  Transcript Sequence Number=SeqID_17124
MASMMGGDFVEAYVLKNAYKEKLRRMEAAEEKKTRQQGSGSAERKASGSRGGSREGGLFGLMKKKVHPKAAASSEADRASS

SEQ ID NO: 83099 - protein, 194 aa, Setaria italica
  Transcript Sequence Number=SeqID_17125
ITDWMEPVASEDQGDPDSDCDESIDQFFECFEELRNSQSSLGNSGIWDWTCSVFNAISFASTLASGSDQVPKEPVIEKTLRASVAEVSVLLLFSDDMDIDASSVPVSALDDMRNSEMFSSCLSSQHFEKSIVSPATASSLNMHHLEAKCQKIHLDLQTYPENVRFKASIAQVKLDEYYHAGNNNSDDSHLGNHF

SEQ ID NO: 83100 - protein, 75 aa, Setaria italica
  Transcript Sequence Number=SeqID_17126
WRSQCRRREFFQFFFKNFTSTNYIYCYTLDGLGMLPYKVCTYLIHLSWISCFCFEFAMQRRNRFMPSNPVFTSQV

SEQ ID NO: 83101 - protein, 66 aa, Setaria italica
  Transcript Sequence Number=SeqID_17127
STLDRREHRHLESFKFQEQIVTAKTPSPLKETKISQYINKYPFPFKIVSPCKITKLTDLQKRLMQR

SEQ ID NO: 83102 - protein, 229 aa, Setaria italica
  Transcript Sequence Number=SeqID_17128
  Gene Ontology: Mol. function=receptor signaling protein activity; Cellular component=small-subunit processome; Biological process=rRNA processing
  Homolog annotation: Hit_ID=Q9LFE2; Match level="QueryCoverage=72%, HitCoverage=19%, E-value=7e-67, Identity=67%"; Hit description=WD40 -repeat protein
  Pfam annotation: Domain name=Utp13; Domain location=27-162; Score =231.8; E_value=1.7e-66; Accession=PF08625.3; Description=Utp13 specific WD40 associated domain
ILNLWHDCTMEDKQEDFRKKEEEVLRGQELENAVSDADYTKAIQLAFELRRPHRLLELFSQLARRADSEDPIEKALLGLPKDGLRVLLEYIREWNTKPKFCHVAQFVLFRVLRTLPPTDILEIKGISELLEGLIPYSQRHFNRVDRLVRSTFLLDYTLMRMAVVDPDVDAGTTKDDMNGSSVENNETAEAQPASPITEKSSKKRKQGKSSKKGKEKKVKLASKDVSVEA

SEQ ID NO: 83103 - protein, 249 aa, Setaria italica
  Transcript Sequence Number=SeqID_17129
  Gene Ontology: Mol. function=catalytic activity; Biological process =metabolic process
  Pfam annotation: Domain name=NmrA; Domain location=42-240; Score= -102.4; E_value=0.026; Accession=PF05368.5; Description=NmrA-like family
DYIEGGPKLRRWYGAPDLLPKDGGAEDEEEDSPDIVEPRDAVLVTDGDSEIGQMVILALILKRARIKALVKDKRSTEEAFGTYVECMVGDVEDKSFTKKALKGVRAVISPANDGFFSAPIDLKGVEHIVLLSQLPVYRNSGGLQAIMNSKLKKLAERDEEVVLSSGIPSTIIRTGSLQSTPGGERGFDFTKGVAAKGRISKEDAATICVEALDGIPRKTLIFEVANGDEKVADWKAWLVEQIKRDEEVQ

SEQ ID NO: 83104 - protein, 140 aa, Setaria italica
  Transcript Sequence Number=SeqID_17130
  Gene Ontology: Mol. function=receptor signaling protein activity; Cellular component=small-subunit processome; Biological process=rRNA processing
  Homolog annotation: Hit_ID=B9S245; Match level="QueryCoverage=80%, HitCoverage=12%, E-value=2e-50, Identity=80%"; Hit description=U3 small nucleolar RNA-associated protein, putative
  Pfam annotation: Domain name=WD40; Domain location=30-68; Score=35.4; E_value=2.2e-07; Accession=PF00400.24; Description=WD domain, G-beta repeat
  Pfam annotation: Domain name=WD40; Domain location=72-110; Score =33.5; E_value=8.5e-07; Accession=PF00400.24; Description=WD domain, G-beta repeat
  Pfam module annotation: Pfam domain module=WD40::WD40; Domain location=30-68::72-110
PNLDGSITAATNKIWTWDDTLDDADDEVPLRAKAVVAAHDKDINSLSVSPNDGLVCSGSEDRTACIWKLPNLVSSVVLKGHKRGIWSVEFSLVEQCVMTSSGDRTIKIWSVADGTCLKTFEGHTSSVLRASFLSRGTQVI

SEQ ID NO: 83105 - protein, 165 aa, Setaria italica
  misc_feature (157)..(157): Xaa can be any naturally occurring amino acid
  Transcript Sequence Number=SeqID_17131
  Gene Ontology: Mol. function=catalytic activity; Cellular component =chloroplast
  Homolog annotation: Hit_ID=B9S3L7; Match level="QueryCoverage=78%, HitCoverage=100%, E-value=4e-47, Identity=72%"; Hit description =Histidine triad (Hit) protein, putative
  Pfam annotation: Domain name=HIT; Domain location=61-160; Score =143.2; E_value=8e-40; Accession=PF01230.15; Description=HIT domain
MSRNSGAQLPPATASGDRLAVIASHLSHSRLGSPAHMAGEKEAALAAEPVDGPTIFDKIIRKEIPSQVVYEDQKVLAFRDISPQAPIHIIIIPKVKDGLSRLSKAEERHIEILGSLLYAAKVVAKQEGLGDGFRIVINDGLKGCQSVYHLHVHLLGXRQMNWPPG

SEQ ID NO: 83106 - protein, 81 aa, Setaria italica
  Transcript Sequence Number=SeqID_17132
SISAGSSSCLLCTIHLHAAADTTLYSSSVQTSIDWPAIATTSEHARPPRRCRPAFRHDHRVVLQGLQCATVRIYQPRDRGG

SEQ ID NO: 83107 - protein, 84 aa, Setaria italica
  Transcript Sequence Number=SeqID_17133
  Subcellular localization annotation: CTP_CleavageSite=50; ConfidenceScore=5.49e-01
AAATPTASAAAAAASLHQPHAPAGFAAVHYASPAAFLRAPRPRRGALNPRSAPPAPHWPRTHPDAGAPPIAARRPIPVCRFSCP

SEQ ID NO: 83108 - protein, 187 aa, Setaria italica
  Transcript Sequence Number=SeqID_17134
  Gene Ontology: Mol. function=oxidoreductase activity, acting on NADH or NADPH, quinone or similar compound as acceptor; Cellular component=thylakoid membrane; Biological process=oxidation reduction
  Homolog annotation: Hit_ID=B4FKX8; Match level="QueryCoverage=88%, HitCoverage=79%, E-value=9e-88, Identity=92%"; Hit description=NADH dehydrogenase I subunit N
GRRGGSARGGGGRAATVSVRSTLWDFVGGDLVKPDMARWLDDVEKHKALAIYPPHEGGYEGRYLNNLRYQGYYFLDLTARGLGDPETTLTKIHPVCPPSLGRQPVARWYFPPEVDYRLSLLHPDAKGLVVWVIEAKVLSKAELQFLAMLPDLRPKVRVIAECGNWRKFIWKPLKQIAGLEPDPDAEK

SEQ ID NO: 83109 - protein, 131 aa, Setaria italica
  Transcript Sequence Number=SeqID_17135
  Gene Ontology: Mol. function=potassium ion transmembrane transporter activity; Cellular component=integral to membrane; Biological process=potassium ion transport
  Homolog annotation: Hit_ID=Q67UC7; Match level="QueryCoverage=73%, HitCoverage=13%, E-value=9e-43, Identity=87%"; Hit description =Probable potassium transporter 17
MRTGAHVDLEAGHLSSRRGGASAASAAAAADRDRAETEGGNFRKDLFLAYKTLGVVFGGLVTSPLYVYPSMNLASPTKDDYMGLYSIMFWTLTLIGVVKYVGIALNANDHGEGGTFAMYSLLCRHADIGIL

SEQ ID NO: 83110 - protein, 177 aa, Setaria italica
  Transcript Sequence Number=SeqID_17136
RRRPWQQCAVRARAPAMEPLMALPPPAAQDDATAFFAAAGAPVFDAKDVGGHIGSCEELDMDMAQLEWLLFDDASIPHEPAFPGINCPAPIKSSALAANNAGVALLPPEKMEDAIFRSSSPISVLEHNSFNANNNVGSASSSSSSASSSSESFSGSGGHAWSAPVSPRPEPPVLVIP

SEQ ID NO: 83111 - protein, 67 aa, Setaria italica
  Transcript Sequence Number=SeqID_17137
CNQFIHDSVRFFSTASSISVDTIGFDSQGLCASGPIFPQIPLRPRASLLQKQPPAPPSAAARPPPPR

SEQ ID NO: 83112 - protein, 144 aa, Setaria italica
  misc_feature (16)..(16): Xaa can be any naturally occurring amino acid
  Transcript Sequence Number=SeqID_17138
  Gene Ontology: Mol. function=ammonium transmembrane transporter activity; Cellular component=integral to membrane; Biological process=transport
  Homolog annotation: Hit_ID=B6SV23; Match level="QueryCoverage=97%, HitCoverage=28%, E-value=1e-61, Identity=94%"; Hit description =Ammonium transporter 2
  Subcellular localization annotation: CTP_CleavageSite=39; ConfidenceScore=5.06e-01
RRPVAVLNTNVSAATXSLLTWTCLDVIFFGKPSVIGAVQGMMTGLVCITPGAGLVQTWAAVIMGVFAGSVPWFTMMILHKKSALLMRVDDTLAVFHTHAVAGFLGGILTGLLATPRLLEIESPVPGLRGAFYGGGIGQVGKQLA

SEQ ID NO: 83113 - protein, 167 aa, Setaria italica
  Transcript Sequence Number=SeqID_17139
MLPGTVIAEEAIEDASTEDDDFSSELPPEFDNVVFSDSDTESDIAAPVLEENQVVASATKTAVKSLDDSAITEEQEEEVSEEADATGKAMKEVDNIVKSLVEITIKEGEAMEEMQKLPQVENYESMSLRKLRTTYKERVIASKEGKVVAEGKRLPLEEVDENASADC

SEQ ID NO: 83114 - protein, 51 aa, Setaria italica
  Transcript Sequence Number=SeqID_17140
CLVWESTALLYIDIKKIYSGCCAVCGYLWLHIRCHKVLWQFSVSGHHPSSY

SEQ ID NO: 83115 - protein, 145 aa, Setaria italica
  Transcript Sequence Number=SeqID_17141
  Gene Ontology: Mol. function=nucleic acid binding
  Homolog annotation: Hit_ID=Q7F2E4; Match level="QueryCoverage=77%, HitCoverage=9%, E-value=2e-26, Identity=61%"; Hit description =Cockayne syndrome group B
KRAKHAAGKQVDSSDSGDAKDKKKQKHADHTAQDDPHGGALQQALATERLKSLKKAKAQIQKEISQSDPCLSGSDKRKDKMLAMLVEEEPKRKKKTLLPSRGPKKMSAPRLKTMSYNDDDDFDAVLDGASAGFMETEREEVDQKG

SEQ ID NO: 83116 - protein, 91 aa, Setaria italica
  misc_feature (75)..(75): Xaa can be any naturally occurring amino acid
  Transcript Sequence Number=SeqID_17142
TRRADASLIAASRRLLAAALLDDPANAYFALLSQHCVPLHSFNRLYAALFPPSPPPSAAARHRRLPSYIEVLTGXPQMPSRYAARGEGAMP

SEQ ID NO: 83117 - protein, 54 aa, Setaria italica
  Transcript Sequence Number=SeqID_17143
GSNTLSSSRNSNIQQQKCGMRAKESYLKLQVHCSFMFCRGTAQELRDHEKLHPY

SEQ ID NO: 83118 - protein, 96 aa, Setaria italica
  Transcript Sequence Number=SeqID_17144
  Gene Ontology: Mol. function=methyltransferase activity; Cellular component=plasma membrane
  Homolog annotation: Hit_ID=B9S8V6; Match level="QueryCoverage=92%, HitCoverage=14%, E-value=6e-40, Identity=83%"; Hit description=ATP binding protein, putative
  Pfam annotation: Domain name=DUF248; Domain location=1-96; Score= -340.4; E_value=3.4e-05; Accession=PF03141.8; Description=Putative methyltransferase
PQEEGLYKLWQKHVKAYKKTNNLLDTGRYRNLMDMNAGLGSFAAALESPKLWVMNVIPTIANTSTLGVIYERGLIGMYHDWCEGFSTYPRTYDLIH

SEQ ID NO: 83119 - protein, 52 aa, Setaria italica
  Transcript Sequence Number=SeqID_17145
  Homolog annotation: Hit_ID=B9S8V6; Match level="QueryCoverage=67%, HitCoverage=5%, E-value=3e-11, Identity=85%"; Hit description=ATP binding protein, putative
TSLAALACGSPVLLDWNFQSPKLWVMNVIPTIANTSTLGVIYERGLIGMYHD

SEQ ID NO: 83120 - protein, 111 aa, Setaria italica
  misc_feature (28)..(28): Xaa can be any naturally occurring amino acid
  misc_feature (36)..(36): Xaa can be any naturally occurring amino acid
  Transcript Sequence Number=SeqID_17146
  Gene Ontology: Mol. function=methyltransferase activity; Cellular component=plasma membrane
  Homolog annotation: Hit_ID=B9S8V6; Match level="QueryCoverage=100%, HitCoverage=17%, E-value=9e-39, Identity=67%"; Hit description=ATP binding protein, putative
  Pfam annotation: Domain name=DUF248; Domain location=1-101; Score= -356.0; E_value=0.0003; Accession=PF03141.8; Description=Putative methyltransferase
ICSLYYDYSWSRCEGFSTYPRTYDLIHXNAIFSLYXNKCKFEDILLEMDRILRPEGAVIVRDKVDALVKVEKIANAMRWKTRLADHEDGPHVPEKILFAVKQYWATTSKSS

SEQ ID NO: 83121 - protein, 492 aa, Setaria italica
  Transcript Sequence Number=SeqID_17147
  Gene Ontology: Mol. function=methyltransferase activity; Cellular component=plasma membrane
  Homolog annotation: Hit_ID=B9R995; Match level="QueryCoverage=99%, HitCoverage=79%, E-value=0.0, Identity=71%"; Hit description=ATP binding protein, putative
  Pfam annotation: Domain name=DUF248; Domain location=1-482; Score =1133.3; E_value=0; Accession=PF03141.8; Description=Putative methyltransferase
  Pfam annotation: Domain name=Methyltransf_11; Domain location=89-184; Score=20.2; E_value=0.0012; Accession=PF08241.4; Description =Methyltransferase domain
  Pfam module annotation: Pfam domain module=DUF248::Methyltransf_11; Domain location=1-482::89-184
RKKLYCLIPAPNGYVAPFRWPKSRDFVPYANVPHKSLTVEKAIQNWVHYEGNVFRFPGGGTQFPQGADTYIDQLASVIPIAEGKVRTALDTGCGVASLGAYLLKKNVLTMSFAPRDNHEAQVQFALERGVPAYIGVLGSIKLPFPSRVFDMAHCSRCLIPWSGNDGMYMMEVDRVLRPGGYWVLSGPPIGWKIHYKGWKRTKEDLRNEQRKIEQFAELLCWKKISEKDGIAIWRKRLNDKSCSMKQDNPKIGKCELVNDNDVWYKKMEVCITPLPEVNSASEVAGGQLEPFPKRLNAVPPRITLGSMPGFSVQSYEEDNKLWQKHVKAYKKTNNLLDTGRYRNLMDMNAGLGSFAAALESPKLWVMNVIPTIANTSTLGVIYERGLIGMYHDWCEGFSTYPRTYDLIHSNAIFSLYQNKCKFEDILLEMDRILRPEGAVIVRDKVDALVKVEKIANAMRWKTRLADHEDGPHVPEKILFAVKQYWATTSKSS

SEQ ID NO: 83122 - protein, 66 aa, Setaria italica
  Transcript Sequence Number=SeqID_17148
MDVQSCMKATLLAIIIISVVTWLSHMYSCIKNSMESLPSVVSVVIAPKCLFIFSNIIVMYLVSESK

SEQ ID NO: 83123 - protein, 72 aa, Setaria italica
  Transcript Sequence Number=SeqID_17149
MPCLAQEFQPKPPAASHYCKSLSSLIRETYPHCHVPCVRVPAGAAGWSSGEDSDDDSALDEALDTKQVVLTE

SEQ ID NO: 83124 - protein, 135 aa, Setaria italica
  Transcript Sequence Number=SeqID_17150
  Gene Ontology: Mol. function=structural constituent of ribosome; Cellular component=ribonucleoprotein complex; Biological process =translation
  Homolog annotation: Hit_ID=B4FC48; Match level="QueryCoverage=97%, HitCoverage=85%, E-value=4e-54, Identity=77%"; Hit description=50S ribosomal protein L11
  Pfam annotation: Domain name=Ribosomal_L11; Domain location=74-134; Score=38.7; E_value=2.3e-08; Accession=PF00298.11; Description =Ribosomal protein L11, RNA binding domain
  Pfam annotation: Domain name=Ribosomal_L11_N; Domain location=10-69; Score=82.4; E_value=1.7e-21; Accession=PF03946.6; Description =Ribosomal protein L11, N-terminal domain
  Pfam module annotation: Pfam domain module=Ribosomal_L11::Ribosomal _L11_N; Domain location=74-134::10-69
MRWQKPILATIRLIVPAGAARPAPPVGPALGFYRLNLMAFCKDFNARTQKYKADTPMQVTLTAYKDSTFEFVVKSPSVSWFLKKAAGIETASSRPGHNAVSSLTLRHVYEIAKLKQSDPFCKHMSIEELAESMIG

SEQ ID NO: 83125 - protein, 165 aa, Setaria italica
  Transcript Sequence Number=SeqID_17151
  Gene Ontology: Mol. function=protein binding
  Homolog annotation: Hit_ID=Q2QVE4; Match level="QueryCoverage=78%, HitCoverage=52%, E-value=2e-28, Identity=61%"; Hit description=WW domain containing protein, expressed
  Pfam annotation: Domain name=WW; Domain location=90-120; Score=27.3; E_value=6.2e-05; Accession=PF00397.18; Description=WW domain
TEFLRVKKFHHQQEADDLSLRKRMELQPELSLAPAAWQGFAASPAPAAKSSSSESDGTSRKKRKHYAAGAGWEEPQQPPASLELQLNDPLPLDWEQCLDLQSGRMYYLNRKTLKKSWVRPREQSVNLDLNISTAATIDDTTSAGVVAAPDEDAEPTKRPTGAVSS

SEQ ID NO: 83126 - protein, 107 aa, Setaria italica
  Transcript Sequence Number=SeqID_17152
MSHGHFRGMVKMLITDAEQASCPDRIYGYALDQESRQVMCSSTIYTLNRKTLKKSWVRPREQSVNLDLNISTAATIDDTTSAGVVAAPDEDAEPTKRPTGAVVVFRS

SEQ ID NO: 83127 - protein, 81 aa, Setaria italica
  Transcript Sequence Number=SeqID_17153
PYIYFISIASTKSHEMSVYWSHHSFYYKVMHSGTKVCSARWKDHHNLNMEAIYVLQALNTSTTPACPSNFNRKNKLRFIYT

SEQ ID NO: 83128 - protein, 166 aa, Setaria italica
  misc_feature (151)..(151): Xaa can be any naturally occurring amino acid
  Transcript Sequence Number=SeqID_17154
  Gene Ontology: Mol. function=RNA binding; Cellular component =intracellular; Biological process=rRNA processing
  Homolog annotation: Hit_ID=Q7XB75; Match level="QueryCoverage=98%, HitCoverage=8%, E-value=7e-54, Identity=71%"; Hit description =Putative pre-rRNA processing protein RRP5
  Pfam annotation: Domain name=S1; Domain location=1-72; Score=18.2; E _value=0.0085; Accession=PF00575.15; Description=S1 RNA binding domain
KVGLVTHGWIAKIEKHGCFVKFYNGVQGFVSRSELGLEAGTEAENVYHVGQVIKCRIISVLPASRRINVSFVISHNRIIPADIAKLGSIVSGVVERLTPAAVVVSVNGFSKGTILNEHLADHHGQAAQLKNLLKPGHEFNQLLVLDIEGQXILVLSAKHSLINSYK

SEQ ID NO: 83129 - protein, 161 aa, Setaria italica
  Transcript Sequence Number=SeqID_17155
  Gene Ontology: Mol. function=structural constituent of ribosome; Cellular component=ribonucleoprotein complex; Biological process =translation
  Homolog annotation: Hit_ID=B6TFT7; Match level="QueryCoverage=100%, HitCoverage=100%, E-value=9e-71, Identity=80%"; Hit description=50S ribosomal protein L17
  Pfam annotation: Domain name=Ribosomal_L17; Domain location=17-113; Score=161.6; E_value=2.3e-45; Accession=PF01196.11; Description =Ribosomal protein L17
MGNFRKLGRPASHRVSMLRTMVSQLVKHERIETTVAKAKEVRRKADQMVQLGKEGTLDAARRASAFVRGDDAVHKLFTELAYRYKNRAGGYTRLLRTRIRVGDAAEMAYIEFVDRENELREAKPATPQPPQRAPMDPWAKSRASQQWAGPKLTKSSGSDGL

SEQ ID NO: 83130 - protein, 87 aa, Setaria italica
  misc_feature (71)..(71): Xaa can be any naturally occurring amino acid
  Transcript Sequence Number=SeqID_17156
  Homolog annotation: Hit_ID=B4FAJ5; Match level="QueryCoverage=71%, HitCoverage=12%, E-value=7e-15, Identity=66%"; Hit description =Avr9/Cf-9 rapidly elicited protein 137
MPARSWLAELRSRFGAGGARADGLGILAFEAAATMSRLVSLHRTLSDVEFRRLRADVLRAEGVARLTSPDXSFLLRLACCELVATST

SEQ ID NO: 83131 - protein, 434 aa, Setaria italica
  Transcript Sequence Number=SeqID_17157
  Gene Ontology: Mol. function=ATP-dependent helicase activity
  Homolog annotation: Hit_ID=Q0DVX2; Match level="QueryCoverage=98%, HitCoverage=65%, E-value=1e-158, Identity=70%"; Hit description=DEAD- box ATP-dependent RNA helicase 50
  Pfam annotation: Domain name=DEAD; Domain location=279-434; Score =87.1; E_value=6.1e-23; Accession=PF00270.21; Description=DEADDEAH box helicase
RERERDGVAGAQARAVPLMLRHPASLRTSVSVSCAGSRRSWAAAATAEGDETRGYDKVPMDTPGAYRLVDRATGRSVIVWGGTDDGDEVAMPSPAVLSRTTDRPSRGSGGGTGIGNFGRLKAQKIKSLVTRSAQLKREGSNRSSTNRFDESSFDDSDEEESYFERRKPVSDSARHAKQNSNSRNERTRGGHSLNSVLSQYKGDDLDSPGSEATSGPKGWGSITDVTYGRQTRKQREPLDFPKRKGPLDSGFFSRRSFKEIGCSDEILGALRNFDFPRPSHIQALAYGPILEGRSCVIADQSGSGKTLAYLCPIVQNLRNEEVQGLHKSSPRNPRVIVLTPTAELASQVLNNCRLISKSGVPFRSMVATGGFRQKTQLESLEQELDVLIATPGRFLYLLQEGFVQLSSLRCVVLDEVDILFGEEGFEQVLHQLIT

SEQ ID NO: 83132 - protein, 121 aa, Setaria italica
  Transcript Sequence Number=SeqID_17158
  Gene Ontology: Mol. function=protein kinase activity; Cellular component=plasma membrane; Biological process=protein amino acid phosphorylation
  Homolog annotation: Hit_ID=B6U5J8; Match level="QueryCoverage=100%, HitCoverage=28%, E-value=2e-61, Identity=90%"; Hit description =Receptor-like protein kinase 5
HQNVMTLKAYVREADRLSLVYDFIPGGSLEDVMKRVRSQQVSLNWDARSRIAVGIAKGLRHLHFDCSPRILHCNLKPSNVMLDEGFEPILADCGVARLIAAGSGDPELCSGLYAAPECYQS

SEQ ID NO: 83133 - protein, 147 aa, Setaria italica
  Transcript Sequence Number=SeqID_17159
  Gene Ontology: Mol. function=protein kinase activity; Cellular component=plasma membrane; Biological process=protein amino acid phosphorylation
  Homolog annotation: Hit_ID=B6U5J8; Match level="QueryCoverage=100%, HitCoverage=35%, E-value=4e-60, Identity=80%"; Hit description =Receptor-like protein kinase 5
NVMLDEGFEPILADCGVARLIAAGSGDPELCSGLYAAPECYQSSRYTDKSDVYALGMILGVLLTGRDPTDPFFSGETGQGGLARWLRHIQQSSDPKEALDSSVVGDEGEEEEMLMAIRVAIVCLSDSPVDRPSSDELVAMLTQLHSL

SEQ ID NO: 83134 - protein, 41 aa, Setaria italica
  Transcript Sequence Number=SeqID_17160
LGPTSSYSAPWLALTAFYLPTTVVAVPSITPLFHLVSWLQI

SEQ ID NO: 83135 - protein, 233 aa, Setaria italica
  misc_feature (67)..(67): Xaa can be any naturally occurring amino acid
  Transcript Sequence Number=SeqID_17161
  Gene Ontology: Mol. function=receptor activity; Cellular component =integral to membrane
  Homolog annotation: Hit_ID=B6TSD5; Match level="QueryCoverage=98%, HitCoverage=53%, E-value=1e-85, Identity=73%"; Hit description =Transmembrane receptor
  Pfam annotation: Domain name=Lung_7-TM_R; Domain location=69-233; Score=-124.7; E_value=0.0067; Accession=PF06814.5; Description=Lung seven transmembrane receptor
IDEAREGPTREKRAAATNGGGEDPDGGSGGAGAGCVLSSPYVKKLFTFHDMKGGHYNKSFPVTRPDXEYTLFFANCAPEALVSMRVRTEMYNVNADGFKDYLPVGQAPVPAIYGFFAFCYVAFLAAWGYLTLSRDRVSAHQIHHLMSGLLVARLLYCLSAAEDQHYIRVTGTPHGWDVAFYLFQLVKGVILFAVIALVGTGWSFLKPVLQDREKKVLMAVIPLQVTANIAAAV

SEQ ID NO: 83136 - protein, 211 aa, Setaria italica
  Transcript Sequence Number=SeqID_17162
  Gene Ontology: Mol. function=receptor activity; Cellular component =integral to membrane
  Homolog annotation: Hit_ID=B9SG95; Match level="QueryCoverage=87%, HitCoverage=42%, E-value=5e-78, Identity=72%"; Hit description=Lung seven transmembrane receptor, putative
  Pfam annotation: Domain name=Lung_7-TM_R; Domain location=1-183; Score=-36.5; E_value=4.6e-07; Accession=PF06814.5; Description=Lung seven transmembrane receptor
NLRTNGWDVAFYLFQLVKGVILFAVIALVGTGWSFLKPVLQDREKKVLMAVIPLQVTANIAAAVIGETGPFFQGWVTWNQILLFVDVACCCAVLFPVVWSIRSLRETSKTDGKAARNLSKLTLFRQFYVVVIGYLYFTRIVVYALKTIATYKYRWVSILAEEVATLAFYLFMFYTFRPAEKSHYFSLDDDEEEAAEMVLREEALREEDFEL

SEQ ID NO: 83137 - protein, 82 aa, Setaria italica
  Transcript Sequence Number=SeqID_17163
  Gene Ontology: Mol. function=electron carrier activity; Cellular component=extracellular region; Biological process=response to oxidative stress
  Homolog annotation: Hit_ID=Q5ZDE7; Match level="QueryCoverage=100%, HitCoverage=24%, E-value=1e-22, Identity=57%"; Hit description =Putative cationic peroxidase isozyme 38K
MDPGSPARFDAHYFVNLKLGRGLFTSDAALLTDRRAAGMIHRLTKQGYFLQEFRNAVRKMGRVGVLTGEQGEIRRNCRAVNT

SEQ ID NO: 83138 - protein, 51 aa, Setaria italica
  Transcript Sequence Number=SeqID_17164
MGHHHHDKNKNKAEAGAGGDDWRKKEKHHKHMEQLAQVGAVAAGAYAMHEK

SEQ ID NO: 83139 - protein, 70 aa, Setaria italica
  Transcript Sequence Number=SeqID_17165
VTVVLFVSPPPLLPPQDSFVGWFVGLFSDECILKCSFRSHCVRCNGAFLHVPSATSCSVILCCASKFRSS

SEQ ID NO: 83140 - protein, 124 aa, Setaria italica
  Transcript Sequence Number=SeqID_17166
  Gene Ontology: Mol. function=peptidyl-prolyl cis-trans isomerase activity; Cellular component=cytoplasm; Biological process=protein folding
  Homolog annotation: Hit_ID=B6TQC5; Match level="QueryCoverage=100%, HitCoverage=100%, E-value=6e-52, Identity=82%"; Hit description =Peptidyl-prolyl cis-trans isomerase 1
  Pfam annotation: Domain name=Rotamase; Domain location=16-124; Score =137.4; E_value=4.5e-38; Accession=PF00639.13; Description=PPIC-type PPIASE domain
MSSAAAGEGETVRASHILIKHEGSRRKASWKDPDGRVISATTRADAAARLLDLRNQILAGQANFADLAARHSDCSSARRGGDLGTFGRRQMQKPFEDATFALKVGELSDLVDTDSGVHIILRTA

SEQ ID NO: 83141 - protein, 55 aa, Setaria italica
  Transcript Sequence Number=SeqID_17167
  Gene Ontology: Mol. function=peptidyl-prolyl cis-trans isomerase activity; Cellular component=plasma membrane; Biological process =protein folding
  Homolog annotation: Hit_ID=B6TQC5; Match level="QueryCoverage=74%, HitCoverage=33%, E-value=8e-16, Identity=95%"; Hit description =Peptidyl-prolyl cis-trans isomerase 1
  Pfam annotation: Domain name=Rotamase; Domain location=1-55; Score= -16.1; E_value=0.043; Accession=PF00639.13; Description=PPIC-type PPIASE domain
RSDVSNCDVSITFTGTFGRRQMQKPFEDATFALKVGELSDLVDTDSGVHIILRTA

SEQ ID NO: 83142 - protein, 155 aa, Setaria italica
  Transcript Sequence Number=SeqID_17168
  Gene Ontology: Mol. function=zinc ion binding; Cellular component =intracellular
  Homolog annotation: Hit_ID=B6SXM0; Match level="QueryCoverage=100%, HitCoverage=24%, E-value=1e-67, Identity=78%"; Hit description =ATBRCA1
FGNMDGIQTRDPAFENKAADAAVATTVLVQKGHSGSQSSDGPGDLDCDSYDLEGELITSRSPPQTALKREANVMDDHTRELKKQKPNDQVQRQTTGDWKCEFCHSSQVTECTGPLSHYLHGEPLEADQAWKSNVQHVHEKCIEWAPQAFFTGEIA

SEQ ID NO: 83143 - protein, 367 aa, Setaria italica
  misc_feature (230)..(230): Xaa can be any naturally occurring amino acid
  misc_feature (280)..(280): Xaa can be any naturally occurring amino acid
  misc_feature (285)..(285): Xaa can be any naturally occurring amino acid
  misc_feature (301)..(301): Xaa can be any naturally occurring amino acid
  Transcript Sequence Number=SeqID_17169
  Gene Ontology: Mol. function=acid-amino acid ligase activity; Cellular component=intracellular; Biological process=ubiquitin -dependent protein catabolic process
  Homolog annotation: Hit_ID=B9SRK8; Match level="QueryCoverage=98%, HitCoverage=31%, E-value=2e-63, Identity=38%"; Hit description =Ubiquitin-protein ligase, putative
GQRSKTVESILTCFKIILNSINSKDASKNLCSFAVGMPEERSIWLYQAKKLISLCSFILARCDHSCFKDGSMVDMTAIAMRLAVSLTDCKTWKSLKSENTRAADESVESLIEFIGTCQSGTYNCVRQYIKCLGPHVTSGKKSSATATATATATATDDHFVITASAVTLALRPFHSKKAERGTDLNGASKEYITLILTIPYLCKRMPPLLLPALKHISVLQPCLNILLVVXISKDKIFEDIIKLEQSEVSAVGATVIPCSGWALGNIVNLATNHDDLSNSXGCFIXGLDFCLYVDVINCISXLLESFEKSKGMSVGNTAFHAETSIAEEGDTNGSSMRTLFMDLLKPIYQQWHLRKLLTLAKEDVSCS

SEQ ID NO: 83144 - protein, 673 aa, Setaria italica
  Transcript Sequence Number=SeqID_17170
  Homolog annotation: Hit_ID=Q7XZU9; Match level="QueryCoverage=24%, HitCoverage=16%, E-value=4e-09, Identity=27%"; Hit description=PG1
  Pfam annotation: Domain name=DUF1399; Domain location=27-170; Score =218.3; E_value=2e-62; Accession=PF07173.4; Description=Protein of unknown function (DUF1399)
YRSVLSWLAAPPDVHLVWLCHCFHHESYSVYCLSRFGRLIDRPSILDAENEEYAKERCRDVWAAHYPSEPFDLHRNEIDGNSDDDIAYANANSEIVEMVRRYAGLAAHFASPFVREGVYHVAARRRYVCFLDLMKKVVGTTQDQTRLVPSLDILLMWLAHLSFPASYATDMVAMAISDNIAKMGVGYGEVVTDEVLKRTRALWEEAYDVPYDMAGSEVEMAAVRAAREAFYWAPAASDEDANRLYKSLQPRFLMEVYVFLKGESDKEHINKEFLRLRTQRCHRSLKLNKSMANLSCKNWQKTWHLYCEFATRGLLIEVRRTTTGCFRNSKFLKNISFSWSDMLHEKALALTEELEVRMRAMASITPPVQAPYLLKCVPDRVTDDGGPMISDVILRMRNYRPQEGRWLTRTVLDHGGRECFVIRMRIGRGIWRRGAETPVAVKWEDRSIEVREGSWSYVASTSSIGYAPEKVVGTATATKDQQENKVVWSLSTGYILTVNLGDELSFQLKSESLEEEARLLVGRRLSYRVNTDGASSNHNEEEQYLTLVRNSPDHHGDRATVLLNWKLLAVEFQPEEDAVFVLLLCMVIARTMTEIRREDVAGLLVRRRIGEARVGQRDWGSVMLPDLLSPDPNLQPWYRNAAQVLSSAETGAMLAKYSPADGKDVLYRQSLIP

SEQ ID NO: 83145 - protein, 67 aa, Setaria italica
  misc_feature (58)..(67): Xaa can be any naturally occurring amino acid
  Transcript Sequence Number=SeqID_17171
YLCLCACVGWCIYLNTGRSNELETASILTSWRRSETDALTDSLDIGQYYTSTEDLIEXXXXXXXXXX

SEQ ID NO: 83146 - protein, 53 aa, Setaria italica
  Transcript Sequence Number=SeqID_17172
  Gene Ontology: Mol. function=N-acetyltransferase activity; Biological process=metabolic process
  Homolog annotation: Hit_ID=B6T916; Match level="QueryCoverage=100%, HitCoverage=23%, E-value=6e-17, Identity=75%"; Hit description=N -acetyltransferase
EWCVLDWNKNAIDLYVGMGADMFPDWRICRLTGAALDKYKGNQEEAADEKAAE

SEQ ID NO: 83147 - protein, 60 aa, Setaria italica
  Transcript Sequence Number=SeqID_17173
HIKEVSYGYFPTFYYLGYSPQFLTRYFSLFSKIWYPDTNWLMDRTQYWIDLFLFSFISIK

SEQ ID NO: 83148 - protein, 246 aa, Setaria italica
  misc_feature (18)..(18): Xaa can be any naturally occurring amino acid
  Transcript Sequence Number=SeqID_17174
  Gene Ontology: Mol. function=protein serine/threonine kinase activity; Cellular component=cytoplasm; Biological process=protein amino acid phosphorylation
  Homolog annotation: Hit_ID=Q7XTL8; Match level="QueryCoverage=99%, HitCoverage=88%, E-value=1e-115, Identity=81%"; Hit description =OSJNBa0070M12.8 protein
  Pfam annotation: Domain name=Pkinase; Domain location=1-244; Score =246.8; E_value=5.2e-71; Accession=PF00069.17; Description=Protein kinase domain
  Pfam annotation: Domain name=Pkinase_Tyr; Domain location=1-244; Score=33.4; E_value=6e-16; Accession=PF07714.9; Description=Protein tyrosine kinase
  Pfam module annotation: Pfam domain module=Pkinase::Pkinase_Tyr; Domain location=1-244::1-244
RAVSRSTGAPVAVKQVRXLPASPALLRDSLDCEVRFLAAVSHPNIIRLIDVIQTQSCLYLVLELCEGGDLAAFICRNGRVDERVARNFMKQIGAGLQVLRRHHVVHRDLKPQNILLSSPSSDAVLKISDFGLARVLRPGEYADTACGSCLYMAPEVMLFQKYDDKVDMWSIGAILFELLNGYPPFRGRSNVQLLQCINRSTSLPFSKPLASSLHPDCVDICTRLLCTNPVKRLSFQEFFNHSFFGV

SEQ ID NO: 83149 - protein, 85 aa, Setaria italica
  Transcript Sequence Number=SeqID_17175
  Gene Ontology: Mol. function=ARF guanyl-nucleotide exchange factor activity; Cellular component=intracellular; Biological process =regulation of ARF protein signal transduction
  Homolog annotation: Hit_ID=B9S916; Match level="QueryCoverage=80%, HitCoverage=4%, E-value=3e-18, Identity=54%"; Hit description =Pattern formation protein, putative
MLQALLACLRAPAAAALGDQHVCTAVNTCFRVVHQAAAKGELLQRFSRHAMHELIRCVFARLPQIGSSDGVDAAVKEMGGMDVNH

SEQ ID NO: 83150 - protein, 104 aa, Setaria italica
  Transcript Sequence Number=SeqID_17176
  Gene Ontology: Mol. function=catalytic activity
  Homolog annotation: Hit_ID=B9RBB4; Match level="QueryCoverage=85%, HitCoverage=12%, E-value=4e-13, Identity=43%"; Hit description =Trypsin domain-containing protein, putative
TTSRRCSLLMADIQCLPGMEGAPVFDRNSCLVGLLMNPLRQKGSSVEVQLVITWDAICTGWNNMKLVEIEREPSKLPNDKNEASTRNELKHPDNYGRYCTKQGV

SEQ ID NO: 83151 - protein, 115 aa, Setaria italica
  Transcript Sequence Number=SeqID_17177
  Gene Ontology: Mol. function=catalytic activity
  Homolog annotation: Hit_ID=Q0PY37; Match level="QueryCoverage=80%, HitCoverage=12%, E-value=6e-23, Identity=55%"; Hit description =Putative protease/hydrolase
ILGISTVNSNVIGDQNERQIDVSVMQHRGDPLLIAGSPFGLLSPFHFFNSISVGAVANFLPPCAVRCSLLMADIQCLPGMEGAPVFDRNSCLVGLLMNPLRQKGSSVEVQVKLQR

SEQ ID NO: 83152 - protein, 267 aa, Setaria italica
  misc_feature (107)..(107): Xaa can be any naturally occurring amino acid
  Transcript Sequence Number=SeqID_17178
  Gene Ontology: Mol. function=catalytic activity
  Homolog annotation: Hit_ID=Q0PY37; Match level="QueryCoverage=85%, HitCoverage=26%, E-value=6e-31, Identity=35%"; Hit description =Putative protease/hydrolase
MLLFTISCAAIIRKRSKSVIFICKHMCSLSSISVGAVANFLPPCAVRCSLLMADIQCLPGMEGAPVFDRNSCLVGLLMNPLRQKGSSVEVQVSPLVSKRYLCTSNKXKLSYLKSTYQLVITWDAICTGWNNMKLVEIEREPSKLPNDKNEESKMMELKHPDNYGRFVSSTVNKINQYCISSPSIREAISAVVLVTVGDSSWASGIVLNKGGLVLTNAHLLEPWRFGRTSPLGAQTSSAGEYLSARENRSLQPQQCKFSNDDAVKHEV

SEQ ID NO: 83153 - protein, 157 aa, Setaria italica
  Transcript Sequence Number=SeqID_17179
  Homolog annotation: Hit_ID=Q9FN11; Match level="QueryCoverage=71%, HitCoverage=45%, E-value=5e-53, Identity=82%"; Hit description=LOB domain-containing protein 37
  Pfam annotation: Domain name=DUF260; Domain location=2-107; Score =154.4; E_value=3.5e-43; Accession=PF03195.6; Description=Protein of unknown function DUF260
MSCNGCRVLRKGCSEGCVLRPCLQWIDAADAQGHATVFVAKFFGRAGLLSFISAVPDAQRPALFQSLLYEAAGRTINPVHGAVGLLGTGNWHLCQAAVDTVLRGGAIGPLPELGRGTAGSGDLYGPACAAKRAGGWSTFSTAKRVRKAANDAPPAAE

SEQ ID NO: 83154 - protein, 68 aa, Setaria italica
  Transcript Sequence Number=SeqID_17180
  Gene Ontology: Mol. function=acyl-[acyl-carrier-protein]-UDP-N -acetylglucosamine O-acyltransferase activity; Biological process =lipid biosynthetic process
  Homolog annotation: Hit_ID=Q9SU91; Match level="QueryCoverage=100%, HitCoverage=20%, E-value=1e-14, Identity=54%"; Hit description=UDP-N- acetylglucosamine O-acyltransferase-like protein
VRRLRKAYQKVFMPTIASEISFEDRLADLEREIELSESPAVSCMVESIRMSFDQGRRGICKFRSWNSS

SEQ ID NO: 83155 - protein, 63 aa, Setaria italica
  Transcript Sequence Number=SeqID_17181
  Homolog annotation: Hit_ID=B6TAX4; Match level="QueryCoverage=85%, HitCoverage=9%, E-value=6e-26, Identity=94%"; Hit description=MON1
YVFFVWITQDFELYAAFNPLADKTQAIKMCNRVCQWVRDLENEIFVYGESALSWQYHHCWGGI

SEQ ID NO: 83156 - protein, 60 aa, Setaria italica
  Transcript Sequence Number=SeqID_17182
IREESKKHLNVLLSIISYLFKSSRFGLVISLKPCILIFFKLSSPHWQYHSPPHLPSNSVS

SEQ ID NO: 83157 - protein, 207 aa, Setaria italica
  misc_feature (119)..(119): Xaa can be any naturally occurring amino acid
  misc_feature (133)..(133): Xaa can be any naturally occurring amino acid
  misc_feature (151)..(151): Xaa can be any naturally occurring amino acid
  misc_feature (187)..(187): Xaa can be any naturally occurring amino acid
  misc_feature (196)..(196): Xaa can be any naturally occurring amino acid
  Transcript Sequence Number=SeqID_17183
  Gene Ontology: Cellular component=late endosome membrane; Biological process=protein transport
  Homolog annotation: Hit_ID=B6TAX4; Match level="QueryCoverage=100%, HitCoverage=37%, E-value=2e-88, Identity=80%"; Hit description=MON1
ERGSSLDDDPEPEPDPEPAQDWPRDKKHLDEDDASSSWRKRKKHFFILSNSGKPIYSRYGDEHKLAGFSATLQAIISFVENSGDHIKFVRAGKHQIVFLVKGPIYLVCISCTEESYEGXWRGQLELMYGQVLXRRTPKFDMAPLLGGTDAXVFLSLIHAFSWNPATFLHAYTCLPLAQSTRQAASAXVLQDVADSXGVLFALLMCDH

SEQ ID NO: 83158 - protein, 581 aa, Setaria italica
  Transcript Sequence Number=SeqID_17184
  Homolog annotation: Hit_ID=B6TAX4; Match level="QueryCoverage=94%, HitCoverage=94%, E-value=0.0, Identity=79%"; Hit description=MON1
  Pfam annotation: Domain name=Mon1; Domain location=137-581; Score =296.2; E_value=7.3e-86; Accession=PF03164.6; Description=Trafficking protein Mon1
MDPPNPNPNPNPTDAQPQAAAGARLAALSLRGGRDLPPDFHTAEIHEHRTDDDDDDDDDEGYLTAASRGGSSTCAWKEAPEGLRDDDKDGDDVSPPSPSSSGYAGERGSSLDDDPEPEPDPEPAQDWPRDKKHLDEDDASSSWRKRKKHFFILSNSGKPIYSRRDHLYGDEHKLAGFSATLQAIISFVENSGDHIKFVRAGKHQIVFLVKGPIYLVCISCTEESYEGLRGQLELMYGQLLLILTKSVNRCFEKNPKFDMAPLLGGTDAVFLSLIHAFSWNPATFLHAYTCLPLAQSTRQAASAVLQDVADSGVLFALLMCDHKVISLVGAQKATLHPDDILLLANFILSSESFRTSESFSPICLPRYNPMAFLYAYVHFFDEHTYLTLLTTRSDAFYDLKDSRARIQNVLMKSNVLIEVQRSLRESALHVEDLPTDPSSQSASQPPQSSRDMSSQSLSSEMIGGPAGLWHFIYKSIYLDQYVSSEFPSCISNQKQQKRLYKAYQKLYASMHDKATGPQKTQFRRGEDYVLFCWITQDFELYAAFNPLADKTQAIKMCNRVCQWVRDLENEIFVYGESALSW

SEQ ID NO: 83159 - protein, 70 aa, Setaria italica
  Transcript Sequence Number=SeqID_17185
LHSEHKFTCQERYPGDKRHAKQGSCQKSGAIADALQVTATTLMESLSVTSRVTCYSRSTSFTGAAKSLAP

SEQ ID NO: 83160 - protein, 120 aa, Setaria italica
  Transcript Sequence Number=SeqID_17186
  Homolog annotation: Hit_ID=B6T9V0; Match level="QueryCoverage=100%, HitCoverage=72%, E-value=2e-40, Identity=75%"; Hit description =Prostaglandin E synthase 3
TEPKGLFTFSAVAHGEPFSFTLELFDSVLPEGSKTKTKMGLRNIICSIQKEKKGWWKQLLKSEEKHPYIKVDWNKWCDEDEESEASGDSDDDFDGANEGDESGDDDGMLYLPDLEKLRGK

SEQ ID NO: 83161 - protein, 82 aa, Setaria italica
  Transcript Sequence Number=SeqID_17187
DQPALWFSRNSSPADSAAPLCGSGYHAMVLMQQLAQATGSSYAVPGGSEKPGILQPPPQLNWCGRGRRKEEEAEDRGDLKKT

SEQ ID NO: 83162 - protein, 58 aa, Setaria italica
  Transcript Sequence Number=SeqID_17188
  Subcellular localization annotation: CTP_CleavageSite=28; ConfidenceScore=5.08e-01
MAAAAAGAGAGLQLIGAAAATLLAAVLVAAVLGRRRGSGPRSPLVEEKAAAEAACATG

SEQ ID NO: 83163 - protein, 278 aa, Setaria italica
  misc_feature (169)..(169): Xaa can be any naturally occurring amino acid
  Transcript Sequence Number=SeqID_17189
  Gene Ontology: Mol. function=DNA binding; Cellular component=nucleus; Biological process=regulation of transcription, DNA-dependent
  Homolog annotation: Hit_ID=B9T523; Match level="QueryCoverage=75%, HitCoverage=87%, E-value=2e-44, Identity=45%"; Hit description=DNA binding protein, putative
  Pfam annotation: Domain name=B3; Domain location=140-234; Score=76.5; E_value=9.9e-20; Accession=PF02362.13; Description=B3 DNA binding domain
MATKASSAASGAAYEEQRRKRVLENLKHLEDLGISEMSKSLLQAARLQKQSKGGVRVSPKARKKFDATEVRRSSRAKATVSYKDDYGELDTFLRRKRRSGGKNSEQGREYTGRVSSYEQQQRAFRRAEKLQDGLDPNNPSFVKTMVRSHVSSCFWLGLPTSFCKQNLPXQSFRMVLEDEDGVEFDAVYIGKRTGLSGGWRGFAMHHNLEDGDSLVFELAEHDRFKIYIIKAIDDDDVEEDESDDKNASGGTKEEPAEEDSPAAEPPKGAKRRKLRGRR

SEQ ID NO: 83164 - protein, 126 aa, Setaria italica
  Transcript Sequence Number=SeqID_17190
  Gene Ontology: Mol. function=aspartic-type endopeptidase activity; Cellular component=chromatin; Biological process=DNA integration
  Homolog annotation: Hit_ID=Q688L2; Match level="QueryCoverage=100%, HitCoverage=7%, E-value=6e-43, Identity=62%"; Hit description =Putative polyprotein
  Pfam annotation: Domain name=rve; Domain location=1-125; Score=22.0; E_value=0.00017; Accession=PF00665.18; Description=Integrase core domain
DDYSHYLWTFPQQLKSDTYSTLTNFFAYVRTQFGATVQGIQCDNGCEFDNLRACMFFLSHGIHLRMSCPYTSAQNGKAERILRSINNVIRTLLIQASIPPIYWAAALGTATYLLNILPTKTLSFST

SEQ ID NO: 83165 - protein, 172 aa, Setaria italica
  misc_feature (55)..(55): Xaa can be any naturally occurring amino acid
  Transcript Sequence Number=SeqID_17191
  Gene Ontology: Mol. function=transporter activity; Cellular component= intracellular; Biological process=transport
  Homolog annotation: Hit_ID=B6TAH4; Match level="QueryCoverage=98%, HitCoverage=52%, E-value=5e-86, Identity=90%"; Hit description=SEC14- like protein 1
  Pfam annotation: Domain name=CRAL_TRIO_N; Domain location=3-71; Score= 14.0; E_value=0.0031; Accession=PF03765.7; Description=CRALTRIO, N -terminus
MADAACDDAVEQLAGLLDQVDAPLKKTFENVHQGYPTETLVRFLKAREWHVNKAXKDDSLNWRIQNEIDSILEKPIVPVDLYRSIRDTQLVGLSGYSKEGIPVFAVGVGLSTYDKASVNYYVQSHIQINEYRDRFILPMVTKKYGRHITTCIKVLDMTGLKLSALNQMKIVT

SEQ ID NO: 83166 - protein, 76 aa, Setaria italica
  Transcript Sequence Number=SeqID_17192
  Gene Ontology: Mol. function=ATPase activity, coupled to transmembrane movement of ions, phosphorylative mechanism; Cellular component=membrane; Biological process=calcium ion transport
  Homolog annotation: Hit_ID=Q94IM4; Match level="QueryCoverage=68%, HitCoverage=8%, E-value=1e-21, Identity=84%"; Hit description=P-type ATPase (Fragment)
MLLLHSTVPAKEFLHCYLLKCWPLIKDMAEQSLRCIAFAYRNLDLEDVPSEEQRISWQLPDDDLTLIGIAGMKDPC

SEQ ID NO: 83167 - protein, 91 aa, Setaria italica
  Transcript Sequence Number=SeqID_17193
  Gene Ontology: Mol. function=hydrolase activity, acting on acid anhydrides, catalyzing transmembrane movement of substances; Cellular component=integral to membrane; Biological process=calcium ion transport
  Homolog annotation: Hit_ID=Q6ETP2; Match level="QueryCoverage=100%, HitCoverage=8%, E-value=5e-43, Identity=92%"; Hit description =Putative calcium-transporting ATPase
VMKDQKTPFLMAGCKVADGYGTMLVTAVGLNTEWGLLMASISEDNNEETPLQVRLNGVATFIGIVGLSVAAMVLIVLFARYFSGHTTNSDG

SEQ ID NO: 83168 - protein, 696 aa, Setaria italica
  misc_feature (12)..(12): Xaa can be any naturally occurring amino acid
  misc_feature (27)..(27): Xaa can be any naturally occurring amino acid
  Transcript Sequence Number=SeqID_17194
  Gene Ontology: Mol. function=hydrolase activity, acting on acid anhydrides, catalyzing transmembrane movement of substances; Cellular component=integral to membrane; Biological process=calcium ion transport
  Homolog annotation: Hit_ID=Q6ETP2; Match level="QueryCoverage=97%, HitCoverage=64%, E-value=0.0, Identity=78%"; Hit description =Putative calcium-transporting ATPase
  Pfam annotation: Domain name=Cation_ATPase_C; Domain location=482 -660; Score=182.4; E_value=1.3e-51; Accession=PF00689.13; Description= Cation transporting ATPase, C-terminus
  Pfam annotation: Domain name=Hydrolase; Domain location=89-421; Score= 81.8; E_value=2.4e-21; Accession=PF00702.18; Description=haloacid dehalogenase-like hydrolase
  Pfam module annotation: Pfam domain module=Cation_ATPase _C::Hydrolase; Domain location=482-660::89-421
  Subcellular localization annotation: CTP_CleavageSite=68; ConfidenceScore=5.29e-01
SVAAMVLIVLFXIAGHTTNSDGSVQFXTSAKSAIFGLKILTVAVTIVVVAVPEGLPLAVTLTLAYSMRKMMADKALVRRLSACETMGSATTICSDKTGTLTLNQMTVVQSIVGGVKLQAPANVDNLSPTVVSLLLEGIAQNTSGSVFEAQDGSVEITGSPTEKAILAWGLELRMKFAEERSRSAIIHVSPFNSEKKRAGVAVAVRDSDIHVHWKGAAEIVLDLCKSWIDVDGSNHEMTPDKANQLKKFIEDMAEQSLRCIAFAYRNLDLEDVPSEEQRISWQLPDDDLTLIGIAGMKDPCRPEVREAVELCKKAGVKVRMVTGDNLKTARAIALECGILEDSDASAQAIIEGRVFRAYNDTEREDVADKISVMARSSPNDKLLLVKALKKRGHVVAVTGDGTNDAPALHEADIGLAMGIQGTEVAKESSDIIILDDNFSTVVKVVRWGRSVYANIQKFIQFQLTVNVAALVINVVAAVSSGNVPLNAVQLLWVNLIMDTLGALALATEPPTDQLMRRSPVGRREPLVTNIMWRNLFIQAVFQVAVLLTLNFRGRNLLHLTQDTLDYSSKVKNTVIFNTFVLCQVFNEFNSRKPEELNIFSGVSRNHLFLGVVTITVVLQVIIIEFLGKFTSTVRLNWKLWLVSVVIAFVSWPLAFVGKFIPVPKTELKDIILRCWPQRNERAEQQGQDERRAESQV

SEQ ID NO: 83169 - protein, 470 aa, Setaria italica
  misc_feature (469)..(469): Xaa can be any naturally occurring amino acid
  Transcript Sequence Number=SeqID_17195
  Gene Ontology: Mol. function=transcription factor activity; Cellular component=chloroplast; Biological process=regulation of transcription, DNA-dependent
  Homolog annotation: Hit_ID=Q9ZPL1; Match level="QueryCoverage=99%, HitCoverage=87%, E-value=1e-169, Identity=68%"; Hit description =Sigma factor SIG2B
  Pfam annotation: Domain name=Sigma70_r1_2; Domain location=217-252; Score=11.7; E_value=0.029; Accession=PF00140.12; Description=Sigma -70 factor, region 1.2
  Pfam annotation: Domain name=Sigma70_r2; Domain location=295-365; Score=75.5; E_value=1.9e-19; Accession=PF04542.6; Description=Sigma -70 region 2
  Pfam annotation: Domain name=Sigma70_r3; Domain location=369-450; Score=89.2; E_value=1.5e-23; Accession=PF04539.8; Description=Sigma -70 region 3
  Pfam module annotation: Pfam domain module=Sigma70_r1_2::Sigma70 _r2::Sigma70_r3; Domain location=217-252::295-365::369-450
  Subcellular localization annotation: CTP_CleavageSite=39; ConfidenceScore=5.46e-01
MAFLAPPRFKCPPSTRAAVFREPAGGAGSRPGRVNCSVSSTAVVDAERLECLSVGPPPSPHPTLPGGFGEAILNKEAMVAAAAAEAVTLARAAAEVAGEVARMAHQDHRTDFSPRDDTEDSFLAIELRRTEVGWQSSRRAGLELLEDEEFSSILSDEAEDGDDDGESTEGVVAVKSARRSERRARRVRAAMKAAKFLSIGKPVRASSSSKKRLKGCRNPLGCFYKMTGPRLLTAKQEVEFSEGIQDLLKLEAIQKELAHYNGDEPTFSQWAAAAGTDENTLRKRLNYGVYCKNRMVKSNVRLVISIAREHEGPGMDFSDLIQEGMQGLIRGAEKFDASKGFRFSTYSHWWIKQAIRKSVLEQTHIIRLPSHMAEASSRVKECRRRLHRQLKRLPSNEEIALDTGMPIRRVEAAMSLPRYSVSLSSKVGCTDVTYQEIMPDTSAETAEEVLHRWLMKKDVDKALDSLSPXE

SEQ ID NO: 83170 - protein, 54 aa, Setaria italica
  Transcript Sequence Number=SeqID_17196
TSNAHILCINKFVCRDMQNETYNEHYFYFAYHDIRNKNNVHCKFHLMFYCSSRK

SEQ ID NO: 83171 - protein, 92 aa, Setaria italica
  Transcript Sequence Number=SeqID_17197
  Gene Ontology: Mol. function=indole-3-glycerol-phosphate synthase activity; Cellular component=chloroplast; Biological process =tryptophan metabolic process
  Homolog annotation: Hit_ID=Q8GYM9; Match level="QueryCoverage=77%, HitCoverage=27%, E-value=2e-25, Identity=74%"; Hit description =Putative indole-3-glycerol phosphate synthase
  Subcellular localization annotation: CTP_CleavageSite=32; ConfidenceScore=5.21e-01
VPLQSVSFQCSSSFPNSPAKAPPSREFYGALEAAYKRNGVPALIAEVKKASPSRGVLRENFNPVEIAKAYEKNGAACLSILTDEKYFQVYFN

SEQ ID NO: 83172 - protein, 103 aa, Setaria italica
  Transcript Sequence Number=SeqID_17198
  Gene Ontology: Mol. function=indole-3-glycerol-phosphate synthase activity; Biological process=tryptophan metabolic process
  Subcellular localization annotation: CTP_CleavageSite=27; ConfidenceScore=5.55e-01
MESLLASPSVRSSFAAAAAGTRGCFPRSSRVATLAGVHARARPLRVGPKDSILEVLAQDDMLNATELVQWENGKSVNDIAASQGIRIRRHCRPTASLKVIEEE

SEQ ID NO: 83173 - protein, 347 aa, Setaria italica
  Transcript Sequence Number=SeqID_17199
  Gene Ontology: Mol. function=indole-3-glycerol-phosphate synthase activity; Cellular component=chloroplast; Biological process =tryptophan metabolic process
  Homolog annotation: Hit_ID=B6UGU8; Match level="QueryCoverage=85%, HitCoverage=77%, E-value=1e-121, Identity=71%"; Hit description =Indole-3-glycerol phosphate synthase
  Pfam annotation: Domain name=IGPS; Domain location=101-347; Score =279.5; E_value=7.4e-81; Accession=PF00218.13; Description=Indole-3 -glycerol phosphate synthase
  Subcellular localization annotation: CTP_CleavageSite=27; ConfidenceScore=5.55e-01
MESLLASPSVRSSFAAAAAGTRGCFPRSSRVATLAGVHARARPLRVGPKDDMLNATELVQWENGKSVNDIAASQGIRIRRHCRPTASLKVIEEELGAPRNILEKIIWDKEIEVAEGHAKKPLKELIEAAAKAPPSREFYGALEAAYKRNGVPALIAEVKKASPSRGVLRENFNPVEIAKAYEKNGAACLSILTDEKYFQGSFENLEKVRASGVKCPLLCKEFVIDKWQIYNARSKGADAILLIAAVLPDLDIKYFLRICKELGMTALIEVHDEIEMERVLKINGVKLIGINNRSLETFVVDTSNTKMLLEKHGDSIREKGILVVGESGLFTPDDVAYVQNAGVSAVL

SEQ ID NO: 83174 - protein, 155 aa, Setaria italica
  Transcript Sequence Number=SeqID_17200
  Gene Ontology: Mol. function=indole-3-glycerol-phosphate synthase activity; Cellular component=chloroplast; Biological process =tryptophan metabolic process
  Homolog annotation: Hit_ID=B6UGU8; Match level="QueryCoverage=99%, HitCoverage=39%, E-value=5e-67, Identity=81%"; Hit description =Indole-3-glycerol phosphate synthase
  Pfam annotation: Domain name=IGPS; Domain location=1-148; Score=21.3; E_value=2.8e-12; Accession=PF00218.13; Description=Indole-3-glycerol phosphate synthase
LCKEFVIDKWQIYNARSKGADAILLIAAVLPDLDIKYFLRICKELGMTALIEVHDEIEMERVLKINGVKLIGINNRSLETFVVDTSNTKMLLEKHGDSIREKGILVVGESGLFTPDDVAYVQNAGVSAVLVGESLVKQEDPGRAIAGLFGKELLH

SEQ ID NO: 83175 - protein, 321 aa, Setaria italica
  Transcript Sequence Number=SeqID_17201
  Gene Ontology: Mol. function=protein serine/threonine kinase activity; Cellular component=plasma membrane; Biological process =protein amino acid phosphorylation
  Homolog annotation: Hit_ID=B6T6P9; Match level="QueryCoverage=100%, HitCoverage=84%, E-value=1e-165, Identity=86%"; Hit description =BRASSINOSTEROID INSENSITIVE 1-associated receptor kinase 1
  Pfam annotation: Domain name=Pkinase; Domain location=1-259; Score =62.6; E_value=1.5e-15; Accession=PF00069.17; Description=Protein kinase domain
  Pfam annotation: Domain name=Pkinase_Tyr; Domain location=1-259; Score=28.8; E_value=1.2e-15; Accession=PF07714.9; Description =Protein tyrosine kinase
  Pfam module annotation: Pfam domain module=Pkinase::Pkinase_Tyr; Domain location=1-259::1-259
SVYWGQLWDGSQIAVKRLKSWSNKAETEFAVEVKILAQVRHKSLLSLRGYCSEGQERLIVYDYMPNLSIHSQLHGQHAAECNLGWERRMKIAIDSAEGIAYLHHYATPHIIHRDVKASNVLLDSNFQARVADFGFAKLIPDGATHVTTKVKGTLGYLAPEYAMLGKASESCDVFSFGIMLLELASGKKPVEKLNPTTKRTIAEWALPLARDKKFKEIADPKLNGNFIEDELKRMVLVGLACSQNKPEQRPIMSEVVELLKGESAEKLSNLENDELFKPEQTSSFQGSSGPDSSDCITEEKSSKADAIEAAVDSSETVPSAR

SEQ ID NO: 83176 - protein, 430 aa, Setaria italica
  Transcript Sequence Number=SeqID_17202
  Gene Ontology: Cellular component=nucleus
  Homolog annotation: Hit_ID=B9T4Q5; Match level="QueryCoverage=99%, HitCoverage=53%, E-value=1e-112, Identity=46%"; Hit description=Wd40 protein, putative
  Pfam annotation: Domain name=WD40; Domain location=166-204; Score =14.1; E_value=0.6; Accession=PF00400.24; Description=WD domain, G -beta repeat
  Pfam annotation: Domain name=WD40; Domain location=232-270; Score =22.8; E_value=0.0014; Accession=PF00400.24; Description=WD domain, G- beta repeat
  Pfam annotation: Domain name=WD40; Domain location=4-54; Score=24.4; E_value=0.00048; Accession=PF00400.24; Description=WD domain, G-beta repeat
  Pfam module annotation: Pfam domain module=WD40::WD40::WD40; Domain location=166-204::232-270::4-54
TATAMLVSELEGHEGDVTAVVVVPPPAAATATPAVKLASYCWTAGLDGVLIYWDFVAAEAVRKVQVGLPVHSMVVPNICRTSKGAEVSTPVAFISVEDMSKPANEAKALRGQMRVYDLMKGRKVGLLAETRKPEKIVASSSGEFLGITNKRKLHIWNIPTKDFKPDKIRKTKLRHTKNLTTLAFHPSERTVAAGDVTGRILIWRDFGNAKFSESSKSKVDEGRDGVRGDDDADMCTTWHWHSSRVRFLKFSSDGAYLFSGGLEGVIVVWQLDTGKRRYKPRLGSPLLFFVDSPDSSISCVSCTNNQVYLLKMPNMEVMRSIAGIKLPIASTSLGGSDRSVYGFDYTNRLVAIPTEDYCIQFYDLFENTEISELQVCQRNFQPVDDITMYISLVSLSIDGSLMCTVDVKLPEDELGGLVTLKFWNHGSSAG

SEQ ID NO: 83177 - protein, 86 aa, Setaria italica
  Transcript Sequence Number=SeqID_17203
  Homolog annotation: Hit_ID=B6T3H2; Match level="QueryCoverage=100%, HitCoverage=27%, E-value=6e-10, Identity=53%"; Hit description =Inhibitor of apoptosis-like protein
MAVQARHFSHDFPAAVGGSLFLDEYAGCAPTTAPAWPRDTTVLRDFPRSDLACNYGFVPRKRPRLAAAEAPAAGCFLDDQRAVMIP

SEQ ID NO: 83178 - protein, 216 aa, Setaria italica
  misc_feature (23)..(23): Xaa can be any naturally occurring amino acid
  misc_feature (35)..(35): Xaa can be any naturally occurring amino acid
  Transcript Sequence Number=SeqID_17204
  Gene Ontology: Cellular component=protein complex
  Homolog annotation: Hit_ID=B6TPI5; Match level="QueryCoverage=92%, HitCoverage=83%, E-value=7e-84, Identity=62%"; Hit description=26S proteasome non-ATPase regulatory subunit 10
  Pfam annotation: Domain name=Ank; Domain location=124-156; Score =41.2; E_value=4e-09; Accession=PF00023.22; Description=Ankyrin repeat
  Pfam annotation: Domain name=Ank; Domain location=157-189; Score =38.6; E_value=2.5e-08; Accession=PF00023.22; Description=Ankyrin repeat
  Pfam annotation: Domain name=Ank; Domain location=20-57; Score=15.5; E_value=0.21; Accession=PF00023.22; Description=Ankyrin repeat
  Pfam annotation: Domain name=Ank; Domain location=58-90; Score=30.8; E_value=5.7e-06; Accession=PF00023.22; Description=Ankyrin repeat
  Pfam annotation: Domain name=Ank; Domain location=91-123; Score=40.1; E_value=8.8e-09; Accession=PF00023.22; Description=Ankyrin repeat
  Pfam module annotation: Pfam domain module=Ank::Ank::Ank::Ank::Ank; Domain location=124-156::157-189::20-57::58-90::91-123
LRRSALPLLPRPTSSLRNEDGRXLVHVAAAAGHPXVVLALLEAGGEAAASVLNAKDEEGWAPIHSVASAGNAQIMDILLERGADVDLTTDGGRTALHYAASKGRLNIAEKLIAHRANVNKKDKFGCTPLHRAASTGNAELCEFLIEEGAEVDAVDRTGQTPLMHAVICDNQGVALLLIRHGADVDVEDKEGYTVLGRASNSLRPALIDAAKAMLEG

SEQ ID NO: 83179 - protein, 75 aa, Setaria italica
  Transcript Sequence Number=SeqID_17205
KLDVRTERLHQQNTQKYPCWFLDCQVSSKQMPIFTSIVFTALYMCHNMNMLIDMNNFSVEKIGILLRNLTPSVPE

SEQ ID NO: 83180 - protein, 73 aa, Setaria italica
  Transcript Sequence Number=SeqID_17206
  Gene Ontology: Mol. function=sodium:hydrogen antiporter activity; Cellular component=integral to membrane; Biological process=sodium ion transport
  Homolog annotation: Hit_ID=Q6VVA7; Match level="QueryCoverage=98%, HitCoverage=13%, E-value=9e-32, Identity=91%"; Hit description =Sodium/hydrogen exchanger
LAELLDLSGILTVFFCGIVMSHYTWHNVTESSRVTTKHAFATLSFIAEMFLFMYVGMDAFDIEKREFASNRSV

SEQ ID NO: 83181 - protein, 135 aa, Setaria italica
  misc_feature (89)..(89): Xaa can be any naturally occurring amino acid
  misc_feature (96)..(96): Xaa can be any naturally occurring amino acid
  misc_feature (107)..(107): Xaa can be any naturally occurring amino acid
  misc_feature (126)..(126): Xaa can be any naturally occurring amino acid
  Transcript Sequence Number=SeqID_17207
  Gene Ontology: Mol. function=transporter activity; Cellular component= integral to membrane; Biological process=transport
  Homolog annotation: Hit_ID=Q9SM37; Match level="QueryCoverage=91%, HitCoverage=49%, E-value=4e-56, Identity=88%"; Hit description =Putative gamma tonoplast intrinsic protein (TIP)
  Pfam annotation: Domain name=MIP; Domain location=1-117; Score=13.3; E_value=1.2e-10; Accession=PF00230.12; Description=Major intrinsic protein
TTDLLPTGRNSPTGTFGLTGISVWEALVLEIVMTFGLVYTVYATAVDPKKGSLGTIAPIAIGFIVGANILVGGAFDGASMNPAVSFGPXLVSWSWXDTQWVYWVGPXIGGGLAGVIYEVLFISPHXHEQLPTTDY

SEQ ID NO: 83182 - protein, 48 aa, Setaria italica
  Transcript Sequence Number=SeqID_17208
  Gene Ontology: Mol. function=solute:hydrogen antiporter activity; Cellular component=integral to membrane; Biological process =regulation of pH
  Homolog annotation: Hit_ID=Q67BJ5; Match level="QueryCoverage=83%, HitCoverage=7%, E-value=3e-16, Identity=100%"; Hit description =Sodium/hydrogen exchanger
RHFVTVFFQQIVIWWAGLMRGAVSIALAYNKFTRSGHTQLHGNAIMIT

SEQ ID NO: 83183 - protein, 73 aa, Setaria italica
  Transcript Sequence Number=SeqID_17209
RQIVLEQRVIDAASLKIQKVAEHSGRAVHLEPSTSATVSFCSQAISLRVSDSNCCKANQPTLLTSKRQRTQQI

SEQ ID NO: 83184 - protein, 49 aa, Setaria italica
  Transcript Sequence Number=SeqID_17210
  Gene Ontology: Mol. function=nucleoside-triphosphatase activity; Cellular component=protein complex; Biological process=protein catabolic process
  Homolog annotation: Hit_ID=Q8W3M9; Match level="QueryCoverage=77%, HitCoverage=19%, E-value=2e-13, Identity=94%"; Hit description=26S proteasome regulatory particle triple-A ATPase subunit5b (Fragment)
LQFQLDATDRADILDPALMRSGRLDRKIEFPHPSEEARARILQVWPAGH

SEQ ID NO: 83185 - protein, 88 aa, Setaria italica
  Transcript Sequence Number=SeqID_17211
  Gene Ontology: Mol. function=solute:hydrogen antiporter activity; Cellular component=integral to membrane; Biological process =regulation of pH
  Homolog annotation: Hit_ID=Q3I5L2; Match level="QueryCoverage=89%, HitCoverage=16%, E-value=4e-38, Identity=98%"; Hit description=Na/H vacuolar antiporter
VGRAAFVFPLSFLSNLTKKTPLEKITWRQQIVIWWAGLMRGAVSIALAYNKFTRSGHTQLHGNAIMITSTITVVLFSTMVSHLVPIFV

SEQ ID NO: 83186 - protein, 42 aa, Setaria italica
  Transcript Sequence Number=SeqID_17212
FLSPCRRQIVLEQRVIDAASLKIQWQSIQVELYIWSHLPRPL

SEQ ID NO: 83187 - protein, 160 aa, Setaria italica
  Transcript Sequence Number=SeqID_17213
  Gene Ontology: Mol. function=sodium:hydrogen antiporter activity; Cellular component=integral to membrane; Biological process=sodium ion transport
  Homolog annotation: Hit_ID=Q6VVA7; Match level="QueryCoverage=43%, HitCoverage=13%, E-value=2e-29, Identity=87%"; Hit description =Sodium/hydrogen exchanger
LKDSLCSSVKKVAEHSGRAVHLEPSTSATVSFCSQLLDLSGIFTVFFCGIVMSHYTWHNVTKSSRVTTKHAFATLSFIAEMFLFMYVGMDAFDIEKREFASNRCSSVMEPSLFEMLFSWPRRKPSASYFIDEIDAIGIKRFSSIFWRKKRMLVGQDYQAL

SEQ ID NO: 83188 - protein, 78 aa, Setaria italica
  Transcript Sequence Number=SeqID_17214
  Subcellular localization annotation: CTP_CleavageSite=40; ConfidenceScore=5.19e-01
LGSAVDDVARSGRFRRLISARRRLIVSRIACFASRPSSSPCSHEPNSAAAPARMVCFDQSHQVGTVITAVNSGPSLLL

SEQ ID NO: 83189 - protein, 434 aa, Setaria italica
  misc_feature (163)..(163): Xaa can be any naturally occurring amino acid
  Transcript Sequence Number=SeqID_17215
  Gene Ontology: Mol. function=metal ion binding
  Homolog annotation: Hit_ID=B6UFQ4; Match level="QueryCoverage=99%, HitCoverage=77%, E-value=1e-144, Identity=59%"; Hit description =Transposon protein
QKDIINLYAPEVTAPKNELEKEISYLRERNDSLENKVLHHDKLFEEMTKRQIVLEQGIIDAVSLKRQKVAEHSDRAVHLEPSTSATVSFCSQYELFLDGARVIGIDASNQIILASGRAAAVGAEHVITKISMGSAHEPFKVHLPPDTKAIRDMCILPGGSAIXFTSVGRKLSLFSMTTDSVVLQCDLPVPGWSCSADVSSSRHIYAGLQNGMLMVFDVRQTTRPLHSMVGLSTNPIHTLHSVIDNNGCRKILSASAVGPCMWDADNNQSRPHLLTEMDSQRVCISLACAPPSSDVLVASFRPKVEASEDATASQVYLSQTPTRPVGSGKLGHHALVRRTGNASFTEGPTCYANVSEVRMSKSAIIPYGDNQHLFAYGDESLHGVRTWQLPSFVIHADLCAHRQPILDLRYAESSGGGRYLGCLSEEKLEVFKIS

SEQ ID NO: 83190 - protein, 351 aa, Setaria italica
  misc_feature (257)..(257): Xaa can be any naturally occurring amino acid
  Transcript Sequence Number=SeqID_17216
  Gene Ontology: Mol. function=sodium:hydrogen antiporter activity; Cellular component=integral to membrane; Biological process=sodium ion transport
  Homolog annotation: Hit_ID=Q67BJ5; Match level="QueryCoverage=100%, HitCoverage=64%, E-value=1e-165, Identity=84%"; Hit description =Sodium/hydrogen exchanger
  Pfam annotation: Domain name=Na_H_Exchanger; Domain location=2-351; Score=82.2; E_value=1.9e-21; Accession=PF00999.13; Description =Sodiumhydrogen exchanger family
GLCTGVVILLTTKGKSSHILVFSEDLFFIYLLPPIIFNAGFQVKKKQFFRNFMTITLFGAVGTMISFFTISLGAIAIFSRMNIGTLDVGDFLAIGAIFSATDSVCTLQVLNQDETPLLYSLVFGEGVVNDATSVVLFNALQNFDLNHIDVAVVLKFLGNFCYLFLSSTFLGVFVGLLSAYMIKKLYIGRHSTDREVALMMLMAYLSYMLAELLDLSGILTVFFCGIVMSHYTWHNVTESSRVTTKHAFATLSFIAEXTFSFFLYVGMDALDIEKWEFASDSPGKSIGISSILLGLVLVGRAAFVFPLSFLSNLTKKTPLEKITWRQQIVIWWAGLMRGAVSIALAYNKFTR

SEQ ID NO: 83191 - protein, 138 aa, Setaria italica
  Transcript Sequence Number=SeqID_17217
  Gene Ontology: Mol. function=transporter activity; Cellular component= integral to membrane; Biological process=transport
  Homolog annotation: Hit_ID=O64964; Match level="QueryCoverage=81%, HitCoverage=45%, E-value=2e-56, Identity=96%"; Hit description =Aquaporin TIP1-1
  Pfam annotation: Domain name=MIP; Domain location=1-121; Score=41.0; E_value=1.9e-12; Accession=PF00230.12; Description=Major intrinsic protein
CWSLLSFLPLSSTGGLPTGTFGLTGISVWEALVLEIVMTFGLVYTVYATAVDPKKGSLGTIAPIAIGFIVGANILVGGAFDGASMNPAVSFGPALVSWSWGYQWVYWVGPLIGGGLAGVIYEVLFISHTHEQLPTTDY

SEQ ID NO: 83192 - protein, 62 aa, Setaria italica
  Transcript Sequence Number=SeqID_17218
  Gene Ontology: Mol. function=catalytic activity; Cellular component =endoplasmic reticulum; Biological process=metabolic process
  Homolog annotation: Hit_ID=Q7XPZ4; Match level="QueryCoverage=88%, HitCoverage=9%, E-value=4e-19, Identity=81%"; Hit description =OSJNBa0004N05.14 protein
HGAITSEGPKDLVLAPAVLHTAHRVATKGWGDLDPAYITMLPALLLRMIHNQIWISLSRYQT

SEQ ID NO: 83193 - protein, 187 aa, Setaria italica
  Transcript Sequence Number=SeqID_17219
  Gene Ontology: Mol. function=protein binding; Cellular component =intracellular; Biological process=signal transduction
  Homolog annotation: Hit_ID=B6UFN8; Match level="QueryCoverage=96%, HitCoverage=20%, E-value=7e-90, Identity=86%"; Hit description=ALG2 -interacting protein X
  Pfam annotation: Domain name=BRO1; Domain location=2-186; Score=3.8; E_value=7.5e-10; Accession=PF03097.10; Description=BRO1-like domain
RAHVHSLTFTWHDAFRGNKKCALASIHLEKAAVLFNLGAVYSQIALAADRSTDVGIRTACGAFQSAAGAFAWLRESGIAAKAVAAGATTVDVTPECAGMLEKLMLAQAQECFFEKVIGGGKPPALCSKVARQVGIFYEEAYASLSAPPLSQHFDKSWVSHVQLKAAQFYADACYRYSLDLHEKEEIA

SEQ ID NO: 83194 - protein, 60 aa, Setaria italica
  Transcript Sequence Number=SeqID_17220
TAQGYPREQEVIKTTITQEFPCPRILIRSSDKVTSPNIEAHELINQVNTPSSKLQRFVLL

SEQ ID NO: 83195 - protein, 151 aa, Setaria italica
  Transcript Sequence Number=SeqID_17221
  Gene Ontology: Mol. function=DNA photolyase activity; Cellular component=mitochondrion; Biological process=DNA repair
  Homolog annotation: Hit_ID=B9RV05; Match level="QueryCoverage=96%, HitCoverage=27%, E-value=5e-54, Identity=67%"; Hit description=DNA photolyase, putative
DKKVTDFAMASGIEVFTPVSHTLFDPAEIINKNGGRPPLTYQSFIAIAGEPPEPLMEEYSELPPVGDTGEYELLPVPTVEELGYGDISQEEIPPFRGGETEALRRMKESLENKEWVAKFEKPKGDPSAFLKPATTVLSPYLKFGCLFVPSN

SEQ ID NO: 83196 - protein, 104 aa, Setaria italica
  misc_feature (98)..(98): Xaa can be any naturally occurring amino acid
  Transcript Sequence Number=SeqID_17222
  Gene Ontology: Mol. function=nucleotide binding; Cellular component =nucleus; Biological process=defense response
  Homolog annotation: Hit_ID=Q339X0; Match level="QueryCoverage=96%, HitCoverage=16%, E-value=1e-27, Identity=57%"; Hit description=NB -ARC domain containing protein, expressed
TNHIECVYKMKALSDQDSKRLFFKRIFGLEDACPSYLKEVSGEILKKCGGLPLAIITISSLLANQSNKLKENWDYVRNSLGSNFDPSLEGMRQILSLXYTNLPY

SEQ ID NO: 83197 - protein, 23 aa, Setaria italica
  Transcript Sequence Number=SeqID_17223
WGSIGSIFDNYSVKRQIMISARR

SEQ ID NO: 83198 - protein, 73 aa, Setaria italica
  Transcript Sequence Number=SeqID_17224
  Gene Ontology: Mol. function=nucleic acid binding
  Homolog annotation: Hit_ID=Q8H6I9; Match level="QueryCoverage=71%, HitCoverage=8%, E-value=4e-13, Identity=75%"; Hit description =Putative oligouridylate binding protein
SPLPPPAPSPFLAGVSATDFLAYQRLALSKIAANPALMGQHALKQATLGMDTGASQAIYDGASWGSRRHSRST

SEQ ID NO: 83199 - protein, 193 aa, Setaria italica
  Transcript Sequence Number=SeqID_17225
  Gene Ontology: Mol. function=nucleic acid binding
  Homolog annotation: Hit_ID=Q9XEV3; Match level="QueryCoverage=88%, HitCoverage=33%, E-value=2e-47, Identity=62%"; Hit description=TIA-1 related protein
  Pfam annotation: Domain name=RRM_1; Domain location=28-94; Score =63.2; E_value=9.6e-16; Accession=PF00076.14; Description=RNA recognition motif. (a.k.a. RRM, RBD, o
IASAASSEAGQENPNEVGPENNPLFTTVYVGGLPHEASNNDVHLFFHSLGAGLIEEVRVTRDKGFGFVRYSTHEEAALAIQMGNGQLIGGRPIRCSWGNKPTPPGTASSPLPPPAPSPFLAGVSATDFLAYQRLALSKIAANPALMGQHALKQATLGMDTGASQAIYDGGFQGINAATAAAQQQQQQQQLMYF

SEQ ID NO: 83200 - protein, 536 aa, Setaria italica
  misc_feature (220)..(220): Xaa can be any naturally occurring amino acid
  Transcript Sequence Number=SeqID_17226
  Gene Ontology: Mol. function=unfolded protein binding; Cellular component=chaperonin-containing T-complex; Biological process =cellular protein metabolic process
  Homolog annotation: Hit_ID=Q9LFR8; Match level="QueryCoverage=100%, HitCoverage=99%, E-value=0.0, Identity=81%"; Hit description=TCP-1 chaperonin-like protein
  Pfam annotation: Domain name=Cpn60_TCP1; Domain location=29-530; Score=523.6; E_value=2.5e-154; Accession=PF00118.16; Description=TCP- 1cpn60 chaperonin family
MSLRVLNPNAEVLNKSAALHMNINAAKGLMDVLKTNLGPNGTIKMLVGGSGDLKLTKDGNTLLREMQIQNPTAIMIARTATAQDDTSGDGTTSTVLFIGELMKQSERCIDEGTHPRFLVDGFDVAKRATLEFLEKFKTLVVIGDEPDRDTLKMIARTTLRTKLYEGLADQLTDIVVNAVLCIRKPEEPIDLFMVEIMHMRHKFDVDTRLVEGLVLDHGSXRHPDMKRRAENCYILTCNVSLEYEKSEINAGFFYSNADQREKMVAAERRQVDERVKRIIELKNKVCAGGDKNFVVINQKGIDPPSLDLLARAGIIALRRAKRRNMERLVLACGGEAVNSVDDLTEDCLGWAGLVYEHVLGEEKYTFVENVKNPLSCTILIKGPNDHTIAQIKDAVRDGLRSVKNTVEDEAVVLGAGAFEVAAKKHLLDNVKKTVKGRAQLGVEAFAEALLVIPKTLAENSGLDTQDVIVSLQNEHDRGLVVGLNHHSGEPIDPQMEGIFDNYSVKRQIINSGPIIASQLLLVDEVIRAGRNMRKPT

SEQ ID NO: 83201 - protein, 87 aa, Setaria italica
  misc_feature (68)..(68): Xaa can be any naturally occurring amino acid
  misc_feature (81)..(81): Xaa can be any naturally occurring amino acid
  Transcript Sequence Number=SeqID_17227
  Homolog annotation: Hit_ID=B9S1S6; Match level="QueryCoverage=96%, HitCoverage=11%, E-value=4e-23, Identity=69%"; Hit description =Component of oligomeric golgi complex, putative
MAAALAPGVSRKLKKVLETRTDSPDLLASLGALSTFYVQNTPQARRNLKSSIEQRALAINRHFLDASXLPAHKALDRVEGXVHALND

SEQ ID NO: 83202 - protein, 112 aa, Setaria italica
  Transcript Sequence Number=SeqID_17228
SVHPPLPVVRADRGARFDPRFMEDAAAGRAGRLEPASVKMMVAPGFHVYLAGAGVVKCRVVCFYSSGSNGRTGGHRDGGSSTNGSVGLGSSCSDMNGSATDVVDSCKSSRVG

SEQ ID NO: 83203 - protein, 102 aa, Setaria italica
  Transcript Sequence Number=SeqID_17229
  Gene Ontology: Mol. function=transferase activity, transferring glycosyl groups; Biological process=metabolic process
  Homolog annotation: Hit_ID=B6TRK5; Match level="QueryCoverage=99%, HitCoverage=21%, E-value=2e-30, Identity=66%"; Hit description =Anthocyanidin 3-O-glucosyltransferase
GSQVVGIRTSMEFEPEWLRLLGELYQKPVIPVGLFPPPPTQDVAGHEATMRWLDGQAPGSVVYAAFGSEAKLASAQLEAIAMGLEASGLPFLWAFRAPGAGA

SEQ ID NO: 83204 - protein, 362 aa, Setaria italica
  misc_feature (41)..(41): Xaa can be any naturally occurring amino acid
  Transcript Sequence Number=SeqID_17230
  Gene Ontology: Mol. function=catalytic activity; Biological process =Mo-molybdopterin cofactor biosynthetic process
  Homolog annotation: Hit_ID=B4FAT0; Match level="QueryCoverage=97%, HitCoverage=73%, E-value=1e-178, Identity=87%"; Hit description =Sulfurtransferase MOCS3
  Pfam annotation: Domain name=MoeZ_MoeB; Domain location=243-329; Score=147.6; E_value=3.9e-41; Accession=PF05237.5; Description =MoeZMoeB domain
  Pfam annotation: Domain name=ThiF; Domain location=106-240; Score =218.3; E_value=1.9e-62; Accession=PF00899.13; Description=ThiF family
  Pfam module annotation: Pfam domain module=MoeZ_MoeB::ThiF; Domain location=243-329::106-240
MDGGGVGRRRREAIEGELKKLRAQREELDGRIRLLESQLEXGPAGVDGAAAGRGVVDGSCDGSVACRSRGGNGFAPDGGLPADMIYRYSRHLLLPDFGVEGQRKLSQSSILVVGAGGLGSPVALYLAACGVGCLGIVDGDDVELNNLHRQIIHKEAYVGQAKVKSAADACHEINSSIKVVEHHHTLKPCNALEIVRKYDIVVDATDNLPTRYMISDCCVLLNKPLISGAALGLEGQLTVYHHNGSPCYRCLFPSPPPVAACQRCSDSGVLGVVPGVIGCLQALEAIKVATAVGEPLCGRMLLFDALSARIRIVKLRGSLPDCTLCGENSVFTEQDFQKFDYENFTQSPMSDKTAPSVKLLPE

SEQ ID NO: 83205 - protein, 245 aa, Setaria italica
  Transcript Sequence Number=SeqID_17231
  Gene Ontology: Mol. function=catalytic activity; Biological process =metabolic process
  Homolog annotation: Hit_ID=B6TNK6; Match level="QueryCoverage=100%, HitCoverage=51%, E-value=1e-122, Identity=86%"; Hit description =Sulfurtransferase MOCS3
  Pfam annotation: Domain name=MoeZ_MoeB; Domain location=8-94; Score =147.6; E_value=3.9e-41; Accession=PF05237.5; Description=MoeZMoeB domain
  Pfam annotation: Domain name=Rhodanese; Domain location=132-237; Score=37.7; E_value=4.6e-08; Accession=PF00581.12; Description =Rhodanese-like domain
  Pfam module annotation: Pfam domain module=MoeZ_MoeB::Rhodanese; Domain location=8-94::132-237
QLTVYHHNGSPCYRCLFPSPPPVAACQRCSDSGVLGVVPGVIGCLQALEAIKVATAVGEPLCGRMLLFDALSARIRIVKLRGSLPDCTLCGENSVFTEQDFQKFDYENFTQSPMSDKTAPSVKLLPENARITSRDYKRLVDNGEPHLLLDVRPTHHFQIASISPSLNIPLSMLEEKLPTLETSLKEKGAVSALGKEPSLVVLCRRGNDSQRAVELLREKGFASAKDIIGGLQAWGQDVDPDFPVY

SEQ ID NO: 83206 - protein, 84 aa, Setaria italica
  Transcript Sequence Number=SeqID_17232
  Gene Ontology: Mol. function=chlorophyllase activity; Cellular component=chloroplast; Biological process=chlorophyll catabolic process
  Homolog annotation: Hit_ID=B6U4J0; Match level="QueryCoverage=100%, HitCoverage=24%, E-value=1e-17, Identity=72%"; Hit description =Chlorophyllase-2
  Subcellular localization annotation: CTP_CleavageSite=56; ConfidenceScore=5.16e-01
NAAAAVIGWLAGGGLSSALPPGVRADATKVSVSGHSRGGKVAFALALGHAKLAIPLAALVAVDPVDGMGMGRQTPPPILTGRSG

SEQ ID NO: 83207 - protein, 70 aa, Setaria italica
  misc_feature (70)..(70): Xaa can be any naturally occurring amino acid
  Transcript Sequence Number=SeqID_17233
NKTEVMAHSLSETSPYTESNKQTDYHCQAVSKRKRAQSTHEKLKGHALKLMQQSVALFTCHRLQPSVCFX

SEQ ID NO: 83208 - protein, 61 aa, Setaria italica
  Transcript Sequence Number=SeqID_17234
  Gene Ontology: Mol. function=calcium ion binding
  Homolog annotation: Hit_ID=Q10P21; Match level="QueryCoverage=98%, HitCoverage=17%, E-value=4e-18, Identity=75%"; Hit description=39 kDa EF-Hand containing protein, putative, expressed
MQVVSELTHGTSQGEVSKAEFQEALSDILLGMAAGLKRDPIVILRMDGEDLRDFAAGSRYE

SEQ ID NO: 83209 - protein, 400 aa, Setaria italica
  Transcript Sequence Number=SeqID_17235
  Gene Ontology: Mol. function=calcium ion binding
  Homolog annotation: Hit_ID=Q10P21; Match level="QueryCoverage=81%, HitCoverage=94%, E-value=1e-128, Identity=74%"; Hit description=39 kDa EF-Hand containing protein, putative, expressed
  Pfam annotation: Domain name=efhand; Domain location=56-84; Score =20.0; E_value=0.01; Accession=PF00036.24; Description=EF hand
MERSSSWFRWWRRRKAREGQAAGAGEEEGHDDHHKVVVDGSEIRELVEDREAFGMLVDSKFRQLDADGDGRLSVRELRPAVADIGAALGLPAEGASPNTNHICSEVVSELTHGTSQGEVSKAEFQEALSDILLGMAAGLKRDPIVILRMDGEDLRDFAAGSRYEPSAAAIFPQVGSEGVPLRQCLLAALQELSVDHGVPPASDAWVVENIVEPALQQLPADRLEQPAASRDGFLQQLKMLLGAVAERLQEQPVIVAHTENTYDGSGVKRLLANKFELDKLLDSVWRGVPSEHKNKASKECLVAALDKMADAASLPHYGAVKQVDAVVDEAIKTANAGDGKTVDEAQFKKFLTDTLGAIMRQLNSNPVFVSTNTVVHEPLSSGASSALFSSPQLVTSSPSK

SEQ ID NO: 83210 - protein, 134 aa, Setaria italica
  Transcript Sequence Number=SeqID_17236
  Gene Ontology: Mol. function=oxidoreductase activity; Biological process=oxidation reduction
  Homolog annotation: Hit_ID=B5M6A0; Match level="QueryCoverage=97%, HitCoverage=35%, E-value=3e-48, Identity=68%"; Hit description =Leucoanthocyanidin dioxygenase-like protein
  Pfam annotation: Domain name=2OG-FeII_Oxy; Domain location=16-117; Score=147.3; E_value=4.7e-41; Accession=PF03171.12; Description=2OG -Fe(II) oxygenase superfamily
VEAGRLQEAFGGAGGEGACMRVNFYPRCPQPELTLGVAAHSDPGGMTMLLVDDHVRGLQVRSPDGQWITVEPVPDAFIVNVGDQIQVLSNAAYKSVEHRVTVSAAEERLSMAFFYNPRSDLPIAPMPELVAPGR

SEQ ID NO: 83211 - protein, 39 aa, Setaria italica
  Transcript Sequence Number=SeqID_17237
MLLVSQAANGSLSARRLPSKPPGPAAPNPYPLFANPRLP

SEQ ID NO: 83212 - protein, 115 aa, Setaria italica
  Transcript Sequence Number=SeqID_17238
  Pfam annotation: Domain name=CHCH; Domain location=31-72; Score=16.1; E_value=0.039; Accession=PF06747.5; Description=CHCH domain
MESSSSNTRNVPLSVSQRPLHVTDADEEDESVKQLNECATIYLSLQDCLVESNRNWKACQAQVQALKACQAKRTKVIRPNSLHLQVADIIKCQHGCQFSGGRKQMWQIFISNGWA

SEQ ID NO: 83213 - protein, 78 aa, Setaria italica
  Transcript Sequence Number=SeqID_17239
MIKSYFDRKFCHSCASTSEAFSAEKKKSRIRKAWDGTKVIYNVASWGATAVGVYNNRALLTVATTAFRTSCRVISKFL

SEQ ID NO: 83214 - protein, 205 aa, Setaria italica
  misc_feature (155)..(155): Xaa can be any naturally occurring amino acid
  misc_feature (186)..(186): Xaa can be any naturally occurring amino acid
  Transcript Sequence Number=SeqID_17240
MEPSPSSSSPAAERRRSPEVRRVRKRALEEVLEQVQRAVEMLRDADADLGTSLSEDTAAAPPEGEDRKAGVGDDADDAASSSVASDSDYETTQMCDLLKSKVESLEFLKKLDGIQKSVYQDGTVEPDVSWDIIKAVDLWEDDDPDDGSFYVSPCXVVLNAECHVVQDLSPDQLQKALRKTFSAEKXKSRIRKAWDGTKVIYNVAS

SEQ ID NO: 83215 - protein, 290 aa, Setaria italica
  Transcript Sequence Number=SeqID_17241
  Gene Ontology: Mol. function=drug transporter activity; Cellular component=membrane; Biological process=multidrug transport
  Homolog annotation: Hit_ID=Q9LUH2; Match level="QueryCoverage=100%, HitCoverage=60%, E-value=8e-68, Identity=46%"; Hit description =Aberrant lateral root formation 5
  Pfam annotation: Domain name=MatE; Domain location=174-290; Score =6.6; E_value=0.00095; Accession=PF01554.10; Description=MatE
LSGGLETLCGQAYGAGLYGKLGLYLQSSLIMSTVASSLVSVLWVFTEPLLLLLRQEPRVSREAAAFVRPQIPGLFAFAFLQCLLRYLQMQSVVIPLVVCSVAPFVLHVVLTHLLVNVLGLGLAGAPAAISVTFAASCLMLLAYILRSEAFSETWKGFSAEAFRYVLPTAKLAAPSAVMVCLEIWAFELLVLVAGLLPNSTVSTSLIAICTSTESIAYMITYGFGAAASTRVSNEIGAGNVDKAKNAVSVTMKLSVLLGISFVVLLAFGHGLWASLFSGSAVIVSEFATIR

SEQ ID NO: 83216 - protein, 163 aa, Setaria italica
  Transcript Sequence Number=SeqID_17242
  Gene Ontology: Mol. function=solute:hydrogen antiporter activity; Cellular component=integral to membrane; Biological process =regulation of pH
  Homolog annotation: Hit_ID=B9RRD7; Match level="QueryCoverage=99%, HitCoverage=19%, E-value=2e-29, Identity=39%"; Hit description =Na(+)/H(+) antiporter, putative
LYDPSGQFVRAKRRTLEDAPPSADLRVLTCLYSEDHAAPLIDLLEASGSSRDSPVSLIVLHLTELVGRAASVLKPHRKSSSTSNPTPSDRIVNAFRYFEQQQAAPGAVTVSPYVAQAPYSSMHHDVCSLAHSRKANLILLPFHKSSDGARATANNAIRSINRA

SEQ ID NO: 83217 - protein, 301 aa, Setaria italica
  Transcript Sequence Number=SeqID_17243
  Gene Ontology: Mol. function=electron carrier activity; Cellular component=chloroplast; Biological process=tRNA processing
  Homolog annotation: Hit_ID=C1JZU4; Match level="QueryCoverage=94%, HitCoverage=61%, E-value=1e-152, Identity=93%"; Hit description =Carotenoid isomerase 2
LWGINYPVGGVGGIATSLADGLVAKGSEIRYKANVTNVLLENGKAVGVRLSNGKEFFAKTVISNATRWDTFGKLLKDKELPEEEKNFQKNYVKAPSFLSIHMGVKASVLPAGTDCHHFVLEDDWNNLEKPYGSIFLSIPTVLDPSLAPEGHHILHIFTTAGIEDWEGLSRKEYEEKKEVVANEIIRRLEKKLFPGLQDSIVLKEVGSPKTHRRFLARNDGTYGPMPRGKPKGLLAMPFNTTSIDGLYCVGDSCFPGQGVIAVAFSGIMCAHRVAADVGLEQKSPVLDAGLLGLLRWLRTLA

SEQ ID NO: 83218 - protein, 463 aa, Setaria italica
  Transcript Sequence Number=SeqID_17244
  Gene Ontology: Mol. function=RNA polymerase II transcription factor activity; Cellular component=transcription factor TFIIE complex; Biological process=transcription initiation from RNA polymerase II promoter
  Homolog annotation: Hit_ID=Q9ZVS9; Match level="QueryCoverage=72%, HitCoverage=66%, E-value=1e-115, Identity=60%"; Hit description =F15K9.12 protein
  Pfam annotation: Domain name=TFIIE_alpha; Domain location=36-246; Score=27.1; E_value=3.4e-08; Accession=PF02002.9; Description=TFIIE alpha subunit
MSTIPSIEPFNRLVRLAARAFYDDISMKGDNQPKTSRGDNRGMAVVVLDALTRRQWVREEDLAKALKLHSKQLRRILRFFEEEKLVTRDHRKENAKGAKVHNAAAAAAGDGPPGTKEGEEKVKMHTHSYCCLDYAQICDVVRYRIHRMKKKLKDELDSRNTIQHYICPSCNKRYSAFDALQLVSYTDEYFHCENCNGELVAESDKLASEEMGDGDDNVRKRRREKLKDMQQRIEEQLKPLVAQLDRVKNLPPPEFGSLQTWERANVGAFANGDPSAADSSRNSQGQYGTPMPYMGETKVEVEIADGVKEEGAESGKNGSELKVLPPWMIKDGMNLTKEQRGETSKVSKLDEESEAKDDKKQDSKDDQSIQEEYIKAYYEALRKKQEEEEAKRRMQQEGETFVSDSQSERQVGKKYKREDEDEGIEWEEQQPTGNATEQYKLADLNAEAQESGDDEDDLEWEEG

SEQ ID NO: 83219 - protein, 370 aa, Setaria italica
  Transcript Sequence Number=SeqID_17245
  Gene Ontology: Mol. function=protein serine/threonine kinase activity; Biological process=protein amino acid phosphorylation
  Homolog annotation: Hit_ID=Q8H4I0; Match level="QueryCoverage=98%, HitCoverage=54%, E-value=1e-149, Identity=68%"; Hit description =Putative receptor-type protein kinase LRK1
  Pfam annotation: Domain name=APH; Domain location=169-358; Score= -19.5; E_value=0.061; Accession=PF01636.15; Description =Phosphotransferase enzyme family
  Pfam annotation: Domain name=Lectin_legB; Domain location=2-81; Score= -79.7; E_value=6.2e-05; Accession=PF00139.11; Description=Legume lectin domain
  Pfam annotation: Domain name=Pkinase; Domain location=166-368; Score =106.8; E_value=7.3e-29; Accession=PF00069.17; Description=Protein kinase domain
  Pfam annotation: Domain name=Pkinase_Tyr; Domain location=166-368; Score=34.5; E_value=5e-16; Accession=PF07714.9; Description=Protein tyrosine kinase
  Pfam module annotation: Pfam domain module=APH::Lectin_legB::Pkinase:: Pkinase_Tyr; Domain location=169-358::2-81::166-368::166-368
GSFHGMNLISGEVMQAWVDYDGEAARINVTIAPIAVTKPVRPLVSARYNLSNVLREPSYIGFSSATGPINSHHYILGWSFAMDGFAPAIDIAKLPKLPRLGPKPRSKVLEILVPIATAAFIVTLGTLVVVVVRRRMRYAELREDWEVDFGPHRFSYKDLFHATDGFEDKHLLGKGGFGRVYRGLLPKSKVEVAVKRVSHESRQGMKEFVAEVASIGRIRHRNLVQLLGYCRRKGELLLVYDYMSNGSLDKYLHYEVERPTLDWAQRFQIIKGVASGLLYLHEKWDKVVVHRDIKASNVLLDKEMNGRLGDFGLARLYDHGTDPQTTHMVGTMGYLAPELLRTGKASPLTDVFAFGTFLLEVTCGQRHIRH

SEQ ID NO: 83220 - protein, 68 aa, Setaria italica
  Transcript Sequence Number=SeqID_17246
  Homolog annotation: Hit_ID=B6SY32; Match level="QueryCoverage=95%, HitCoverage=12%, E-value=2e-15, Identity=64%"; Hit description=C -terminal zinc-finger
MSHRNMVWTHQSVNPGWEQVHVQVQTESSYYGGPGSDPSNLGVQVAVGVPGSTANVGICDLRNHEHQH

SEQ ID NO: 83221 - protein, 393 aa, Setaria italica
  Transcript Sequence Number=SeqID_17247
  Gene Ontology: Mol. function=metal ion transmembrane transporter activity; Cellular component=membrane; Biological process=metal ion transport
  Homolog annotation: Hit_ID=B6TIV1; Match level="QueryCoverage=93%, HitCoverage=95%, E-value=0.0, Identity=88%"; Hit description=Metal ion transporter
  Pfam annotation: Domain name=CorA; Domain location=25-391; Score =566.4; E_value=3.3e-167; Accession=PF01544.10; Description=CorA-like Mg2+ transporter protein
EPPRRWRWLRRGRGPGPGSEGKKRGASRSWILFDAAGEERVLDADKYAIMHRVDINARDLRILDPLLSYPSTILGRERAIVLNLEHIKAIITSEEVLLRDPSDENVIPVVEELRRRLAPSSATQHDGKENLSGQHDVEGAEEDESPFEFRALEVTLEAICSFLDARTTELETDAYPALDELTSKISSRNLDRVRKLKSGMTRLTARVQKVRDELEQLLDDDDDMADLYLSRKLAGASSPVSGSGGPNWFPASPTIGSKISRASRASVATVHGNENDVEELEMLLEAYFMQIDGTLNKLTTLREYIDDTEDYINIQLDNHRNQLIQLELFLSSGTVCLSLYSLVAGVFGMNIPYTWNDNHGYVFKWVVLVSGLFCAFMFVSIVAYARHKGLVGS

SEQ ID NO: 83222 - protein, 69 aa, Setaria italica
  Transcript Sequence Number=SeqID_17248
SDKTLAGSFKWEKSCTTLDWNPWDKKTESQLSHDAPCLDRAFELQVISCYLHNKICDFFWLGTSRLLHQ

SEQ ID NO: 83223 - protein, 68 aa, Setaria italica
  Transcript Sequence Number=SeqID_17249
FEITAELRSFLSPTKKPITRDKKKEQTEFHSRSRAPNHPTTVIFSKETEGDSRAYLASVLRISRAGVE

SEQ ID NO: 83224 - protein, 273 aa, Setaria italica
  Transcript Sequence Number=SeqID_17250
  Gene Ontology: Mol. function=catalytic activity; Cellular component =plasma membrane
  Homolog annotation: Hit_ID=Q0JAA0; Match level="QueryCoverage=100%, HitCoverage=85%, E-value=1e-143, Identity=86%"; Hit description =Probable protein phosphatase 2C 44
  Pfam annotation: Domain name=PP2C; Domain location=21-264; Score =222.3; E_value=1.2e-63; Accession=PF00481.13; Description=Protein phosphatase 2C
CLSSSSSDTGKGQSKLSSNKVTHGFHLVEGRSGHDMEDYHVAEYRYENDHELGLFAIYDGHLGDSVASYLKANLFNNILKEPLFWSDPQESIKNAYSSTNKYILENSKQLGPGGSTAVTAIVVDGKDMWIANIGDSRAVVCERGTANQLTVDHEPHTTNERKRIEKQGGFVSTFPGDVPRVNGQLAVARAFGDQSLKAHLSSEPDVKHIQINPSVEFVILASDGLWKVMKNQEAVDLVKSTKDPQTAAKRLTSEALGRMSKDDISCIVIRFRC

SEQ ID NO: 83225 - protein, 75 aa, Setaria italica
  Transcript Sequence Number=SeqID_17251
  Gene Ontology: Mol. function=protein phosphatase type 2A regulator activity; Cellular component=protein phosphatase type 2A complex; Biological process=signal transduction
  Homolog annotation: Hit_ID=B9RPC6; Match level="QueryCoverage=89%, HitCoverage=9%, E-value=1e-16, Identity=57%"; Hit description=WD -repeat protein, putative
  Pfam annotation: Domain name=WD40; Domain location=31-68; Score=22.3; E_value=0.002; Accession=PF00400.24; Description=WD domain, G-beta repeat
GKFSSCAFHPTYPSLLVIGCYQSLELWDMAENRSMTIAAHDSLISAVASSSSGLVASTGHDKYVKLWRLGHLRHA

SEQ ID NO: 83226 - protein, 58 aa, Setaria italica
  Transcript Sequence Number=SeqID_17252
SDYQKTKDQSKTLLTSKLSGIYNFIQNLAPFLIVVQMHTNIFLTRLYSQFFIQCCCLR

SEQ ID NO: 83227 - protein, 231 aa, Setaria italica
  Transcript Sequence Number=SeqID_17253
  Gene Ontology: Mol. function=zinc ion binding; Cellular component =intracellular; Biological process=regulation of transcription, DNA -dependent
  Homolog annotation: Hit_ID=A6N8R9; Match level="QueryCoverage=70%, HitCoverage=56%, E-value=2e-90, Identity=93%"; Hit description=WIP4
  Pfam annotation: Domain name=zf-C2H2; Domain location=125-147; Score =23.3; E_value=0.001; Accession=PF00096.18; Description=Zinc finger, C2H2 type
  Pfam annotation: Domain name=zf-C2H2; Domain location=151-176; Score =6.8; E_value=2.2; Accession=PF00096.18; Description=Zinc finger, C2H2 type
  Pfam annotation: Domain name=zf-C2H2; Domain location=41-63; Score =21.3; E_value=0.004; Accession=PF00096.18; Description=Zinc finger, C2H2 type
  Pfam module annotation: Pfam domain module=zf-C2H2::zf-C2H2::zf-C2H2; Domain location=125-147::151-176::41-63
GAGDGDEVVPLGFASTPIGRLNKGQYWIPTPAQILIGPTQFSCPVCYKTFNRYNNMQMHMWGHGSQYRKGPESLRGTQPTAMLRLPCYCCAAGCRNNIDHPRARPLKDFRTLQTHYRRKHGIKPFMCRKCGKAFAVRGDWRTHEKNCGKLWYCACGSDFKHKRSLKDHIRAFGRGHAACGIDCFDDLDDDDRDPSSEVDHATTNAGTTTSSAAAAGGAASSKQQHHWKPPP

SEQ ID NO: 83228 - protein, 449 aa, Setaria italica
  Transcript Sequence Number=SeqID_17254
  Gene Ontology: Mol. function=metal ion binding
  Homolog annotation: Hit_ID=Q9ZVT8; Match level="QueryCoverage=80%, HitCoverage=41%, E-value=8e-67, Identity=39%"; Hit description =F15K9.3
  Pfam annotation: Domain name=zf-C3HC4; Domain location=395-434; Score= 11.8; E_value=0.0045; Accession=PF00097.17; Description=Zinc finger, C3HC4 type (RING finger)
  Subcellular localization annotation: CTP_CleavageSite=69; ConfidenceScore=5.75e-01
ASNLKGSSKVGKGFAASITGSDVSVDLSFTGTLSSPFDAKVVSNSNPAPAASTDLSLSLPSSSDGLAPSSNHDSNTEGVDSSGKINFSYDEEQKVWIPQDKKDETVLILVQRQKELQAHMRDWTDWAQQKVMQVAHRLAKEKEELQSLRKEKEDADRQQEERHHSEESNRKKLLEMESAISRANAQLERADASARRREAENAQLMLQMEAAKRHAAESATNISELLKKDENSRKRSQRWESERALLQEDLAAQKSRLSRVQEQLQHAKEQKDQVQARWKQEEAAKMEAIALVTSERKERDQIETSVRSEENLLHLKAANDTQRYKSEIRALEQQIVQLKVSMDSSKVAAPKWGADNKTYALHLSEGRKNSNAQILSNIAVPQDLDFDDIQRDRECVMCLSEEMSVVFLPCAHQVVCAKCSDLHEKQGMKECPSCRTPIQRRVCARPAGC

SEQ ID NO: 83229 - protein, 69 aa, Setaria italica
  Transcript Sequence Number=SeqID_17255
FQNDAPSDIQEHSSCFLIIGLKCVKRSSRKMDHRSQPTFCTILPCAMISYYLNSQTTCALWQTTAEFET

SEQ ID NO: 83230 - protein, 154 aa, Setaria italica
  misc_feature (66)..(66): Xaa can be any naturally occurring amino acid
  Transcript Sequence Number=SeqID_17256
  Gene Ontology: Mol. function=triacylglycerol lipase activity; Biological process=lipid metabolic process
  Homolog annotation: Hit_ID=Q9MA47; Match level="QueryCoverage=50%, HitCoverage=7%, E-value=8e-15, Identity=45%"; Hit description =T20M3.5 protein
MHCCTPWSLDVSHCRESRDDQFQEDYFYECGEGYRLSRLNNGTELTSASNDHISTISSSEGQSPEXVYLPGLVVHVVPVKKSTSPLQKTTVTRRKNRSYKAFIANRKDFMDLVVSPRMFLDHLPWRCQYAMQKVIEAQKREQLIHDSSAAEDAV

SEQ ID NO: 83231 - protein, 244 aa, Setaria italica
  misc_feature (223)..(223): Xaa can be any naturally occurring amino acid
  Transcript Sequence Number=SeqID_17257
  Gene Ontology: Mol. function=DNA binding; Cellular component=nucleus; Biological process=ubiquitin-dependent protein catabolic process
  Homolog annotation: Hit_ID=B9SI17; Match level="QueryCoverage=96%, HitCoverage=41%, E-value=1e-95, Identity=71%"; Hit description=DNA damage-binding protein, putative
  Pfam annotation: Domain name=WD40; Domain location=37-75; Score=20.2; E_value=0.0085; Accession=PF00400.24; Description=WD domain, G-beta repeat
  Pfam annotation: Domain name=WD40; Domain location=81-120; Score =24.9; E_value=0.00033; Accession=PF00400.24; Description=WD domain, G-beta repeat
  Pfam module annotation: Pfam domain module=WD40::WD40; Domain location=37-75::81-120
IYLLGYWYLNTDKGLLLVADNFGNPYSLDRRSKTRIGHPTLIHKKGSKVTSLHCNPARPEVLLSSGNDHYARIWDTRKLEANSPLASLAHGRVVNSGYFSPQSGNKILTTCQDNRIRVWDYIFGDLQSPSREIVHSHDFNRHLTPFKAEWDPKDYTETVAVIGRYISENYNGVALHPIDFIDTSSGKLLAEVMDPDITTISPVNKLHPQDDILATGSSRWSLXSIFIWKPKIEDEFTEERTKQN

SEQ ID NO: 83232 - protein, 341 aa, Setaria italica
  misc_feature (128)..(128): Xaa can be any naturally occurring amino acid
  misc_feature (246)..(246): Xaa can be any naturally occurring amino acid
  Transcript Sequence Number=SeqID_17258
  Homolog annotation: Hit_ID=B6TUA3; Match level="QueryCoverage=100%, HitCoverage=70%, E-value=1e-130, Identity=69%"; Hit description =Rhodopsin-like receptor
  Pfam annotation: Domain name=DUF2215; Domain location=5-293; Score =347.3; E_value=3e-101; Accession=PF10225.1; Description =Uncharacterized conserved protein (DU
PSRSVVVYTEEEFLLHRVVFLVLGLVLMVVAHTLSESVVFYYGGAMTIGIFLVILIILFQGMKLLPTGRKSSLAIFAYSTVVGMTTYFLHYLSGLLRSVLVEIGIAEDMHNPLGIFLLVLVVLAGAWXGYWGVRKLVLTEDGSVDEGVAYFVEWAILIVSAVMILQSSLDYLFAFAALVFCVVIKGIARIEGKSRFLRFFSRGLSSETAKHSSRYGDLGEEYSTMNGAYQDGFSKLHGHLRRTPRXNSPLAGSGKTLSQGAARDNYYSTYHTTPDRKKFSDEEYKAFTKEETNKAMKHLLSSPDFNRWALANADRISVTPPGGSYSSSSSSQQRHRLFGLF

SEQ ID NO: 83233 - protein, 57 aa, Setaria italica
  Transcript Sequence Number=SeqID_17259
  Gene Ontology: Mol. function=isomerase activity; Cellular component =nucleus
  Homolog annotation: Hit_ID=B9RYS2; Match level="QueryCoverage=100%, HitCoverage=53%, E-value=2e-22, Identity=82%"; Hit description=Fad NAD binding oxidoreductases, putative
  Pfam annotation: Domain name=Yippee; Domain location=1-57; Score =49.1; E_value=3.2e-14; Accession=PF03226.6; Description=Yippee putative zinc-binding protein
GRNGRAFLFSHAMNISVGTKEDRQLMTGLHTVADIYCRDCRGVLGWKYERAYEESQR

SEQ ID NO: 83234 - protein, 45 aa, Setaria italica
  Transcript Sequence Number=SeqID_17260
  Homolog annotation: Hit_ID=B6U591; Match level="QueryCoverage=68%, HitCoverage=26%, E-value=8e-10, Identity=90%"; Hit description =Protein yippee-like
  Pfam annotation: Domain name=Yippee; Domain location=1-41; Score= -55.6; E_value=0.0041; Accession=PF03226.6; Description=Yippee putative zinc-binding protein
MAELVGPRVYSCCHCRNHVCLHDDIISKAFQVKREGSCWGFQIRA

SEQ ID NO: 83235 - protein, 459 aa, Setaria italica
  Transcript Sequence Number=SeqID_17261
  Gene Ontology: Mol. function=histone acetyltransferase activity; Cellular component=cytoplasm; Biological process=metabolic process
  Homolog annotation: Hit_ID=Q8LPU4; Match level="QueryCoverage=96%, HitCoverage=94%, E-value=0.0, Identity=82%"; Hit description=Histone acetyltransferase type B catalytic subunit
  Pfam annotation: Domain name=Hat1_N; Domain location=22-179; Score =139.2; E_value=1.3e-38; Accession=PF10394.1; Description=Histone acetyl transferase HAT1 N-term
TPPPPPTPKKRRRVGFSGIDAGVEANECMKVFLARNSDEVGSEDCTSIQPFDLNHFFGEDGKIYGYKNLKINVWISAISFHGYADISFDETSDGGKGITDLNTVLQSIFGESLVEKEEFMQTFSKECEYIRDVVTNGSAIKHNGTNESDPAVEIVRVELQGVAAFLYSRLVPLVLLLVEGSTPIDIGEHGWEMLLVVKRTTQESVSKFQLLGFAAVHNFYHYPESNRLRISQILVLPPHQGEGHGLRLLEAINSIAQSENIYDVTIEDPSDYLQYVRSSIDCLRLLTLDPIKPALSAMVSSLKETNLSKRTCSLKMVPPADLTETVRQKLKINKKQFLRCWEILIYLSLDSEDRKSMDNFRACIYDRTKGEILGGATGTNGKRLVQMSSSVNEEVSFAVYWTQEGGDADDQTVEQQPEDLKTQEQQLNELVDNQMEEIVGVAKNVSSRGKDKLADLAAL

SEQ ID NO: 83236 - protein, 144 aa, Setaria italica
  Transcript Sequence Number=SeqID_17262
  Gene Ontology: Mol. function=binding
  Homolog annotation: Hit_ID=B6TK50; Match level="QueryCoverage=86%, HitCoverage=78%, E-value=3e-11, Identity=46%"; Hit description =Armadillo/beta-catenin-like repeat family protein
EIRRLRTIPSNDSGVREAALGGLLELARDMTLGNRSLLAEHDRLRRLLRGRVESIRRMTPEDLDAAREERQLVDSLWIACYNVVSRMREIALLMSTPPAVLEAQGITHDDIEGLLSELQVHVESIDMANGDHGSTWRHALLVSN

SEQ ID NO: 83237 - protein, 201 aa, Setaria italica
  misc_feature (163)..(163): Xaa can be any naturally occurring amino acid
  Transcript Sequence Number=SeqID_17263
  Gene Ontology: Mol. function=binding; Cellular component=cytoplasm; Biological process=regulation of translation
  Homolog annotation: Hit_ID=Q0W9E7; Match level="QueryCoverage=100%, HitCoverage=85%, E-value=1e-70, Identity=66%"; Hit description =Putative stress-induced protein (Fragment)
MAGDRLSWAGLLKWSLSYVDGAGPSRTISEEERRWLAEAVERHMMVDVVSRMREIALLMSTPPAVLEAQGITHDDIEGLLSELQVHVESIDMANDLHSVGGLVPVIKFLRNSDARIRAKAADVVTTVVQNNPTSQQLVMEASGFEPLLSNFRSDPDLTARIKXALGALSSLIRNNRPGVAAFRLANGYTGLRDALNSESAR

SEQ ID NO: 83238 - protein, 79 aa, Setaria italica
  Transcript Sequence Number=SeqID_17264
MTTSSANSAASPAVSGLDYDDTALTLALPGSSSDPAAAADRKRAHADHDKPSSPKARAVGWPPVRAYRRNALRDEAKLV

SEQ ID NO: 83239 - protein, 148 aa, Setaria italica
  Transcript Sequence Number=SeqID_17265
  Gene Ontology: Cellular component=membrane
WSVLHQNTVVEDCDHVALYGFSFSTGEKFPFSPEPSISTVPLLEGKLVDLKIGKDKLWILKEFGSMLYEILQYDTKAEKICSYVLQEDAISEQLFQSSDNALDDLVWTADSVFSSLKEQAFTFISSMFLRRLLQPGVNHCSALRETLL

SEQ ID NO: 83240 - protein, 692 aa, Setaria italica
  Transcript Sequence Number=SeqID_17266
  Pfam annotation: Domain name=Cenp-F_leu_zip; Domain location=186-343; Score=-12.5; E_value=0.077; Accession=PF10473.1; Description=Leucine -rich repeats of kinetochore p
AVDTPLCEQDGDPALFRSVVLQGIVPDHFEDIQRHLYSATLSRDFLQLQLDEVAGHYSDVTQRSSDEITKLQVLLKETEESNLAVSKELHQCRHELSEVSTVKGDLELIMASLKEEINTSNLRCTRLESELHSSEENTKQMQSELADNRLLLEALQKENLELSASLASEKEAKKAAEEQQDHLSSDNRKLLSELSGLELNLASMKEEMDAGSSRCEVLEKELRSSNENLEHTLTELANYRALLESLQKDNLELSANFVSEKEAKKKLEEDNVDLCNEKGRLSSDLSELNDKLNLSYAKHKQLESHVKDTETYFEQLTEQLIEENLYASSSADVYQSAIKDLHAKYNVVLGQFQNVVHQESDLHLDPPKVNTENAERAITRPVLVGHGNHQCTPNLANTNDSCNSTALQLLKGHLEVSKGDLHDLEKLLERISSRSDGRVLVSKLIKSFEPKGNEDDTGLTEGEHDELRKSTREMIRRLGEKFMAMSSDITKTEEYVAELCNKIELSVKSTAQHDIDRQQTVVLAAKMDELAGKLSNYKETIDNLHNQVATVQQDANSNAERLIDQAELLQKDAVERISILEKERVSLSDLLIEVTNRLTSLGCTMFPNDSSESEDLSFRTLSCVDLVATSFQSLQEKLEAAQIDNAQLNSSLVELRKANCVAQERSEQAFETVKKLYDSLQELLCDSLKKFK

SEQ ID NO: 83241 - protein, 84 aa, Setaria italica
  Transcript Sequence Number=SeqID_17267
  Homolog annotation: Hit_ID=B6SWJ3; Match level="QueryCoverage=97%, HitCoverage=16%, E-value=6e-13, Identity=48%"; Hit description=WAK1 -OsWAK receptor-like cytoplasmic kinase (OsWAK-RLCK)
AACNARGGKCRYDNATAAFRCLCPDGRRAAGSTCSGGSNRKIMIVSITCGTVGGILAVGILIFVWHKRKRRKQVGAPNGFMRSE

SEQ ID NO: 83242 - protein, 189 aa, Setaria italica
  misc_feature (34)..(34): Xaa can be any naturally occurring amino acid
  Transcript Sequence Number=SeqID_17268
  Gene Ontology: Mol. function=protein serine/threonine kinase activity; Biological process=protein amino acid phosphorylation
  Homolog annotation: Hit_ID=B6SXR6; Match level="QueryCoverage=92%, HitCoverage=26%, E-value=9e-80, Identity=83%"; Hit description=WAK1 -OsWAK receptor-like cytoplasmic kinase (OsWAK-RLCK)
  Pfam annotation: Domain name=Pkinase_Tyr; Domain location=90-187; Score=-156.2; E_value=0.0024; Accession=PF07714.9; Description =Protein tyrosine kinase
  Subcellular localization annotation: CTP_CleavageSite=53; ConfidenceScore=5.06e-01
QAIHSDCSYAGGSNRKIMIVSITCGTVGGILAVXSSFFVWHKRKRRKQVGAPNGFMRSESSMQSYSKDLELGGSLHIFTYEELEEATDGFSDSRELGDGGFGTVYKGKLRDGRVVAVKRLYKNNYKRVEQFINEVDILSRLLHQNLVILYGCTSRSSRDLMLVYEYIPNGTVADHLHGPRASDGPDMAC

SEQ ID NO: 83243 - protein, 213 aa, Setaria italica
  misc_feature (19)..(19): Xaa can be any naturally occurring amino acid
  Transcript Sequence Number=SeqID_17269
  Gene Ontology: Mol. function=protein serine/threonine kinase activity; Biological process=protein amino acid phosphorylation
  Homolog annotation: Hit_ID=B6SXR6; Match level="QueryCoverage=83%, HitCoverage=28%, E-value=7e-38, Identity=46%"; Hit description=WAK1 -OsWAK receptor-like cytoplasmic kinase (OsWAK-RLCK)
EHCTTQLCGNVNISFPFGXVPEEDAVTHCYALFQVRCRNNTPYLGYYQTEFFMQILSIFYDNASLLIAETQDHNDSRHLELGCYIPTGNATSKFGRLFSISPLNQNLIFYNCIKPLPPSVGLAETMCRNNTYVRVAAERYDGHGSYFLEGCNYSVKPVLGRSVKIDASNYAQLLSDGFLLTWQLTPQPLQLPPPHPPLQPRAGSLQTEVSALD

SEQ ID NO: 83244 - protein, 625 aa, Setaria italica
  misc_feature (32)..(32): Xaa can be any naturally occurring amino acid
  misc_feature (313)..(313): Xaa can be any naturally occurring amino acid
  Transcript Sequence Number=SeqID_17270
  Gene Ontology: Mol. function=protein serine/threonine kinase activity; Biological process=protein amino acid phosphorylation
  Homolog annotation: Hit_ID=B6SXR6; Match level="QueryCoverage=99%, HitCoverage=93%, E-value=0.0, Identity=70%"; Hit description=WAK1 -OsWAK receptor-like cytoplasmic kinase (OsWAK-RLCK)
  Pfam annotation: Domain name=Pkinase; Domain location=290-569; Score =137.4; E_value=4.4e-38; Accession=PF00069.17; Description=Protein kinase domain
  Pfam annotation: Domain name=Pkinase_Tyr; Domain location=290-569; Score=104.6; E_value=3.4e-28; Accession=PF07714.9; Description =Protein tyrosine kinase
  Pfam module annotation: Pfam domain module=Pkinase::Pkinase_Tyr; Domain location=290-569::290-569
VDCSANIRCGNLNISKPFGIVPDQATEPNCGXAGFQVICKNHTPYLGYYHPNKNIPDYYQLQILDIFYGNGSLLVADMEKLEDLRNLTHEDCQQYRFPTANTSSKIALPFSIDPIVNQNLILYNCTKPSAPAAAAAEGLAERSCGNNTLYARVGDERGNSSSDDSIMKGCTAIFVPVRGGYGKASASNYAQLLSDGFLLTWQLPPLQPRAGGSNRKIMIVSITCGTVGGILAVGILIFVWHKRKRRKQVGAPNGFMRSESSMQSYSKDLELGGSLHIFTYEELEEATDGFSDSRELGDGGFGTVYKGVLFIAXGKLRDGRVVAVKRLYKNNYKRVEQFINEVDILSRLLHQNLVILYGCTSRSSRDLMLVYEYIPNGTVADHLHGPRASERGLTWPVRMNIAIETAEALAYLHAVEIIHRDVKTNNILLDNSFHVKVADFGLSRLYPLEVTHVSTVPQGTPGYVDPVYHQCYKLTDKSDVYSFGVVLVELISSKPAVDMGRSHSEINLANMALNRIQNHEVEQLVDPELGYETDDETKRMVDLVAELAFQCLQLERELRPSIKQVVEALNCIKNGDSPEKRMDLKSSPKEDSHLLKNSVQYSPDSVIHKFHSQSTTHSVASNASG

SEQ ID NO: 83245 - protein, 459 aa, Setaria italica
  Transcript Sequence Number=SeqID_17271
  Gene Ontology: Cellular component=plasma membrane
  Homolog annotation: Hit_ID=Q84VB6; Match level="QueryCoverage=65%, HitCoverage=100%, E-value=1e-132, Identity=78%"; Hit description =Centromere protein-like protein (Fragment)
MKLLANMQMAIMNAALFKEKVLELIITCESFEISAMVQKEVLKEEIIQRNSYVDELKDKLNAVEIENRRLKVDLNGDFTMLGSLQTEVSALEEQTLSLANDCLQPNKLRMEENVLSPEVLKTSMRSSGDENAMRMVKDMELQKLHGTIKALQKVVTDTGVLLEQERLDFNANLQEAKKQIEVLKLKEILDDDIIEMNYEQMLKDIQLDLIQTSSGRRTSPFGQEKKSVAQVDDKMVNLRAIVGPSRGHMAVDLRPPQSESFGTDNNQMVVKELSIDKQELPRLTAMEPHQEWKNKVVERLFSDAQRLNALQSSIQELKTNAETSEELELESVRYQIREAEGTIMQLIDTNSKLSKKAEEFTSADGLDAENTDLRSRHQRKILERARKMSEKIGRLEVEMQKVQQALLKYEEEQSSRKTSKALQRRSKVQLVEYLYGRRRDSRKQRSSPCGCMRAKTIDD

SEQ ID NO: 83246 - protein, 209 aa, Setaria italica
  misc_feature (5)..(5): Xaa can be any naturally occurring amino acid
  Transcript Sequence Number=SeqID_17272
  Gene Ontology: Mol. function=protein-L-isoaspartate (D-aspartate) O -methyltransferase activity; Cellular component=cytoplasm; Biological process=protein modification process
  Homolog annotation: Hit_ID=B6U3B8; Match level="QueryCoverage=98%, HitCoverage=74%, E-value=1e-108, Identity=89%"; Hit description =Protein-L-isoaspartate O-methyltransferase
  Pfam annotation: Domain name=MTS; Domain location=69-208; Score= -85.3; E_value=0.025; Accession=PF05175.6; Description=Methyltransfera se small domain
  Pfam annotation: Domain name=Methyltransf_11; Domain location=96-195; Score=23.7; E_value=0.00056; Accession=PF08241.4; Description =Methyltransferase domain
  Pfam annotation: Domain name=PCMT; Domain location=20-209; Score =388.0; E_value=1.7e-113; Accession=PF01135.11; Description=Protein-L- isoaspartate(D-aspartate) O-methyltransferase (PCMT)
  Pfam module annotation: Pfam domain module=MTS::Methyltransf _11::PCMT; Domain location=69-208::96-195::20-209
LRRCXPFHRMAQYWTRASLDKNKALVDYLKQYGAVRTDKVAEVMETIDRALFVPEGTPYIDSPMPIGFNATISAPHMHATCLELLKDHLQPGMHALDVGSGSGYLTACFAMMVGPEGRAVGIEHIPEIVASAIENVQKSAAAPLLKDGSLSFHVADGRFGFPDAAPYDVIHVGAAAPDIPQPLLDQLKPGGRMVIPVGTYSQELQVVDK

SEQ ID NO: 83247 - protein, 97 aa, Setaria italica
  Transcript Sequence Number=SeqID_17273
  Gene Ontology: Mol. function=protein-L-isoaspartate (D-aspartate) O -methyltransferase activity; Cellular component=cytoplasm; Biological process=protein modification process
  Homolog annotation: Hit_ID=Q43209; Match level="QueryCoverage=88%, HitCoverage=37%, E-value=1e-37, Identity=86%"; Hit description =Protein-L-isoaspartate O-methyltransferase
  Pfam annotation: Domain name=PCMT; Domain location=1-92; Score=10.9; E_value=1.3e-09; Accession=PF01135.11; Description=Protein-L -isoaspartate(D-aspartate) O-methyltransferase (PCMT)
DHLELRCRIILHVADGRFGFPDAAPYDVIHVGAAAPDIPQPLLDQLKPGGRMVIPVGTYSQELQVVDKNADGSISVRNDASVRYVPLTSRSAQLQDP

SEQ ID NO: 83248 - protein, 132 aa, Setaria italica
  Transcript Sequence Number=SeqID_17274
MESSSHKRAREAAADLSAGEGGALPEADAKRLRPEDLLDMLDDDTDAATAGDLASVMRSLEEEIASFDEAGATAAAAPPAHHQQQPELGFLLEASDDELGLPPAGASSSSEDAGGAAGEEPDVAAGLDGQIW

SEQ ID NO: 83249 - protein, 176 aa, Setaria italica
  Transcript Sequence Number=SeqID_17275
  Subcellular localization annotation: CTP_CleavageSite=31; ConfidenceScore=5.56e-01
KVQHPRGRLFASAKFPNPVASRSLAARIRTRLGALAPAAPPDPAPSSGKIGGSYPRSTRSDTSVHPGVLHPTSPAATFPRRRPEESLRLRTPGVEDPRAYRRRRSPPRRLILICTSSLVGILCISSEKKIRLSRVNCEREALREIRTLHPSIHPSWVLCITNIRVKRISVPCQKKK

SEQ ID NO: 83250 - protein, 58 aa, Setaria italica
  Transcript Sequence Number=SeqID_17276
PTIYRAMCIFGLKTILIPYRTNLVRLQTGPNYADFFADFLKRVASSSGRPTGGEKQRL

SEQ ID NO: 83251 - protein, 403 aa, Setaria italica
  Transcript Sequence Number=SeqID_17277
  Gene Ontology: Mol. function=metal ion binding
  Homolog annotation: Hit_ID=B6SSJ0; Match level="QueryCoverage=100%, HitCoverage=72%, E-value=1e-151, Identity=73%"; Hit description=Zinc finger, C3HC4 type family protein
  Pfam annotation: Domain name=zf-C3HC4; Domain location=84-124; Score =31.7; E_value=3e-06; Accession=PF00097.17; Description=Zinc finger, C3HC4 type (RING finger)
ERFRRLMCMSGSRYFRPRRFRSDLPPLSSEAPSLENDAPPQPPEPEEPVHDTVEENKVVADGAVVGVSEDEGTEHGKSAAMFECNICFEMAAEPVVTSCGHLFCWPCLYQWLHVHSSHKECPVCKGEVTEGNITPIYGRGNSGSDVEKKVAEDGNASGPKIPPRPHGNRLESFRQQFHHLRPISRRLGEAHGFLSTWRRILDQHLMNSVSRFEGPPEATAQEIPPNASRFSRMTTRLRARRLQREAENPTSIASSAPGSGGQPGNNISDLPRRTSSPFPSEGMDLLRHFDFSDLEDSERFATAFSELRRIVRPSHYGASTSSNPPNPEPVDGTHIVTGLAADQASNSSTMAVIQEDAAFTESAGEPSNAGSSRSLRRRRGGDALGSLDVDGGDLHQNKRRRLN

SEQ ID NO: 83252 - protein, 281 aa, Setaria italica
  misc_feature (238)..(238): Xaa can be any naturally occurring amino acid
  Transcript Sequence Number=SeqID_17278
  Gene Ontology: Mol. function=metal ion binding
  Homolog annotation: Hit_ID=B9SLY6; Match level="QueryCoverage=100%, HitCoverage=22%, E-value=3e-63, Identity=49%"; Hit description=Zinc finger protein, putative
RSLIEQIQISGARSTVVDFYCELCSQADEIMQKIESHFSDEEAKVLPKARINFSPEKQRKLLYKSLCVMPLKLLEHVLPWFVAKLNDAEAASFLQNMQLAAPSSETSLVTLLSGWACKGRLEDTSNPGKFICLTSGAVSYALDGNDLKTCQSFCPCYASNSRAFSRPVKRASQGESSTNINRSRCSQNADTEASPNNKPCYIPRLRVESSYLGVNSLTPGKSFRSLPYNYSAPSLYSXSLFSWETDAPFSGPDNICRPIDTIFKFHKAIRKDLEFLDVESG

SEQ ID NO: 83253 - protein, 678 aa, Setaria italica
  Transcript Sequence Number=SeqID_17279
  Gene Ontology: Mol. function=metal ion binding
  Homolog annotation: Hit_ID=B9SLY6; Match level="QueryCoverage=93%, HitCoverage=90%, E-value=0.0, Identity=52%"; Hit description=Zinc finger protein, putative
  Pfam annotation: Domain name=Hemerythrin; Domain location=162-250; Score=28.9; E_value=2e-05; Accession=PF01814.15; Description =Hemerythrin
  Pfam annotation: Domain name=Hemerythrin; Domain location=91-152; Score=33.3; E_value=9.8e-07; Accession=PF01814.15; Description =Hemerythrin
  Pfam annotation: Domain name=zf-C3HC4; Domain location=561-602; Score= 9.4; E_value=0.0086; Accession=PF00097.17; Description=Zinc finger, C3HC4 type (RING finger)
  Pfam annotation: Domain name=zf-CHY; Domain location=432-509; Score =148.7; E_value=1.8e-41; Accession=PF05495.4; Description=CHY zinc finger
  Pfam annotation: Domain name=zf-MIZ; Domain location=557-605; Score= -4.8; E_value=0.006; Accession=PF02891.12; Description=MIZ zinc finger
  Pfam module annotation: Pfam domain module=Hemerythrin::Hemerythrin::z f-C3HC4::zf-CHY::zf-MIZ; Domain location=162-250::91-152::561 -602::432-509::557-605
LARLTGLEESSTNINRSRCSQNADTEASPNNKPCYIPRLRVESSYLGVNSLTPGKSFRSLPYNYSAPSLYSSLFSWETDAPFSGPDNICRPIDTIFKFHKAIRKDLEFLDVESGKLIEGNESCLRQFIGRFRLLWGLYRAHSNAEDEIVFPALESKETLHNVSHSYTLDHKQEEELFQDISTVLSELSQLHDSLSDPLDVEAGTNHISNNEIDWARKRNELLTKLQGLCKSIRVTLSNHVHREELELWPLFDKHFSVDEQDKIIGRIIGTTGAEVLQSMLPWVTSALSLEEQNKMLDTWKQATRNTMFDEWLNEWWKGPSTSSDSSDMASAPSEESHLQENLEQNDQMFRPGWKDIFRMNQSELEAEIRKVSQDSTLDPRRKAYLIQNLMTSRWIAAQQKSPQPSAEEHNGCTQLPGCVPSYRDPEKQIFGCEHYKRNCKLVAACCNKLFTCRFCHDKVSDHSMDRKAVVEMMCMQCLNVQPVGPNCQTPSCNGLSMAKYYCSICKFFDDERSVYHCPFCNLCRLGNGLGNDFFHCMKCNCCLGIKMIEHRCREKMLEMNCPICCDFLFTSSAPVKGLPCGHFMHSACFQAYTCTHYTCPICCKSLGDMTVYFGMLDGLLAAEELPEEYRDRCQDILCNDCERKGRSRFHWLYHKCGFCGSYNTRVIKTDTVECSTSN

SEQ ID NO: 83254 - protein, 157 aa, Setaria italica
  misc_feature (17)..(17): Xaa can be any naturally occurring amino acid
  Transcript Sequence Number=SeqID_17280
  Gene Ontology: Mol. function=nucleoside-triphosphatase activity; Cellular component=membrane; Biological process=transport
  Homolog annotation: Hit_ID=UPI000016238F; Match level="QueryCoverage =70%, HitCoverage=14%, E-value=7e-37, Identity=66%"; Hit description =ABC transporter family protein
  Subcellular localization annotation: CTP_CleavageSite=39; ConfidenceScore=5.44e-01
WDDIHLDDSIHLATAAXASASINSSAYPSPSPSLPVTTSASGAACRERKVAGATLVWKDLTVSSLSASTNRFSDRLVKSSNGYALPATLTVIMGPARSGKSTLLRAIAGRLGATERMYGEVFVNGAKSRLPYGSYGYVDRDDVLIDSLTVREMLYFS

SEQ ID NO: 83255 - protein, 40 aa, Setaria italica
  Transcript Sequence Number=SeqID_17281
  Homolog annotation: Hit_ID=Q9SSL4; Match level="QueryCoverage=90%, HitCoverage=8%, E-value=5e-10, Identity=72%"; Hit description =F3N23.34 protein
QFVPLTKEQIANPASYADCTHWCLPGVPDVWNEFLYGYLI

SEQ ID NO: 83256 - protein, 139 aa, Setaria italica
  misc_feature (90)..(90): Xaa can be any naturally occurring amino acid
  Transcript Sequence Number=SeqID_17282
  Homolog annotation: Hit_ID=Q84NP6; Match level="QueryCoverage=92%, HitCoverage=20%, E-value=6e-24, Identity=44%"; Hit description=Leaf senescence related protein-like
FLNFAICQNRFNATRLLEKLRNKRLVFVGDSVNRNQWVSLVCMVEASIPDDRLKTRIFNGSLISFKALVCPSQFYRLQKPTILVNRLNKXSFQEYNATIDFYWSPLLVESNSDNPIIHRVEYRIIRADRIEKHASVWRD

SEQ ID NO: 83257 - protein, 435 aa, Setaria italica
  Transcript Sequence Number=SeqID_17283
  Homolog annotation: Hit_ID=Q84NP6; Match level="QueryCoverage=80%, HitCoverage=70%, E-value=4e-84, Identity=44%"; Hit description=Leaf senescence related protein-like
  Pfam annotation: Domain name=DUF231; Domain location=254-432; Score =244.9; E_value=2e-70; Accession=PF03005.7; Description=Arabidopsis proteins of unknown function
MKTEATPKMTVLHAPVGVRSIVSSLVAFFIVASSVTFLLDRGQEAQVQMAVEHGRQEMQVKVEAGLQEPAMRGTTESGDAGEECNWSRGRWVYDNVSRPLYSGLKCAFIFPEVACDKYGRKDVMYQHWRWQPQGCDLPRFNATRLLEKLRNKRLVFVGDSVNRNQWVSLVCMVEASIPDDRLKTRIFNGSLISFKALEYNATIDFYWSPLLVESNSDNPIIHRVEYRIIRADRIEKHASVWRDADIIVFNSYLWWRKQKDDMRMKVMYGSFEDGDARLDEMEMVDGFEIALKKLTEWLGENIDKNKTRIFFAGSSPTHSWASNWGGEDSNKCLNETEPIYKVGYKAATTDYSLMAKAKSYFRTLEPKGIHVQILNITELSDYRKDGHPTVFRRQFVPLTKEQIANPASYADCTHWCLPGVPDVWNEFLYGYLMYK

SEQ ID NO: 83258 - protein, 116 aa, Setaria italica
  Transcript Sequence Number=SeqID_17284
  Gene Ontology: Mol. function=transferase activity, transferring glycosyl groups; Cellular component=integral to membrane; Biological process=cell wall organization and biogenesis
  Homolog annotation: Hit_ID=Q8W3F9; Match level="QueryCoverage=99%, HitCoverage=9%, E-value=3e-36, Identity=71%"; Hit description =Cellulose synthase-like protein D1
  Subcellular localization annotation: CTP_CleavageSite=49; ConfidenceScore=5.59e-01
MASKGILKNSASSRMPPQGAGKPPTAPTSAPTVVFGRRTDSGRFISYSRDDLDSEISSVDFQDYHVHIPMTPDNQPMDDEDGGAARAEERYVSGSLFTGGFNSVTRAHVMDKQDSG

SEQ ID NO: 83259 - protein, 244 aa, Setaria italica
  Transcript Sequence Number=SeqID_17285
  Homolog annotation: Hit_ID=B4FGZ1; Match level="QueryCoverage=100%, HitCoverage=90%, E-value=1e-116, Identity=84%"; Hit description=DedA
  Pfam annotation: Domain name=SNARE_assoc; Domain location=40-163; Score=99.2; E_value=1.5e-26; Accession=PF09335.3; Description=SNARE associated Golgi protein
RRYGWDGASAVAAFREARGALGPWAAPAYVAAHALTLALCPPYAIFFEGGAALVFGFLPGVACVFSAKVLGASISFWIGRAVFRYFTSAMEWLQRNKYFHVVVKGVEQDGWKFVLLARFSPLPSYIINYALSATNVGFFRDFLFPTIVGCLPMILQNVSIVSLAGAAVASTTGSKKSSIYSYLFPAIGIVSSILISWRIKQYSSALAIPNELKSAPTNGNSNGDAKLASAPSTNTNSGKTRKRR

SEQ ID NO: 83260 - protein, 84 aa, Setaria italica
  Transcript Sequence Number=SeqID_17286
  Gene Ontology: Mol. function=DNA-3-methyladenine glycosylase I activity; Biological process=base-excision repair
  Homolog annotation: Hit_ID=B4FWT0; Match level="QueryCoverage=96%, HitCoverage=21%, E-value=4e-40, Identity=95%"; Hit description=DNA-3- methyladenine glycosylase I
  Pfam annotation: Domain name=Adenine_glyco; Domain location=1-84; Score=30.2; E_value=1.1e-14; Accession=PF03352.5; Description =Methyladenine glycosylase
  Subcellular localization annotation: CTP_CleavageSite=46; ConfidenceScore=5.03e-01
MALQVRRDFGSLDKYVWAFVNNKPLSPGYKYSRKIPVKTSKSESISKDMVRRGFRFVGPTVIHSFMQAVGLTNDHLVSCPRHRA

SEQ ID NO: 83261 - protein, 93 aa, Setaria italica
  Transcript Sequence Number=SeqID_17287
  Gene Ontology: Mol. function=nucleic acid binding; Cellular component= nucleus; Biological process=response to stress
  Homolog annotation: Hit_ID=B6TDT8; Match level="QueryCoverage=93%, HitCoverage=42%, E-value=3e-38, Identity=88%"; Hit description =Glycine-rich RNA-binding protein 2
  Pfam annotation: Domain name=RRM_1; Domain location=13-83; Score =98.0; E_value=3.2e-26; Accession=PF00076.14; Description=RNA recognition motif. (a.k.a. RRM, RBD, o
EAEMAASDVEYRCFVGGLAWATDDNSLHNAFSPFGEVLESKIILDRDTQRSRGFGFVTFASEQAMRDAIEGMNGKELDGRSITVNEAQSRRPR

SEQ ID NO: 83262 - protein, 306 aa, Setaria italica
  misc_feature (39)..(39): Xaa can be any naturally occurring amino acid
  Transcript Sequence Number=SeqID_17288
  Gene Ontology: Mol. function=DNA-3-methyladenine glycosylase I activity; Biological process=base-excision repair
  Homolog annotation: Hit_ID=B4FWT0; Match level="QueryCoverage=83%, HitCoverage=68%, E-value=1e-128, Identity=88%"; Hit description=DNA -3-methyladenine glycosylase I
  Pfam annotation: Domain name=Adenine_glyco; Domain location=116-294; Score=324.5; E_value=2.2e-94; Accession=PF03352.5; Description =Methyladenine glycosylase
  Subcellular localization annotation: CTP_CleavageSite=25; ConfidenceScore=5.48e-01
AAAASLLPPATPASVTARATKAAAVAAEKSRVKARKPGXAVLPVVTFAALEAFEPAGSIAAAQREHAAQAQAQRKMRIAHYGRTASFSRVEGRVGATAAEPVPASPTGNDEKRCSFITPYSDPLYVAYHDEEWGVPVHDDELLFEMLTLSGVQVGADWTSILKKRHVYREAFSGFNVDAVAKYTEKQMALLSTDFGLDLGTVRGTVNNACRILEVRRDFGSLDKYVWAFVNNKPLSPGYKYSRKIPVKTSKSESISKDMVRRGFRFVGPTVIHSFMQAVGLTNDHLVSCPRHRACSTSAAAAGRAN

SEQ ID NO: 83263 - protein, 81 aa, Setaria italica
  misc_feature (68)..(68): Xaa can be any naturally occurring amino acid
  misc_feature (72)..(72): Xaa can be any naturally occurring amino acid
  Transcript Sequence Number=SeqID_17289
  Gene Ontology: Mol. function=cysteine-type endopeptidase activity; Cellular component=extracellular region; Biological process =proteolysis
  Homolog annotation: Hit_ID=Q2RAW9; Match level="QueryCoverage=97%, HitCoverage=21%, E-value=3e-24, Identity=72%"; Hit description=Latex- abundant protein, putative, expressed
MEGKKQMLATLVGCNYAGTPDELRGCINDVLVMRDTLVARFGFAPRDITVLTDDDGGRGSSPSAVLPXGANXKRALAEMVS

SEQ ID NO: 83264 - protein, 114 aa, Setaria italica
  Transcript Sequence Number=SeqID_17290
  Homolog annotation: Hit_ID=C3SA82; Match level="QueryCoverage=99%, HitCoverage=25%, E-value=1e-42, Identity=78%"; Hit description =System N amino acid transporter
MSGGGANERSDPLLPTKREGDEDDAGASAFHEFNGASFAGAVFNLSTTIVGAGIMALPATMKVLGLVPGLVMIVLAALLTDASIELLVRFSRAVGARSYGAAMGDAFGWVGQEA

SEQ ID NO: 83265 - protein, 90 aa, Setaria italica
  Transcript Sequence Number=SeqID_17291
  Gene Ontology: Mol. function=shikimate kinase activity; Biological process=carbohydrate metabolic process
  Homolog annotation: Hit_ID=B9S1Y5; Match level="QueryCoverage=98%, HitCoverage=46%, E-value=2e-20, Identity=51%"; Hit description =Thermosensitive gluconokinase, putative
DYHSHGNKAKMSKGIPLSDADRTPWLESLRDAISDRLDRGEDVAVSCSALQLKYREVLRAADRSYKPGDYADCRVKFVCLKASVEVITER

SEQ ID NO: 83266 - protein, 120 aa, Setaria italica
  Transcript Sequence Number=SeqID_17292
  Homolog annotation: Hit_ID=B9S1Y6; Match level="QueryCoverage=77%, HitCoverage=48%, E-value=6e-17, Identity=49%"; Hit description =Thermosensitive gluconokinase, putative
NLPVLELQRRAADGHVLTAVQSVLRAADRSYKPGDYADCRVKFVCLKASVEVITERMQRRSSEGKHFMPASLLQSQVDLLQINAAEGITEVDATEHPGDIVRDAIAQFREELASTDPPCF

SEQ ID NO: 83267 - protein, 371 aa, Setaria italica
  misc_feature (364)..(364): Xaa can be any naturally occurring amino acid
  Transcript Sequence Number=SeqID_17293
  Gene Ontology: Cellular component=nucleus; Biological process =regulation of transcription, DNA-dependent
  Homolog annotation: Hit_ID=B6U6Z6; Match level="QueryCoverage=100%, HitCoverage=45%, E-value=0.0, Identity=89%"; Hit description =SCARECROW-like protein
  Pfam annotation: Domain name=GRAS; Domain location=44-366; Score =391.2; E_value=1.8e-114; Accession=PF03514.6; Description=GRAS family transcription factor
KGVKELREALQHDVARHSHGGHGKGSGHGKGRGKKQPKKEVVDLETLLIHCAQSVATDDRRGATELLKQIRQHASPKGDGDQRLAYCFANGLEARLAGNGSQIYKSVIMTRFPCTDVLKAYQLYLAACPFKKISHFFANQTIMNAVEKAKKVHIVDYGIYYGFQWPCLIQRLSTRPGGPPRLRITGIDTPQPGFRPAERIEETGRYLKDYAQTFNVPFEFKAIASRFEAVQIEDLQIEKDELLIVNCMFKFKTLMDESVVAESPRNMVLNTIRKMNPHLFIHGIINGSYNAPFFVSRFREALFHYSAVFDMLETNIPRDNEQRLLIESALFGREAINVISCEGMERMERPETYKQWQVRNQRAXFKQLPMN

SEQ ID NO: 83268 - protein, 122 aa, Setaria italica
  Transcript Sequence Number=SeqID_17294
  Gene Ontology: Cellular component=nucleus; Biological process =regulation of transcription, DNA-dependent
  Homolog annotation: Hit_ID=B6U6Z6; Match level="QueryCoverage=94%, HitCoverage=14%, E-value=5e-62, Identity=92%"; Hit description =SCARECROW-like protein
AFVSTYSAVFDMLETNIPRDNEQRLLIESALFGREAINVISCEGMERMERPETYKQWQVRNQRAGFKQLPMNQDIMKRAREKVRCYHKDFIIDEDNKWLLQGWKGRILMALSTWKPDHKSSH

SEQ ID NO: 83269 - protein, 105 aa, Setaria italica
  Transcript Sequence Number=SeqID_17295
MEGLIPFIYRAVVQYRKEGQVSFTDLIFDEPSPTSYFRLPGDSGRYQVTASDLFSRSAVDSGSAGAMRQCPARLPMQRRRPLDRDNGSASWDWEPRKEKQAKDGS

SEQ ID NO: 83270 - protein, 101 aa, Setaria italica
  Transcript Sequence Number=SeqID_17296
KFCSKALQFKHPNLHPRSSYSGTIHRHPCQFWGTTGPKQLLYEAADAIHQQNSTQLRSERGLQGLQLQAPRPVQQFCLGICAKYRLISGQRAPHSKQTTEV

SEQ ID NO: 83271 - protein, 141 aa, Setaria italica
  Transcript Sequence Number=SeqID_17297
  Gene Ontology: Mol. function=hydrolase activity, hydrolyzing O -glycosyl compounds; Cellular component=vacuole; Biological process =carbohydrate metabolic process
  Homolog annotation: Hit_ID=B9SAQ2; Match level="QueryCoverage=82%, HitCoverage=22%, E-value=2e-32, Identity=54%"; Hit description=Beta -glucosidase, putative
MCGATQLYVPPYGLQGALEYFKQSYGNPPIYIHENGYPMNHDVVFDDGPRVEFLSEHLRSLADSVRNGSNTKGYFVWSLMDLYELTGGFNTTYGLYYVDFADKELKRYPRRSAIWYTDFLNGRRAAMPKRSSDSSLPVSSV

SEQ ID NO: 83272 - protein, 82 aa, Setaria italica
  Transcript Sequence Number=SeqID_17298
  Gene Ontology: Cellular component=extracellular region; Biological process=xenobiotic metabolic process
  Homolog annotation: Hit_ID=P31110; Match level="QueryCoverage=95%, HitCoverage=44%, E-value=2e-26, Identity=67%"; Hit description =Thaumatin-like protein
  Pfam annotation: Domain name=Thaumatin; Domain location=1-82; Score =7.5; E_value=9.8e-09; Accession=PF00314.9; Description=Thaumatin family
LLHRLRAQTPATLAEYSIGGSQDFYDISLVDGFNQPMDFSCSTGVNLHCPGAGCPDAYLFPKDDTKTHACAGNSNYQVTFCP

SEQ ID NO: 83273 - protein, 84 aa, Setaria italica
  Transcript Sequence Number=SeqID_17299
  Gene Ontology: Mol. function=RNA binding
  Homolog annotation: Hit_ID=B9T303; Match level="QueryCoverage=59%, HitCoverage=15%, E-value=2e-14, Identity=74%"; Hit description=Far upstream element-binding protein, putative
  Pfam annotation: Domain name=KH_1; Domain location=42-82; Score=25.1; E_value=0.00029; Accession=PF00013.21; Description=KH domain
MEAPGSPYASSPESAPKRAPRSPPQQQQQPSEEGDDKEKPTHLRFLVSNTAAGCIIGKGGSTINDFQSQSGARIQLSRSHVIFP

SEQ ID NO: 83274 - protein, 133 aa, Setaria italica
  misc_feature (81)..(81): Xaa can be any naturally occurring amino acid
  Transcript Sequence Number=SeqID_17300
  Gene Ontology: Mol. function=RNA binding; Cellular component=nucleus; Biological process=nuclear mRNA splicing, via spliceosome
  Homolog annotation: Hit_ID=Q42361; Match level="QueryCoverage=99%, HitCoverage=57%, E-value=2e-48, Identity=75%"; Hit description =Transcribed sequence 1087 protein (Fragment)
  Pfam annotation: Domain name=KH_1; Domain location=58-123; Score =50.0; E_value=9.2e-12; Accession=PF00013.21; Description=KH domain
VGLTFPSYPGVPVGYMIPQVPYNNAVNYGPNGYGGGRYQNNKPSTPMRSPANNDAQESLTIGVADEHIGAVVGRAGRNITXMYSISSARIKISDRGDFISGTSDRKVTITGTSEAIRTAESMIMQRVSASSER

SEQ ID NO: 83275 - protein, 345 aa, Setaria italica
  Transcript Sequence Number=SeqID_17301
  Gene Ontology: Mol. function=RNA binding; Cellular component=nucleus; Biological process=nuclear mRNA splicing, via spliceosome
  Homolog annotation: Hit_ID=Q42361; Match level="QueryCoverage=66%, HitCoverage=100%, E-value=1e-104, Identity=83%"; Hit description =Transcribed sequence 1087 protein (Fragment)
  Pfam annotation: Domain name=KH_1; Domain location=127-192; Score =62.4; E_value=1.7e-15; Accession=PF00013.21; Description=KH domain
  Pfam annotation: Domain name=KH_1; Domain location=270-335; Score =59.9; E_value=9.9e-15; Accession=PF00013.21; Description=KH domain
  Pfam annotation: Domain name=KH_1; Domain location=43-108; Score =68.2; E_value=3.1e-17; Accession=PF00013.21; Description=KH domain
  Pfam module annotation: Pfam domain module=KH_1::KH_1::KH_1; Domain location=127-192::270-335::43-108
LYFPNSLVLGVFVISSAGIPSAPHAEQQQQPSEEGDDKEKPTHLRFLVSNTAAGCIIGKGGSTINDFQSQSGARIQLSRSHEFFPGTNDRIIMVSGLFDEVMKAMELILEKLLAEGEEFQEAEARPKVRLVVPNSSCGGIIGKGGATIKSFIEESHAGIKISPQDNNYAGLHDRLVTVTGTFDNQMNAIDLILKKLSEDVHYPPNLSSPFPYAGLTFPSYPGVPVGYMIPQVPYNNAVNYGPNGYGGGRYQNNKPSTPMRSPANNDAQESLTIGVADEHIGAVVGRAGRNITEIIQASGARIKISDRGDFISGTSDRKVTITGTSEAIRTAESMIMQRVSASSER

SEQ ID NO: 83276 - protein, 63 aa, Setaria italica
  Transcript Sequence Number=SeqID_17302
MDAAEVRRSSASSSPEFEFWPLHPDPAASPSCADELFSGGVLLPLPVLPPKPASSHAGRSSGT

SEQ ID NO: 83277 - protein, 51 aa, Setaria italica
  misc_feature (14)..(14): Xaa can be any naturally occurring amino acid
  Transcript Sequence Number=SeqID_17303
  Homolog annotation: Hit_ID=B6SXY4; Match level="QueryCoverage=100%, HitCoverage=8%, E-value=7e-16, Identity=80%"; Hit description =Pentatricopeptide repeat protein PPR868-14
SWIEVRSAKHVFVXAEDMSHREADEIYEMLGKLLDHMRIAGDPTEHQLDLC

SEQ ID NO: 83278 - protein, 131 aa, Setaria italica
  Transcript Sequence Number=SeqID_17304
  Gene Ontology: Mol. function=binding
  Homolog annotation: Hit_ID=B9T5G9; Match level="QueryCoverage=99%, HitCoverage=55%, E-value=1e-34, Identity=40%"; Hit description =Pentatricopeptide repeat-containing protein, putative
  Pfam annotation: Domain name=PPR; Domain location=66-100; Score=32.6; E_value=1.6e-06; Accession=PF01535.12; Description=PPR repeat
LSRCFSSACAEVKGYFQGLQVRCLSIKSGFDVDVCVRNAILDLYGKCKALVEAYLIFQEMEQRDSVSWNAIIAALEQNECYEDTISHLNEMLRSGMEPDDFTYGSVLKACAGLQSLEYGLMVHNKVIKSGT

SEQ ID NO: 83279 - protein, 635 aa, Setaria italica
  misc_feature (6)..(6): Xaa can be any naturally occurring amino acid
  Transcript Sequence Number=SeqID_17305
  Gene Ontology: Mol. function=catalytic activity; Cellular component =plasma membrane; Biological process=metabolic process
  Homolog annotation: Hit_ID=Q2I824; Match level="QueryCoverage=96%, HitCoverage=92%, E-value=0.0, Identity=76%"; Hit description=ACS -like protein
  Pfam annotation: Domain name=AMP-binding; Domain location=56-526; Score=288.9; E_value=1.1e-83; Accession=PF00501.20; Description=AMP -binding enzyme
MYRCAXGGKGAAPPAVPGLDCCWDIFRLSVERCPDNRMLGRREIVDGKAGEYTWLTYKQVYDTVIKVGAAIRSCGVGKGGRCGIYGANSPEWVISMQACNAHGIYCVPLYDTLGAGAVEFVLCHAEVQIAFVEEKKIGEMLKTFPNATKFLKTIVSFGKVNPEHKEKVEQNGLSIYSWEEFLQLGGEEKFELPPKEKDDICTIMYTSGTTGDPKGVLISNKSIITIVSAVDEFLINSGEELREDDVYISYLPLAHIFDRVIEEVFIHHGASIGFWRGDVKLLVEDIGELKPTVFCAVPRVLDRIYGGLQNKITAGGFLKKTLFNVAYKYKQGNMLKGSKHEEAAAVFDKVVFSKVKQGLGGRVRLILSGAAPLSRHVEEYLRVVTCSHVLQGYGLTETCAGSFVSLPNNMSMLGTVGPPVPYVEVRLESVPEMGYDALSSEMPRGEICIRGDTLFSGYYKREDLTKEVLVDGWFHTGDIGEWQPDGSMKIIDRKKNIFKLSQGEYVAVENLENIFGQTPGVDSVWVYGNSFESSLVAVVNPNKQALERWAESNGVTGEFATICEDPKAKEFILGELTKMGKEKKLKGFELIRAVHLDPVPFDMERDLITPTYKKKRPQLLKYYQSIIDGMYRSMK

SEQ ID NO: 83280 - protein, 430 aa, Setaria italica
  Transcript Sequence Number=SeqID_17306
PLSLGTRRARIRCVKDDSLHFDPSKIEPPPYSSYFDSTSGQLEPASGARASIPGKEYWPEGTAARVRAARAPAPVGESAGAPSFGTKPGSRRKGYKEHVTSASGTEGAQTDDGVDDDEPVVAIVDSGDDASEEPKDSADEYVIYEMPEEEELSEYDMDKMMGRPHPFIDPDKAMSLGEPKTSEELWWNWRRKSQEEEMWSRWQRRRPDVDTVFAKAMAETGQIKIFGDQPSRTEAALAKTRRHLFKEERLEEERRRLEEIGPIAYYSEWVEAYKNTDTSREAIQKHFEETGEDENAQLIKMFQHQTAGEYRIMMGTDVRIQRDPLAMRMREDQIKQIWGGDPVYPTINYVQDPEEVIDYRGPEFHEPTPEVVPYLMEHGIMITKEELYARLNEERDDVNQDITYIPEVKDPMATAVDIGEHSYNEDSDDE

SEQ ID NO: 83281 - protein, 89 aa, Setaria italica
  misc_feature (7)..(7): Xaa can be any naturally occurring amino acid
  Transcript Sequence Number=SeqID_17307
  Homolog annotation: Hit_ID=B6U215; Match level="QueryCoverage=98%, HitCoverage=18%, E-value=1e-39, Identity=82%"; Hit description =Lipopolysaccharide-modifying protein
  Pfam annotation: Domain name=DUF821; Domain location=1-89; Score= -305.1; E_value=0.00012; Accession=PF05686.4; Description=Arabidopsis thaliana protein of unknown function (DUF821)
REDHFDXPFPDWSFWGWPETNIEPWSREFKSIKAGAKATKWVDRVPTAYWKGNPDVASPLRVALLGCNDTGLWRAEIMRQNWTDEAKAG

SEQ ID NO: 83282 - protein, 220 aa, Setaria italica
  Transcript Sequence Number=SeqID_17308
  Homolog annotation: Hit_ID=B6U215; Match level="QueryCoverage=100%, HitCoverage=49%, E-value=1e-100, Identity=73%"; Hit description =Lipopolysaccharide-modifying protein
  Pfam annotation: Domain name=DUF821; Domain location=1-220; Score =164.4; E_value=3.3e-46; Accession=PF05686.4; Description=Arabidopsis thaliana protein of unknown function (DUF821)
MFDCMDKPAVNRTEHGDGDPAAPPPPPLFRPETNIEPWSREFKSIKAGAKATKWVDRVPTAYWKGNPDVASPLRVALLGCNDTGLWRAEIMRQNWTDEAKAGYQHSKLSSQCTHRYKIYAEGFAWSVSLKYILSCGSMALLIDPQYEDFFSRGLDPRVNYWPVSRVGMCESIRDAVDWGNANSAEAERVGRRGQRLMQDLSMAAVYDYMLHLLTEYAALM

SEQ ID NO: 83283 - protein, 120 aa, Setaria italica
  Transcript Sequence Number=SeqID_17309
  Gene Ontology: Mol. function=protein binding; Cellular component =cytosol; Biological process=protein modification process
  Homolog annotation: Hit_ID=Q6L516; Match level="QueryCoverage=77%, HitCoverage=11%, E-value=7e-35, Identity=75%"; Hit description =Putative GANP protein
  Pfam annotation: Domain name=SAC3_GANP; Domain location=2-116; Score =2.9; E_value=0.0005; Accession=PF03399.8; Description=SAC3GANP family
KTALVLHDCHSPNYFCLNSCSYNQCQSQLKRLYAEGIKGCYFEFAAYNLLCVMLHYNNKRDLLSSMASLSKEAKQDAAVKHALAVHAAVLSGNYVTFFKLYKKAPNLNACLMDFGILENR

SEQ ID NO: 83284 - protein, 138 aa, Setaria italica
  misc_feature (79)..(79): Xaa can be any naturally occurring amino acid
  misc_feature (99)..(99): Xaa can be any naturally occurring amino acid
  misc_feature (107)..(107): Xaa can be any naturally occurring amino acid
  Transcript Sequence Number=SeqID_17310
  Homolog annotation: Hit_ID=Q6L516; Match level="QueryCoverage=96%, HitCoverage=17%, E-value=5e-36, Identity=54%"; Hit description =Putative GANP protein
NDAKATQVGPDARSIPFSLRNYTIRNLNRCKDDAQRAACQSIMLEITRKAIADGTLLTKNWDTEPLLPLPESVVGMTEXATPRKRVKSRWEPAVDEKVXNKVEQIAXKDLANSNIHIPFEPKSRTGSSWDHGKFLQSH

SEQ ID NO: 83285 - protein, 79 aa, Setaria italica
  Transcript Sequence Number=SeqID_17311
KASSVGNIEKHDQEAYTEYMYVFGGTFFWLWLPHCPQKSVNYFFLHITLFSYRNISYIIREEPSTNTKYFIHITYLRQK

SEQ ID NO: 83286 - protein, 448 aa, Setaria italica
  Transcript Sequence Number=SeqID_17312
  Gene Ontology: Mol. function=protein binding; Cellular component =cytosol; Biological process=protein modification process
  Homolog annotation: Hit_ID=Q6L516; Match level="QueryCoverage=99%, HitCoverage=52%, E-value=0.0, Identity=73%"; Hit description =Putative GANP protein
  Pfam annotation: Domain name=SAC3_GANP; Domain location=177-372; Score=241.0; E_value=3e-69; Accession=PF03399.8; Description =SAC3GANP family
PAVDGKVEQIAGLPNSNIHIPFEPKSRTGSSWDHGKFLQSHQAPLNKVNQRPAKKQKVTSNSSQIQNGNASSDSDKEQDLTKYYASATALANSPEEKKRREHRSKRFERSQDSSLKSRNSSANKDAMANMHRRRAISSQLNRTYEDGTRAVEDMDWDALTIKGTCQEIEKRYLRLTSAPDPSIVRPEEVLEKALAMVETSQKNYFYKCDQLKSIRQDLTVQRIQNELTVKVYETHARLAMQAGDLPEYNQCQSQLKRLYAEGIKGCYFEFAAYNLLCVMLHYNNKRDLLSSMASLSKEAKQDAAVKHALAVHAAVLSGNYVTFFKLYKKAPNLNACLMDLYVERMRFEAMKCMSRSYRLTVPVGYVAQILGFLRTDSEGCTADVNDGLEECEKWLKAHGTVLSVDNNSGELQIDMKASSATLYMPEPENAVAHGDASLAVEDFLARTS

SEQ ID NO: 83287 - protein, 581 aa, Setaria italica
  misc_feature (24)..(24): Xaa can be any naturally occurring amino acid
  Transcript Sequence Number=SeqID_17313
  Homolog annotation: Hit_ID=Q6L516; Match level="QueryCoverage=64%, HitCoverage=38%, E-value=7e-80, Identity=50%"; Hit description =Putative GANP protein
  Subcellular localization annotation: CTP_CleavageSite=88; ConfidenceScore=5.09e-01
DGEPRRAAAGSEPPTAEVVSMGQXNPSPYPPLSSSHQSWSSASGSATVSWNNPVDKPSQDTVYYDPQRDVSVAGGNQNVGSSAPHAAQLSMGVADSSHSHVPYSSSVQHGYNPVEYANYYYSYPQATNDSSVQQGANQHPGAAYQPLTSFQNSGSYIDPTSNTYYNAGGHQTVPGYGSSNYYYQNNTWNGGSSGNNYAQSYQSYSSSDTNALQSSTSMPANSIPYQQQYNQWPYYYNQSVPSASSNPVAGKSTTDNVAVNNSSGYSYPNSQPPPPGTTAWKSNSIASVAPPMQVPGVSGLQNQYANQAQDHHANQVPGVQWSQDHYAYQAQAYPQKTMNSNRAPLSNPEDQQRTVEPIGRSSNTLSNHVSENFQPNLQGSVTTNTSSESKIQIPTNPRIAPGFSMVIPKSEKKNLGADLSKKPAYVSVSMPTNDAKATQVGPDARSIPFSLRNYTIRNLNRCKDDAQRAACQSIMLEITRKAIADGTLLTKNWDTEPLLPLPESVVGMTEASANHSNPFSSTATPRKRVKSRWEPAVDEKVTNKVEQIAKGLANSNIHIPFEPKSRTGSSWDHGKFLQSHQ

SEQ ID NO: 83288 - protein, 202 aa, Setaria italica
  Transcript Sequence Number=SeqID_17314
  Gene Ontology: Mol. function=carbonate dehydratase activity; Cellular component=chloroplast; Biological process=carbon utilization
  Homolog annotation: Hit_ID=B6TLF0; Match level="QueryCoverage=98%, HitCoverage=99%, E-value=1e-105, Identity=93%"; Hit description =Carbonic anhydrase
  Pfam annotation: Domain name=Pro_CA; Domain location=31-201; Score =218.4; E_value=1.9e-62; Accession=PF00484.11; Description=Carbonic anhydrase
MADAVERLKTGFEQFKADVYDKKPELFEPLKAHQSPKYMVFACSDSRVCPSVTLGLQPGEAFAVRNIASMVPPYDKTKYAGVGSAIEYAVCALKVEVIVVIGHSCCGGIKALLSLQDGEADKFHFVEDWVRIGAPAKAKVQADHASAAFEDQCSILEKEAVNVSLENLKTYPFVKEGLEKGTLKLVGGHYDFVSGKFETWEP

SEQ ID NO: 83289 - protein, 219 aa, Setaria italica
  Transcript Sequence Number=SeqID_17315
  Gene Ontology: Mol. function=serine-type endopeptidase activity; Cellular component=plasma membrane
  Homolog annotation: Hit_ID=Q9XI10; Match level="QueryCoverage=85%, HitCoverage=29%, E-value=1e-29, Identity=42%"; Hit description =F8K7.10 protein
  Subcellular localization annotation: CTP_CleavageSite=66; ConfidenceScore=5.03e-01
MARRAALLLLLLLVGPLYLAAPAPALAASGTIVFTTLGRSRYAFDIFALPLTPLSSSSSSPAAEVRLTDGASVNYNGNFAPSSDSLLFVSERNGTLNLYAFPVPSASGSGARREALEVPEAAAALPSPLLPWDPIALKDRPSLTPDGAHLVYVSTAEPAEAPRRSWAAVYNTHLPSGATRRLTPRGVADFSPAVSESGEWTAAASPGPDGWGGEVEDLN

SEQ ID NO: 83290 - protein, 171 aa, Setaria italica
  misc_feature (149)..(149): Xaa can be any naturally occurring amino acid
  Transcript Sequence Number=SeqID_17316
  Gene Ontology: Mol. function=catalytic activity; Biological process =guanosine tetraphosphate metabolic process
  Homolog annotation: Hit_ID=A8DD65; Match level="QueryCoverage=100%, HitCoverage=23%, E-value=1e-50, Identity=60%"; Hit description =RelA/SpoT-like protein
  Pfam annotation: Domain name=HD; Domain location=2-101; Score=9.9; E _value=0.0036; Accession=PF01966.14; Description=HD domain
CVETAALLADLGAGPAVVAAGLLHDTVDDAGLDYGFISKQFGAGVADLVKGVSNLSHFSKMARRNDTASRMDEADRLRTVFLATEDARAVLIKLADRLHNMRTLDSLPKIKQQSFAKETLEIFAPLANQLGILNWKEQLENLCFKYLYXKLNYMNSTNLLEFYNRDMIAAA

SEQ ID NO: 83291 - protein, 244 aa, Setaria italica
  misc_feature (62)..(62): Xaa can be any naturally occurring amino acid
  misc_feature (86)..(86): Xaa can be any naturally occurring amino acid
  Transcript Sequence Number=SeqID_17317
  Gene Ontology: Mol. function=microtubule motor activity; Cellular component=microtubule associated complex; Biological process =microtubule-based movement
  Homolog annotation: Hit_ID=Q9AVP5; Match level="QueryCoverage=68%, HitCoverage=26%, E-value=4e-49, Identity=59%"; Hit description=BY-2 kinesin-like protein 5
  Pfam annotation: Domain name=Kinesin; Domain location=87-244; Score= -35.0; E_value=3.6e-13; Accession=PF00225.15; Description=Kinesin motor domain
LKKNSFFVFHLHWRKKTLGGHVMVPLESLSLELPNGEILVGYDKDISALQEEISTLRSRQRXIVDRRRREALDKLIDLKGSIRVFXRVRPLVQTSNLKTKSLVTVEHEKIAVKSVGIKKEFSVDRVFDQESTQEDVFQEVKPILRSALDGHNVCILAFGQTGTGKTYTMEGTDGKLGIVPRAIQELFSHASEDSSSTYSLSISMLEVYLGSLRDLLAPRQPLFRPTECSTACNLSIMAIGQTKK

SEQ ID NO: 83292 - protein, 122 aa, Setaria italica
  Transcript Sequence Number=SeqID_17318
RLNFPIPHEDLPRRRTPVAIDLNVAAVSDDLDTVDVDGDAGDIRHEEMGGEAVRRTIAWIKELITQGPQDERIVPELKMNGALRYAALIAECSRQMEEIAALRRDLETHERQLVRLVSNVLR

SEQ ID NO: 83293 - protein, 82 aa, Setaria italica
  Transcript Sequence Number=SeqID_17319
  Gene Ontology: Mol. function=transferase activity; Cellular component= integral to membrane
  Homolog annotation: Hit_ID=Q9LN83; Match level="QueryCoverage=60%, HitCoverage=10%, E-value=1e-15, Identity=76%"; Hit description =T12C24.17
IFHTRGNCQLPLVWNIQVSTWLRYYVYERLIQKGKKPGFLQLLGTQTVSAVWHVSIYFLSPPMYLGAIWNHCRLLFSLAKQG

SEQ ID NO: 83294 - protein, 86 aa, Setaria italica
  Transcript Sequence Number=SeqID_17320
  Gene Ontology: Mol. function=transferase activity; Cellular component= integral to membrane
  Homolog annotation: Hit_ID=Q9LN83; Match level="QueryCoverage=93%, HitCoverage=17%, E-value=2e-26, Identity=70%"; Hit description =T12C24.17
GFTARWKYYFIWSISEAAIIISGLGFTGWSESSPPKAKWDRAKNVDVLGVELAGSAVQLPLVWNIQVSTWLRYYVYERLTVCVPNN

SEQ ID NO: 83295 - protein, 85 aa, Setaria italica
  Transcript Sequence Number=SeqID_17321
  Gene Ontology: Mol. function=transferase activity; Cellular component= integral to membrane
  Homolog annotation: Hit_ID=B9RC25; Match level="QueryCoverage=45%, HitCoverage=11%, E-value=9e-11, Identity=74%"; Hit description=O -acyltransferase (Membrane bound) domain containing protein, putative
YSSLGLLSLRLPCWFDNIAQQDTYNGNNCANIIHALVGCQRFLEAQYLSPKFPLSRFSEPLYYEWGFWHRLFYQYMSGFTARWKY

SEQ ID NO: 83296 - protein, 49 aa, Setaria italica
  Transcript Sequence Number=SeqID_17322
  Gene Ontology: Mol. function=transferase activity; Cellular component= integral to membrane
FCFLKVLSFKETLASYQSVYYVGTIVPIVCVLLGNVIKPARKPKAQKAE

SEQ ID NO: 83297 - protein, 118 aa, Setaria italica
  Transcript Sequence Number=SeqID_17323
  Gene Ontology: Mol. function=transferase activity; Cellular component= integral to membrane
  Homolog annotation: Hit_ID=Q9LN83; Match level="QueryCoverage=100%, HitCoverage=26%, E-value=3e-35, Identity=61%"; Hit description =T12C24.17
  Subcellular localization annotation: CTP_CleavageSite=54; ConfidenceScore=5.12e-01
LFSVVGTQTVSAVWHGLYPGYIIFFVQSALMINGSRVIYRWQQTVNNSVFRGILAFLNFAYTLLVLNYSCIGFQVLSFKETLASYQSVYYVGTIVPIVCVLLGNVIKPARKPKAQKAE

SEQ ID NO: 83298 - protein, 121 aa, Setaria italica
  Transcript Sequence Number=SeqID_17324
  Gene Ontology: Mol. function=transferase activity; Cellular component= integral to membrane
  Homolog annotation: Hit_ID=B9RC25; Match level="QueryCoverage=79%, HitCoverage=28%, E-value=4e-44, Identity=88%"; Hit description=O -acyltransferase (Membrane bound) domain containing protein, putative
FFLCSVVYYIIITHSKSLTCFVLITSHVYYMSGDAWKEGGIDATGALMVLTLKVISCAINYSDGILKEEGLRDAQKKYRLTKLPSLIEYFGYCLCCGSHFAGPVYEMKDYLDWTERKGYGL

SEQ ID NO: 83299 - protein, 221 aa, Setaria italica
  Transcript Sequence Number=SeqID_17325
  Gene Ontology: Mol. function=transferase activity; Cellular component= integral to membrane; Biological process=phospholipid biosynthetic process
  Homolog annotation: Hit_ID=Q9LN83; Match level="QueryCoverage=96%, HitCoverage=47%, E-value=9e-78, Identity=65%"; Hit description =T12C24.17
  Pfam annotation: Domain name=MBOAT; Domain location=1-181; Score =25.7; E_value=1.1e-06; Accession=PF03062.11; Description=MBOAT family
LEIGVRWHRLFYQYMSGFTARWKYYFIWSISEAAIIISGLGFTGWSESSPPKAKWDRAKNVDVLGVELAGSAVQLPLVWNIQVSTWLRYYVYERLIQKGKKPGFLQLLGTQTVSAVWHGLYPGYIIFFVQSALMINGSRVIYRWQQTVNNSVFRGILAFLNFAYTLLVLNYSCIGFQVLSFKETLASYQSVYYVGTIVPIVCVLLGNVIKPARKPKAQKAE

SEQ ID NO: 83300 - protein, 374 aa, Setaria italica
  Transcript Sequence Number=SeqID_17326
  Gene Ontology: Mol. function=transferase activity; Cellular component= integral to membrane
  Homolog annotation: Hit_ID=Q9LN83; Match level="QueryCoverage=98%, HitCoverage=81%, E-value=1e-150, Identity=69%"; Hit description =T12C24.17
  Pfam annotation: Domain name=MBOAT; Domain location=103-374; Score =188.9; E_value=1.4e-53; Accession=PF03062.11; Description=MBOAT family
MGLEMEAMAASIGVSVPVLRFLLCFAATIPTGLLWRAVPGATGRHLYAGLTGAALSYLSFGATSNLLFVVPMALGYLAMLLFRRHAGLITFLGAFGFLIACHVYYMSGDAWKEGGIDATGALMVLTLKVISCAINYSDGILKEEGLRDAQKKYRLTKLPSLIEYFGYCLCCGSHFAGPVYEMKDYLDWTERKGIWASPTPSPLLPTLRALVQAGICMGLYLYLSPKFPLSRFSEPLYYEWGFWHRLFYQYMSGFTARWKYYFIWSISEAAIIISGLGFTGWSESSPPKAKWDRAKNVDVLGVELAGSAVQLPLVWNIQVSTWLRYYVYERLIQKGKKPGFLQLLGTQTVSAVWHGLYPGYIIFFVQSALMINGS

SEQ ID NO: 83301 - protein, 108 aa, Setaria italica
  Transcript Sequence Number=SeqID_17327
  Gene Ontology: Mol. function=binding
  Homolog annotation: Hit_ID=Q84UC4; Match level="QueryCoverage=92%, HitCoverage=8%, E-value=2e-29, Identity=65%"; Hit description=HASTY
PDARAAAFAYLESVKSGDVRALASTSFLLVRKDQTSEIRLHGFKMLQHLVRLRWEELSASERNEFANLTINLISDVVGPDEVWALKSQTAALVAEVVRREGVALCGTP

SEQ ID NO: 83302 - protein, 97 aa, Setaria italica
  Transcript Sequence Number=SeqID_17328
  Gene Ontology: Mol. function=cysteine-type peptidase activity; Cellular component=nucleus; Biological process=regulation of transcription, DNA-dependent
  Homolog annotation: Hit_ID=Q6IEM4; Match level="QueryCoverage=86%, HitCoverage=17%, E-value=5e-13, Identity=41%"; Hit description=WRKY transcription factor 57
SRSRATVPVVEGPTPMQPNGYDCGVYVMAIARAICGWWKSGHGGHRGGDWFEAVGREVNADSVKAMRGELLQLINTLIQDKAKASSTSEGNKTSNTD

SEQ ID NO: 83303 - protein, 679 aa, Setaria italica
  Transcript Sequence Number=SeqID_17329
  Gene Ontology: Mol. function=protein serine/threonine kinase activity; Cellular component=cell surface; Biological process =protein amino acid phosphorylation
  Homolog annotation: Hit_ID=O82103; Match level="QueryCoverage=95%, HitCoverage=78%, E-value=0.0, Identity=89%"; Hit description=S -domain receptor-like protein kinase
  Pfam annotation: Domain name=APH; Domain location=260-539; Score= -21.1; E_value=0.082; Accession=PF01636.15; Description =Phosphotransferase enzyme family
  Pfam annotation: Domain name=PAN_1; Domain location=210-281; Score =13.1; E_value=0.01; Accession=PF00024.18; Description=PAN domain
  Pfam annotation: Domain name=PAN_2; Domain location=197-264; Score =98.7; E_value=2e-26; Accession=PF08276.3; Description=PAN-like domain
  Pfam annotation: Domain name=Pkinase; Domain location=350-621; Score =177.8; E_value=3.1e-50; Accession=PF00069.17; Description=Protein kinase domain
  Pfam annotation: Domain name=Pkinase_Tyr; Domain location=351-618; Score=81.6; E_value=2.9e-21; Accession=PF07714.9; Description =Protein tyrosine kinase
  Pfam annotation: Domain name=S_locus_glycop; Domain location=55-180; Score=213.1; E_value=7.2e-61; Accession=PF00954.12; Description=S -locus glycoprotein family
  Pfam module annotation: Pfam domain module=APH::PAN_1::PAN _2::Pkinase::Pkinase_Tyr::S_locus_glycop; Domain location=260 -539::210-281::197-264::350-621::351-618::55-180
  Subcellular localization annotation: CTP_CleavageSite=34; ConfidenceScore=5.09e-01
YWRSIDHPTNTWLPGGKLGLNKTTGVSQRLVPWRNMANPSPGLFSLELDPNGTTQYFIQWKDSKTYWTSGPWNGNIFSLVPEMTAGYNYNFQFINNDTESYFIYSMKDNNVISRFIIDVNGQIKQETWVSASQSWIMFWAQPRTQCEVYAVCGAYGSCNLNALPFCNCIKGFTQKVQSDWDLQDFSGGCKRRVPLQCQTNSSSAQAKPDKFYTMTGVRLPDNAQTAVAASSQDCQVTCLSNCSCNAYTYNSSGCFVWHGDLINLQDQYSGNGGGTLFLRIAASELPDSKKSKTVIIGAVVGGVAAVLIAIATVSYFLFQKYRRDRTLRISKTAGGTLISFRYSDLQHVTNNFSERIGGGAFGSVFKGKLPDSTAIAVKRLDGVHQGEKQFRAEVSTIGTIQHVNLVRLLGFCSEGSRRLLVYEFMPKGSLDLQLFPGETTELSWASRYQIALGTARGLNYLHEKCRDCIIHCDVKPENILLDESFVPKVADFGLAKLLGRDFSRVLTTMRGTRGYLAPEWISGVAITAKADVFSYGMMLFELISGRRNSDHGEKCGSTFFPTFAASKLHEGDVRSLMDPRLNGDANVDELTRACKVACWCIQDDESARPTTGQIVQILEGFLDVNMPPVPRSLRVLGESPDVMNFFSDISSSQASQTQDSTTTSQTHSATSGGSHFQSI

SEQ ID NO: 83304 - protein, 103 aa, Setaria italica
  misc_feature (72)..(72): Xaa can be any naturally occurring amino acid
  misc_feature (87)..(87): Xaa can be any naturally occurring amino acid
  misc_feature (94)..(94): Xaa can be any naturally occurring amino acid
  Transcript Sequence Number=SeqID_17330
  Gene Ontology: Mol. function=transporter activity; Cellular component= intracellular; Biological process=transport
  Homolog annotation: Hit_ID=B9R7Y5; Match level="QueryCoverage=96%, HitCoverage=15%, E-value=4e-30, Identity=60%"; Hit description =Phosphatidylinositol transporter, putative
DPTKLLNATTVERFLKYHVQSLERLFAEKYPACSVASKKHVDTITTILDVKGVNWMKVSKLAREVVLHINKXDGDNYPEILHRMFIXNAGSGFXLCGLWRGLI

SEQ ID NO: 83305 - protein, 109 aa, Setaria italica
  misc_feature (17)..(17): Xaa can be any naturally occurring amino acid
  Transcript Sequence Number=SeqID_17331
HPSIPPLTLRSSSLTRXPTMVDLDLDPVDSPIATPPPCATPTFGVSEPGSSEAGPSIPSVGELWAYAASGSSGFASSSSSAGRSPSPSLSDILRGSGVPIPERTPSPSP

SEQ ID NO: 83306 - protein, 104 aa, Setaria italica
  Transcript Sequence Number=SeqID_17332
QPLLRWHPRRSYTDSAFVERLKEIEAINSNDEARSVSGETTADNKPSGDLMEDPLACILGSPGDVESNNPPGKTSTVLKRSELRARRRSHRHHHRHADDKFAAL

SEQ ID NO: 83307 - protein, 93 aa, Setaria italica
  Transcript Sequence Number=SeqID_17333
  Subcellular localization annotation: CTP_CleavageSite=45; ConfidenceScore=5.66e-01
LSRASPPPPPPPVTTPVPASTASWRWPSWRRWPPTCIPHPTTHPRSSSLTRAPTMVDLDLDPVDSPIATPPPCATPTFRRCSVVPVFYSVRFG

SEQ ID NO: 83308 - protein, 265 aa, Setaria italica
  Transcript Sequence Number=SeqID_17334
MAGLLQLIKDLYFGPPPGKGVIQDLEYAMRTKGGLTKEEDTKLQIANLVPTAAFALFSGLGSYAGWFSLGLGNKLLGFPPSPVFARFCAATGGAYIMGTAMYRGTLHECPVSLLNTEGRMKMELANIILTKHSDDAYLVKAMKKHFFAEHLFDDLHQDQPLLRWHPRRSYTDSAFVERLKEIEAINSNDEARSVSGETTADNKPSGDLMEDPLACILGSPGDVESNNPPGKTSTVLKRSELRARGRSHRHHHRHRLEIRNKSLRT

SEQ ID NO: 83309 - protein, 142 aa, Setaria italica
  Transcript Sequence Number=SeqID_17335
  Gene Ontology: Mol. function=translation initiation factor activity; Cellular component=cytoplasm; Biological process=translational initiation
  Homolog annotation: Hit_ID=P47815; Match level="QueryCoverage=100%, HitCoverage=100%, E-value=2e-57, Identity=80%"; Hit description =Eukaryotic translation initiation factor 1A
  Pfam annotation: Domain name=eIF-1a; Domain location=30-94; Score =120.8; E_value=4.5e-33; Accession=PF01176.11; Description=Eukaryotic initiation factor 1A
MPKNKGKGGKNRKRGKNEADDEKRELVFKEDGQEYAQVTRMLGNGRCEALCIDGTKRLCHIRGKMHKKVWIAAGDIVLVGLRDYQDDKADVILKYMNDEARLLKAYGEIPDNVRLNEGVVDEEDTGAQDDYIQFEDEDIDKI

SEQ ID NO: 83310 - protein, 144 aa, Setaria italica
  Transcript Sequence Number=SeqID_17336
  Gene Ontology: Mol. function=translation initiation factor activity; Cellular component=cytoplasm; Biological process=translational initiation
  Homolog annotation: Hit_ID=P47815; Match level="QueryCoverage=100%, HitCoverage=100%, E-value=6e-64, Identity=85%"; Hit description =Eukaryotic translation initiation factor 1A
  Pfam annotation: Domain name=eIF-1a; Domain location=30-94; Score =122.6; E_value=1.3e-33; Accession=PF01176.11; Description=Eukaryotic initiation factor 1A
MPKNKGKGGKNRKRGKNEADDDKRELVFKEDGQEYAQVTRMLGNGRCEAICVDGTRRLCHIRGKMHKKVWIAAGDIVLVGLRDYQDDKADVILKYMNDEARLLKAYGELPETLRLNEGVDVDGPEDGEEGSDYIQFEDEDIDKI

SEQ ID NO: 83311 - protein, 337 aa, Setaria italica
  Transcript Sequence Number=SeqID_17337
  Homolog annotation: Hit_ID=Q9SA06; Match level="QueryCoverage=40%, HitCoverage=42%, E-value=2e-18, Identity=40%"; Hit description =F28K20.6 protein
MECEPEELQFLGAAGIYAASASILRGPHRPLFARVAAAFVLPLAALFLLHVAISHALFTHIDTDDTALDSSAPGTDAQRRLLSRLASDWLALLLFKAAYLLALLLLSLLATAAAVFSVASVYSAKHDALTFPRVLSVVPRVWRRLAATFLAAFALLFAYHAVFVVVFLGLLVAADNGSGLAGLLAFLLVVAYLVGLVYISVVWHLASVVSVLEDYKGFAAMRKSRDLIRGKLPTAAAIFVTLNLVFAVVELAFRAWVVKAGGSSPALARLLVGLLALAALSCVVMLALVAQTLVYLVCKSYHHESIDKAGISDHLEVYLGDYVPLKASDVQMEQFQV

SEQ ID NO: 83312 - protein, 105 aa, Setaria italica
  Transcript Sequence Number=SeqID_17338
  Gene Ontology: Mol. function=protein binding
  Homolog annotation: Hit_ID=B6T8V9; Match level="QueryCoverage=90%, HitCoverage=17%, E-value=4e-50, Identity=97%"; Hit description=GAMYB- binding protein
MLQCAERKKPCNMDQQSAFYCFGLFLGMQEKGSTSVTVDYEFAARTRPSGEFVSKYKGYYTFTGGKAVGYRNLFAIPWPSFMADDSLFFIDGVLHLRAELTIKQP

SEQ ID NO: 83313 - protein, 147 aa, Setaria italica
  Transcript Sequence Number=SeqID_17339
  Gene Ontology: Mol. function=protein binding
  Homolog annotation: Hit_ID=B6T8V9; Match level="QueryCoverage=100%, HitCoverage=25%, E-value=5e-62, Identity=84%"; Hit description=GAMYB- binding protein
  Pfam annotation: Domain name=BTB; Domain location=63-147; Score=5.1; E_value=0.0055; Accession=PF00651.23; Description=BTBPOZ domain
RRGKESGANCKVEAEECDAYEEGNEEPVAMIEESPPDIEQDGQCNLTSAIKCEDGESSDSSWSMECTQVLRVKSIYISSAILAAKSPFFYKLFSNGMKESDQRHATLRITASEENALMELLSFMYSGKLTTNQPTLLLDILMIADKF

SEQ ID NO: 83314 - protein, 539 aa, Setaria italica
  Transcript Sequence Number=SeqID_17340
  Gene Ontology: Mol. function=protein binding
  Homolog annotation: Hit_ID=B6T8V9; Match level="QueryCoverage=98%, HitCoverage=100%, E-value=0.0, Identity=86%"; Hit description=GAMYB -binding protein
  Pfam annotation: Domain name=BACK; Domain location=237-345; Score =1.0; E_value=0.00048; Accession=PF07707.7; Description=BTB And C -terminal Kelch
  Pfam annotation: Domain name=BTB; Domain location=127-228; Score =42.7; E_value=1.5e-09; Accession=PF00651.23; Description=BTBPOZ domain
  Pfam module annotation: Pfam domain module=BACK::BTB; Domain location= 237-345::127-228
LIRGGGRGMDPDFSRGSGGPSFEFAFNSVNFSDRVLRIEIVAGDDAPGAKGAAGEGCSSLADWARHRKRRREELRRGKESGANCKVEAEECDAYEEGNEEPVAMIEESPPDIEQDGEDGESSDSSWSMECTQVLRVKSIYISSAILAAKSPFFYKLFSNGMKESDQRHATLRITASEENALMELLSFMYSGKLTTNQPTLLLDILMIADKFEVVSCMRHCSQLLRSLPMTTESALLYLDLPSSISVATAVQPLTDTAKEFLANKYKDLTKFQDEAMTIPLAGIEAILWSNDLQVASEDAIYDFVIKWARAQYPKLEERREILGTRLLPLVRFCHMTCRKLRKVLACSDLDHEQATKCVTEALLYKADAPHRQRALAADVMTCRKYAERAYKYRPLKVVEFDRPYPQCIAYLDLKREECSRLFPSGRIYSQAFHLAGQGFFLSAHCNMDQQSAFYCFGLFLGMQEKGSTSVTVDYEFAARTRPSGEFVSKYKGYYTFTGGKAVGYRNLFAIPWPSFMADDSLFFIDGVLHLRAELTIKQP

SEQ ID NO: 83315 - protein, 309 aa, Setaria italica
  Transcript Sequence Number=SeqID_17341
  Gene Ontology: Cellular component=chloroplast
  Homolog annotation: Hit_ID=B9SPX9; Match level="QueryCoverage=74%, HitCoverage=66%, E-value=1e-59, Identity=50%"; Hit description =Electron transporter, putative
  Pfam annotation: Domain name=DUF179; Domain location=133-302; Score =108.1; E_value=2.9e-29; Accession=PF02622.7; Description =Uncharacterized ACR, COG1678
LWRRGAAWAPLVAVRASGGGRKDGPVGGEGNGEEAESKASSSGHDDASAPEGDTSAGLNKPHDEPKSSDPINVSSSSYWRDVRANLVRREQELFEDPSAPTESKASSVDPVQLPQKWAHAITMPEAGCVLVATEALDDDSIFERTVIFLLRLGSRGTFDGPFGIILNRPLYTKIKHVNPSLRDQATPFGDSPLFFGGPVDMSMFLVRTNDSSRLKGFEEVIPGICYGFRTDLEKAAALMKSGAIRTQDLRFYVGHAAWDYEQLLGEIRAGYWAVASCSTELISDALAGDPSCLWTEILQLMGGQGSTRS

SEQ ID NO: 83316 - protein, 76 aa, Setaria italica
  Transcript Sequence Number=SeqID_17342
AAFSYWGSAAATPAEATASSSASEAAVRPHREHIGVGGSYEAAWRAHRRPGLRRAHRRRIRCGLQGCAASASAAEA

SEQ ID NO: 83317 - protein, 253 aa, Setaria italica
  misc_feature (184)..(184): Xaa can be any naturally occurring amino acid
  Transcript Sequence Number=SeqID_17343
  Homolog annotation: Hit_ID=O64533; Match level="QueryCoverage=93%, HitCoverage=13%, E-value=6e-20, Identity=34%"; Hit description =YUP8H12R.20
SPFVDILLDHFRRLSTVVRSKNIYRDGHRWYMNGEAGHTLRQASSAVCMLNELIYGLSDRSLGMFLQLFQKRSAQMVRTACQNDQLIASVKHNGVTNEREVWGCNEQKGTKDNIIHCIGSILHEYICPEVWDLPTEKDIELCLTELNLPLHFYRDTTALHTVIMNNYHSQIGIVSLLSFEYLFXKYYLLKYFSLWFQVTLEGIGVLGAVLGQDFARSGFMHSSLYLLLRELISSSAQIRIASDAVLRALAAAG

SEQ ID NO: 83318 - protein, 170 aa, Setaria italica
  misc_feature (81)..(81): Xaa can be any naturally occurring amino acid
  misc_feature (135)..(135): Xaa can be any naturally occurring amino acid
  Transcript Sequence Number=SeqID_17344
  Gene Ontology: Mol. function=nucleoside-triphosphatase activity; Cellular component=90S preribosome; Biological process=maturation of 5.8S rRNA from tricistronic rRNA transcript (SSU-rRNA, 5.8S rRNA, LSU- rRNA)
  Homolog annotation: Hit_ID=Q10MC7; Match level="QueryCoverage=94%, HitCoverage=19%, E-value=5e-63, Identity=79%"; Hit description=Pre -mRNA splicing factor ATP-dependent RNA helicase, putative, expressed
MIDSRYVEQIPQFVLEAEGLGNRSMVACTQPRRVAAMSVSRRVAEEMDVTIGEEVGYSIRFEDCSSHKTVLKYSDLILLCXTLLLPIRYLTDGMLLREAMADPLLERYKVIVLDEAHERTLATDVLFGLLKEVLXKNRPDLKLVVMSATLEAEKFQGYFSGAPLMKVQGG

SEQ ID NO: 83319 - protein, 68 aa, Setaria italica
  Transcript Sequence Number=SeqID_17345
  Gene Ontology: Mol. function=nucleoside-triphosphatase activity
  Homolog annotation: Hit_ID=Q10MC7; Match level="QueryCoverage=100%, HitCoverage=9%, E-value=1e-14, Identity=64%"; Hit description=Pre -mRNA splicing factor ATP-dependent RNA helicase, putative, expressed
MGTERKRKVSLFDVVDETSVSAKLGRAATNGAAAAAAGGANPTVNRWNGRPYSGRYFEILEKRRTLPV

SEQ ID NO: 83320 - protein, 111 aa, Setaria italica
  misc_feature (104)..(104): Xaa can be any naturally occurring amino acid
  Transcript Sequence Number=SeqID_17346
  Gene Ontology: Mol. function=nucleoside-triphosphatase activity; Cellular component=nucleus; Biological process=mRNA processing
  Homolog annotation: Hit_ID=Q10MC7; Match level="QueryCoverage=95%, HitCoverage=14%, E-value=2e-51, Identity=96%"; Hit description=Pre -mRNA splicing factor ATP-dependent RNA helicase, putative, expressed
TLLLPIRYLTDGMLLREAMADPLLERYKVIVLDEAHERTLATDVLFGLLKEVLKNRPDLKLVVMSATLEAEKFQGYFSGAPLMKVPGRLHPVEIFYTQEPERDXYLEAAIR

SEQ ID NO: 83321 - protein, 247 aa, Setaria italica
  Transcript Sequence Number=SeqID_17347
  Gene Ontology: Mol. function=nucleoside-triphosphatase activity; Cellular component=nucleus; Biological process=mRNA processing
  Homolog annotation: Hit_ID=Q10MC7; Match level="QueryCoverage=94%, HitCoverage=32%, E-value=1e-113, Identity=85%"; Hit description=Pre -mRNA splicing factor ATP-dependent RNA helicase, putative, expressed
  Pfam annotation: Domain name=HA2; Domain location=72-163; Score =104.8; E_value=2.9e-28; Accession=PF04408.15; Description=Helicase associated domain (HA2)
HQRAGRAGRTQPGKCFRLYTEKSFNEDLQPQTYPEILRSNLANTVLTLKKLGIDDLVHFDFMDPPAPETLMRALEVLNYLGALDDEGNLTQLGEMMSEFPLDPQMSKMLVISPKYNCSNEILSVSAMLSDIPNCFLRPREAQKAADEAKARFGHIDGDHLTLLNVYHAYKQNNEDPQWCYENFINSRALKSADNVRQQLVRMSTLGHQMAFLQMNYHVFIWTTLLVNLCKQSAMFLDLLSLHADYCM

SEQ ID NO: 83322 - protein, 695 aa, Setaria italica
  misc_feature (39)..(39): Xaa can be any naturally occurring amino acid
  Transcript Sequence Number=SeqID_17348
  Gene Ontology: Mol. function=nucleoside-triphosphatase activity; Cellular component=nucleus; Biological process=ribosome biogenesis
  Homolog annotation: Hit_ID=Q10MC7; Match level="QueryCoverage=95%, HitCoverage=92%, E-value=0.0, Identity=94%"; Hit description=Pre -mRNA splicing factor ATP-dependent RNA helicase, putative, expressed
  Pfam annotation: Domain name=DEAD; Domain location=37-199; Score= -21.4; E_value=0.0015; Accession=PF00270.21; Description=DEADDEAH box helicase
  Pfam annotation: Domain name=DUF1605; Domain location=561-664; Score =100.9; E_value=4.5e-27; Accession=PF07717.8; Description=Domain of unknown function (DUF1605)
  Pfam annotation: Domain name=Flavi_DEAD; Domain location=51-204; Score=-45.5; E_value=0.046; Accession=PF07652.6; Description =Flavivirus DEAD domain
  Pfam annotation: Domain name=HA2; Domain location=437-527; Score =110.0; E_value=8.2e-30; Accession=PF04408.15; Description=Helicase associated domain (HA2)
  Pfam annotation: Domain name=Helicase_C; Domain location=276-376; Score=51.8; E_value=2.6e-12; Accession=PF00271.23; Description =Helicase conserved C-terminal domain
  Pfam module annotation: Pfam domain module=DEAD::DUF1605::Flavi _DEAD::HA2::Helicase_C; Domain location=37-199::561-664::51-204::437 -527::276-376
KTLLTVTKGRKKEELEGIDLVRKNSTPDFEILEKRRTPXVWQQKDEFLRALRDNQTLILVGETGSGKTTQIPQFVLEAEGLGNRSMVACTQPRRVAAMSVSRRVAEEMDVTIGEEVGYSIRFEDCSSHKTVLKYLTDGMLLREAMADPLLERYKVIVLDEAHERTLATDVLFGLLKEVLKNRPDLKLVVMSATLEAEKFQGYFSGAPLMKVPGRLHPVEIFYTQEPERDYLEAAIRTVVQIHTCEPAGDILVFLTGEEEIEDACRKINKEINNMGDQVGPVKVVPLYSTLPPAMQQKIFEPAPAPLKEGGPPGRKIVVSTNIAETSLTIDGIVYVIDPGFSKQKVYNPRIRVESLLVSPISKASAHQRAGRAGRTQPGKCFRLYTEKSFNEDLQPQTYPEILRSNLANTVLTLKKLGIDDLVHFDFMDPPAPETLMRALEVLNYLGALDDEGNLTQLGEMMSEFPLDPQMSKMLVISPKYNCSNEILSVSAMLSVPNCFLRPREAQKAADEAKARFGHIDGDHLTLLNVYHAYKQNNEDPQWCYENFINSRALKSADNVRQQLVRIMTRFNLKMCSTDFNSREYYVNIRKAMLSGYFMQVAHLERTGHYLTVKDNQVVHLHPSNCMDHKPEWVIYNEYVLTTRNFIRTVTDIRGEWLIDIAPHYYDLSNFPSCEAKRVLERLYNKRERERATNRG

SEQ ID NO: 83323 - protein, 265 aa, Setaria italica
  Transcript Sequence Number=SeqID_17349
  Gene Ontology: Mol. function=protein serine/threonine kinase activity; Cellular component=extracellular region; Biological process=protein amino acid phosphorylation
  Homolog annotation: Hit_ID=B6SUE5; Match level="QueryCoverage=100%, HitCoverage=100%, E-value=1e-90, Identity=65%"; Hit description =Serine/threonine kinase-like protein
  Pfam annotation: Domain name=DUF26; Domain location=188-240; Score =74.8; E_value=3.2e-19; Accession=PF01657.9; Description=Domain of unknown function DUF26
  Pfam annotation: Domain name=DUF26; Domain location=76-128; Score =94.6; E_value=3.5e-25; Accession=PF01657.9; Description=Domain of unknown function DUF26
  Pfam module annotation: Pfam domain module=DUF26::DUF26; Domain location=188-240::76-128
MEFSTMRRSCVLLVSLALLPVLGMAADSIGSYCAGNSYAGNNKAVASINSVLADLVATASTGGYATSTAGKGNNVIYGLAQCRGDVSAGDCAACLADAAKQLPATCSYSSDARIWYDYCFMRYENANFIGQADTDAGVILVNVQGMDNAKAFEKAVGKVVGKAAAQASASGSGGLGRDKDQYTAFVTIYGLAQCTRDLAPLACAQCLSTAVSRFGDYCRAQQGCQINYSSCRVRYEIYPFYFPLAGNAGRATTDMTKNTKIVVHP

SEQ ID NO: 83324 - protein, 65 aa, Setaria italica
  Transcript Sequence Number=SeqID_17350
  Gene Ontology: Mol. function=protein binding
  Homolog annotation: Hit_ID=Q2R3L2; Match level="QueryCoverage=84%, HitCoverage=16%, E-value=2e-13, Identity=69%"; Hit description =Leucine Rich Repeat family protein
MFCRMLFENNLTGSIPSSLGNLKSLMNLELQKNALSGAIPASLGNIKTLQFLYNLVPKFTQICIQ

SEQ ID NO: 83325 - protein, 201 aa, Setaria italica
  Transcript Sequence Number=SeqID_17351
  Gene Ontology: Mol. function=phosphoinositide phospholipase C activity; Cellular component=plasma membrane; Biological process =intracellular signaling cascade
  Homolog annotation: Hit_ID=Q9FSW1; Match level="QueryCoverage=93%, HitCoverage=29%, E-value=1e-82, Identity=82%"; Hit description =Phosphoinositide-specific phospholipase C
  Pfam annotation: Domain name=PI-PLC-X; Domain location=12-108; Score =21.6; E_value=2.5e-07; Accession=PF00388.11; Description =Phosphatidylinositol-specific phospholipase C, X domain
YPLCALPFPCCVSQSSKDDIDVLHGRTLTAPVSLIKCLRSIKEYAFVASPYPVIITFEDHLTPDLQAKVAKMVLEVFGDILYYPESKHLQEFPSPEALKGRVLLSTKPPKEYLEANSGTMKDREIESQFKKGEKEEAAWGVEVPDIQDEMQVADRHDDDLLYRGRGLDDDDKQKTSKHVATEYKHLITIKAGKPKGPLVDA

SEQ ID NO: 83326 - protein, 143 aa, Setaria italica
  Transcript Sequence Number=SeqID_17352
  Gene Ontology: Cellular component=integral to membrane
  Homolog annotation: Hit_ID=C1E6V8; Match level="QueryCoverage=95%, HitCoverage=41%, E-value=2e-40, Identity=60%"; Hit description =Drug/Metabolite transporter superfamily
YVAQRLRFFEPKAIDGQTVVLFGLLNGTSIGLLNLSLGFNSIGFYQMTKLAIIPFTVLLETIFLKKRFSETIKFSLLVLLLGVGIASVTDLKLNFLGSILSGLAIATTCVGQILTNTIQRKLKVSSTQLLYQSAPYQAAILFA

SEQ ID NO: 83327 - protein, 199 aa, Setaria italica
  Transcript Sequence Number=SeqID_17353
  Gene Ontology: Cellular component=integral to membrane
  Homolog annotation: Hit_ID=Q9FWG4; Match level="QueryCoverage=99%, HitCoverage=49%, E-value=1e-76, Identity=77%"; Hit description =Putative glucose-6-phosphate/phosphate-translocator
  Subcellular localization annotation: CTP_CleavageSite=16; ConfidenceScore=5.30e-01
MSDGAGSRMGVVGALSLSVTSSVAIVICNKYLISTLGFFFATTLTSWHLMVTFFTLYVAQRLRFFEPKPIDTRTVISFGLLNGISIGLLNLCLGFNSVGFYQMTKLAIIPFTIVLETIFLNKKFSQSIKASLMVLLLGVGIASVTDLQLNLLGSIIAVLTIAATCVGQILTNQIQRRLKVSSTQLLYQSSPYQSAVLLV

SEQ ID NO: 83328 - protein, 226 aa, Setaria italica
  Transcript Sequence Number=SeqID_17354
  Gene Ontology: Cellular component=integral to membrane
  Homolog annotation: Hit_ID=Q9FWG4; Match level="QueryCoverage=84%, HitCoverage=58%, E-value=2e-75, Identity=73%"; Hit description =Putative glucose-6-phosphate/phosphate-translocator
  Pfam annotation: Domain name=DUF6; Domain location=41-165; Score=3.3; E_value=0.05; Accession=PF00892.12; Description=Integral membrane protein DUF6
  Pfam annotation: Domain name=TPT; Domain location=32-165; Score =143.3; E_value=7.5e-40; Accession=PF03151.8; Description=Triose -phosphate Transporter family
  Pfam module annotation: Pfam domain module=DUF6::TPT; Domain location= 41-165::32-165
TRNYDQYDQRTCVGQILTNTIQRKLKVSSTQLLYCVGQILTNTIQRKLKVSSTQLLYQSAPYQSAVLLVTGPFVDKFLTKRDVFAFNYTVQVVAFIALSCSIAVCVNFSTFLVIGTTSPVTYQVLGHLKTCLVLSFGYIILKDPFSVRNVAGILVAIFGMGLYSYYSVAESRKKTEAAVSLPVAAQMIEKDSAPLLGAKGSPRTENKNEDSFDYMPRTAKSAFTGR

SEQ ID NO: 83329 - protein, 341 aa, Setaria italica
  misc_feature (63)..(63): Xaa can be any naturally occurring amino acid
  Transcript Sequence Number=SeqID_17355
  Gene Ontology: Cellular component=integral to membrane
  Homolog annotation: Hit_ID=Q9FWG4; Match level="QueryCoverage=93%, HitCoverage=87%, E-value=1e-115, Identity=68%"; Hit description =Putative glucose-6-phosphate/phosphate-translocator
  Pfam annotation: Domain name=DUF554; Domain location=109-293; Score= -133.3; E_value=0.019; Accession=PF04474.4; Description=Protein of unknown function (DUF554)
  Pfam annotation: Domain name=Nuc_sug_transp; Domain location=86-269; Score=-175.7; E_value=0.075; Accession=PF04142.7; Description =Nucleotide-sugar transporter
  Pfam annotation: Domain name=TPT; Domain location=151-293; Score =156.1; E_value=1e-43; Accession=PF03151.8; Description=Triose -phosphate Transporter family
  Pfam module annotation: Pfam domain module=DUF554::Nuc_sug _transp::TPT; Domain location=109-293::86-269::151-293
  Subcellular localization annotation: CTP_CleavageSite=38; ConfidenceScore=5.32e-01
MTAGFQLGVIGSLTLSVASSVAIVICNKALISTLGFPFATTLTSWHLMVTFCTLHVAQRLRFXEPKAIDGQTVVLFGLLNGTSIGLLNLSLGFNSIGFYQMTKLAIIPFTVLLETIFLKKRFSETIKFSLLVLLLGVGIASVTDLKLNFLGSILSGLAIATTCVGQILTNTIQRKLKVSSTQLLYQSAPYQAAILFATGPFVDQLLTDRSVFAHKYTFPVVGFIVLSCLIAVSVNFSTFLVIGTTSPVTYQVLGHLKTCLVLSFGYTLLHDPFTVRNILGILVAIFGMALYSYFSVREGKKKSAGDALPVSQMPDKETEPLLVSAKDGSDAKKANGVAHDC

SEQ ID NO: 83330 - protein, 53 aa, Setaria italica
  misc_feature (11)..(11): Xaa can be any naturally occurring amino acid
  Transcript Sequence Number=SeqID_17356
  Gene Ontology: Mol. function=nutrient reservoir activity; Cellular component=extracellular region
  Homolog annotation: Hit_ID=Q8H021; Match level="QueryCoverage=100%, HitCoverage=23%, E-value=6e-18, Identity=81%"; Hit description =Germin-like protein 3-1
AVVLSGLNSQXPGAQLVPLSAFRTEPRMPEEILEKAFKINGQDVHRIQRNLGG

SEQ ID NO: 83331 - protein, 66 aa, Setaria italica
  Transcript Sequence Number=SeqID_17357
  Homolog annotation: Hit_ID=B6T998; Match level="QueryCoverage=66%, HitCoverage=8%, E-value=1e-17, Identity=90%"; Hit description =Protein phosphatase 2C containing protein
ENKIHIILTVVSKIHTFLSVILQKKLNDALMGILRVRDLSSPPYVYTNPHTLSHKVTDDDLFVILG

SEQ ID NO: 83332 - protein, 518 aa, Setaria italica
  Transcript Sequence Number=SeqID_17358
  Gene Ontology: Mol. function=phosphoprotein phosphatase activity; Cellular component=nucleus; Biological process=multicellular organismal development
  Homolog annotation: Hit_ID=B6T998; Match level="QueryCoverage=100%, HitCoverage=100%, E-value=0.0, Identity=87%"; Hit description =Protein phosphatase 2C containing protein
  Pfam annotation: Domain name=PP2C; Domain location=152-481; Score =72.8; E_value=1.3e-18; Accession=PF00481.13; Description=Protein phosphatase 2C
MVDEELFYRDNSDHSISSEEEDMLVRSCSNLNVSFGYHCDSYPSFPSENDHENGISPKNIFGTNTMMRSRNGSFTCLSGAAISANFTLANTNICKGLIGEEILPELDSPNSFRKIVSSPSMSRLDSFSTSQGSPESSIFEISKNTWRSSAPTAVSSNFLTNTEVKMAGGAAGEDRVQAVCSEKNGWLICGIYDGFNGRDAADFLAVTLYDNIVYYLYLLENRIKQQNGLYNFSESSLSGVKSELTLAMRIAENEDIKFSETFRAGVLNCLSTAVEQAENDFLCMVEQEMDDRPDLVSVGSCVLVVLLHGTDLCILNLGDSRAVLASMPYAEKGILKATQLTETHSLENPLEYQKLIADHPNDSSVVRGNKIKGKLKVTRAFGVGYLKQKKLNDALMGILRVRDLSSPPYVYTNPHTLSHKVTDDDLFVILGSDGLFDFFTNNEVVRLVYQFMHDNPMGDPAKYLIEQLILKAAREAALTAEELMRIPVGSRRKYHDDVTVIVIILGNGQRTMTASTSL

SEQ ID NO: 83333 - protein, 64 aa, Setaria italica
  Transcript Sequence Number=SeqID_17359
AAVAKALDSMKSRWRWSTFWEAGQVIYILTTWGITLAGLYKSRHVLKVAAKGAAASARFVMKAL

SEQ ID NO: 83334 - protein, 130 aa, Setaria italica
  Transcript Sequence Number=SeqID_17360
MLSFLAHLEKLQDESARQHTELSSGNMTGSCSLDIVEIGDIPDKNGVMGKKGSWVLVACDTAGANLEEISGIDDENYVIINEDDIVDGIATFVARCILEDPKSKVLACLKVILRGYQGLMSILFTTAMLF

SEQ ID NO: 83335 - protein, 231 aa, Setaria italica
  Transcript Sequence Number=SeqID_17361
  Gene Ontology: Mol. function=endoribonuclease activity; Cellular component=extracellular region; Biological process=response to stress
  Homolog annotation: Hit_ID=Q6QR26; Match level="QueryCoverage=87%, HitCoverage=88%, E-value=2e-97, Identity=81%"; Hit description=S -like RNase (Fragment)
  Pfam annotation: Domain name=Ribonuclease_T2; Domain location=30-219; Score=332.7; E_value=7.1e-97; Accession=PF00445.10; Description =Ribonuclease T2 family
MASARLSLAAAILLMVLAAVAPGRAAAPDYDFFYLVLQWPGSYCDTRQSCCYPKSGKPAADFGIHGLWPNRDDGSYPQNCNPDSEFDPSKVSDLLSSLRAKWPTLACPTNDGLRFWGHEWEKHGTCASDVFDEHGYFQAALRLRDRLGVLRALAAGGVRPDGGYYTLDQIKGAIRDGTGFEPYVECNRDESGNSQLYQLYFCVNAAGDSLVECPILPRGRPCGSRIEFPAF

SEQ ID NO: 83336 - protein, 94 aa, Setaria italica
  Transcript Sequence Number=SeqID_17362
  Gene Ontology: Mol. function=protein serine/threonine kinase activity; Cellular component=integral to membrane; Biological process=protein amino acid phosphorylation
  Homolog annotation: Hit_ID=B9R9M2; Match level="QueryCoverage=98%, HitCoverage=9%, E-value=1e-11, Identity=43%"; Hit description=Erecta, putative
  Pfam annotation: Domain name=LRR_1; Domain location=16-38; Score=9.3; E_value=5; Accession=PF00560.25; Description=Leucine Rich Repeat
  Pfam annotation: Domain name=LRR_1; Domain location=40-62; Score =11.5; E_value=1.9; Accession=PF00560.25; Description=Leucine Rich Repeat
  Pfam annotation: Domain name=LRR_1; Domain location=64-85; Score=0.8; E_value=2.1e+02; Accession=PF00560.25; Description=Leucine Rich Repeat
  Pfam module annotation: Pfam domain module=LRR_1::LRR_1::LRR_1; Domain location=16-38::40-62::64-85
  Subcellular localization annotation: CTP_CleavageSite=28; ConfidenceScore=5.23e-01
RRLHGGISSSVASLDGLVTLNLSRNSLRGAAPVALGQLARLRVLDLSANGLSGTFPASDGGFPAIEVVNISSNTFDGPHPAFPAAANLTVLDIS

SEQ ID NO: 83337 - protein, 84 aa, Setaria italica
  Transcript Sequence Number=SeqID_17363
  Gene Ontology: Mol. function=identical protein binding; Cellular component=cytoskeleton; Biological process=regulation of actin polymerization or depolymerization
  Homolog annotation: Hit_ID=Q8RW98; Match level="QueryCoverage=100%, HitCoverage=100%, E-value=2e-40, Identity=98%"; Hit description =Protein BRICK1
MGRGGGMGNPVNVGIAVQADWENREFISNISLNVRRLFDFLLRFEATTKSKLASLNEKLDILERKLEVLEVQVSSATTNPSVFN

SEQ ID NO: 83338 - protein, 115 aa, Setaria italica
  Transcript Sequence Number=SeqID_17364
VPKSFHSYFKYLTRNVGSSRKRNVDVSHHYHSLPNRHRRPSVGSKRHKPSKHYVSYLHANAKLRCTSVLQLYKHHMILAVFYMPLLRTYMIHLHATHHCVCVRISFIDAGPSLDF

SEQ ID NO: 83339 - protein, 99 aa, Setaria italica
  Transcript Sequence Number=SeqID_17365
  Gene Ontology: Cellular component=membrane
  Homolog annotation: Hit_ID=B6T6G6; Match level="QueryCoverage=84%, HitCoverage=23%, E-value=2e-29, Identity=75%"; Hit description=Cell division control protein 50
  Pfam annotation: Domain name=CDC50; Domain location=1-99; Score= -81.0; E_value=2.5e-07; Accession=PF03381.7; Description=LEM3 (ligand- effect modulator 3) family  CDC50 family
VLVTYFAFIYKQLEQLSRQEDLIVWMRTAALPTFRKLYGRIEVDLHVDELITVTLQNNYNTYSFGGKKALVLSTAGVLGGKNGFLGRGYVVVGLACLAL

SEQ ID NO: 83340 - protein, 349 aa, Setaria italica
  Transcript Sequence Number=SeqID_17366
  Gene Ontology: Cellular component=membrane
  Homolog annotation: Hit_ID=B6T6G6; Match level="QueryCoverage=88%, HitCoverage=89%, E-value=1e-112, Identity=62%"; Hit description=Cell division control protein 50
  Pfam annotation: Domain name=CDC50; Domain location=68-339; Score =417.3; E_value=2.5e-122; Accession=PF03381.7; Description=LEM3 (ligand-effect modulator 3) family  CDC50 family
  Subcellular localization annotation: CTP_CleavageSite=20; ConfidenceScore=5.17e-01
MVLANSDAAGPSSSQDDSAATMKKRNRPQYHPFTQQQLPACKPILAPKTVIPVLLFVGIIFIPIGLGCIAASNRVVEVVYQYETSCVPGYMLDNKVAYIQNPSIDKTCRRILKVPKDMKQPIYIYYQLDKFYQNHRRYVTSRNDKQLRSPEEVNTTQYCKPEATHHGNPVVPCGLVAWSLFNDTYSFTRGNEVLMVNKRGISWRSERGDIFGKRVFPRNFQNGTLIGGGTLDPRIPLSRQEDLIVWMRTAALPTFRKLYGRIEVDLHVDELITVTLQNNYNTYSFGGKKALVLSTAGVLGGKNGFLGRGYVVVGLACLALAALLTLLCLVFPLREEHLALRYPLTRPAR

SEQ ID NO: 83341 - protein, 92 aa, Setaria italica
  misc_feature (11)..(11): Xaa can be any naturally occurring amino acid
  Transcript Sequence Number=SeqID_17367
EKGAECNRIQXLSCIGSIKRLAFTFNRGVGRRRPEGEGAAVIWGHSRVPTDGARMGAVPSAREGTDAIWRYSHDLNSGLLWRRRRPPVDGNG

SEQ ID NO: 83342 - protein, 164 aa, Setaria italica
  Transcript Sequence Number=SeqID_17368
  Gene Ontology: Mol. function=metal ion binding; Biological process =embryonic development ending in birth or egg hatching
  Homolog annotation: Hit_ID=Q25AI3; Match level="QueryCoverage=99%, HitCoverage=12%, E-value=7e-90, Identity=96%"; Hit description =H0702G05.10 protein
GFFIGDGAGVGKGRTIAGLIWENWQQGRHKAVWVSVGSDLKYDAQRDLDDVGAKCVQVHPLNKLPYSKLDSKAIRIKNGVIFVTYSSLIASSERGRSRLQQLVQWCGHEFDGLLVFDECHKAKNLIPDAGSQPTRTGKAVLEIQEKLPEARVVYCSATGASEPT

SEQ ID NO: 83343 - protein, 286 aa, Setaria italica
  misc_feature (82)..(82): Xaa can be any naturally occurring amino acid
  misc_feature (193)..(193): Xaa can be any naturally occurring amino acid
  Transcript Sequence Number=SeqID_17369
  Gene Ontology: Mol. function=binding; Cellular component=chloroplast; Biological process=multicellular organismal development
  Homolog annotation: Hit_ID=Q69NX2; Match level="QueryCoverage=99%, HitCoverage=17%, E-value=7e-24, Identity=47%"; Hit description =Putative fanconi anemia, complementation group D2
EDAENGCQSKGDLIQKILQIYLRNSDSTSDLLHELSGALSQVPSTKAQGTQDVSNGFPTLCSSTIPSWYRVLHEENTGSLDXKIKQALKTRGLPERGSIDTILEEIQKSVKVFVSLIEKCKTHEKVSMHAMAVKHGGKYIDTFLKAFNFLETQFKEHNAIILQMLKELQKATRIIQTICAEAKGYKRTMITSXKIPPAKRSMERFLFQVKALLHNCSTEKKFWMGNLKHKDLHGHVVSSQVYGSVDEEDEEQMESDSDTPAAENDNTMDEDDAAAEGSNEAPMEEE

SEQ ID NO: 83344 - protein, 161 aa, Setaria italica
  misc_feature (61)..(61): Xaa can be any naturally occurring amino acid
  Transcript Sequence Number=SeqID_17370
  Subcellular localization annotation: CTP_CleavageSite=56; ConfidenceScore=5.36e-01
MGPKILNQPPSVLGSKISAHKVLTGRKAGFISCLSSSKSLCRWRHWRMDPVNMNPAQMAQXAPLPVLLVVLQDVLPGGRRGCCCRGGGSFSFLPEHLLHIVDPHPDDAADHNCGGAQGPDPQDLEARALLAPPGHHWRSGGSLQSGGRVGDFSPGGVRGLS

SEQ ID NO: 83345 - protein, 365 aa, Setaria italica
  misc_feature (257)..(257): Xaa can be any naturally occurring amino acid
  Transcript Sequence Number=SeqID_17371
  Gene Ontology: Mol. function=molecular_function; Cellular component =integral to membrane; Biological process=protein insertion into membrane
  Homolog annotation: Hit_ID=B9GL61; Match level="QueryCoverage=61%, HitCoverage=53%, E-value=4e-75, Identity=56%"; Hit description=Inner membrane protein
  Pfam annotation: Domain name=60KD_IMP; Domain location=85-281; Score =61.5; E_value=2.3e-15; Accession=PF02096.12; Description=60Kd inner membrane protein
HRNFSTTSSSSTPDIDVAADVLSDAASSVPVSELLSDEVASAAASIPVPPAPYAGEVAAAAAESFPPVAALQHLLDAVQSFTGLNWWVTIALTTVLIRSLTVPLLINQMKSTIKLNEMRPEIEAINEEMRNSTDPRSMEVGKQKLGELFLKHDVTPLTPLKGLFIQGPIFMSFFFAISNMVEKVPSLKGGGAYWFTDLTTPDEFIILPVLTSLTFLATVELNMQDGMEGNPMAETMKKVSRFFGVMFVPLTLGFPKXIFFYWVTSNMFSLVYGVVIRNPAVRMCLDLPPLESQPAPARMQALNLVDGPKPSPRVDSPIADKECDQSSSELSEQSSSELSEQSSSELSDRIRDLENRAKSRGESQE

SEQ ID NO: 83346 - protein, 93 aa, Setaria italica
  Transcript Sequence Number=SeqID_17372
  Gene Ontology: Mol. function=nucleotide binding; Biological process =defense response
  Homolog annotation: Hit_ID=Q01JX6; Match level="QueryCoverage=97%, HitCoverage=22%, E-value=6e-11, Identity=51%"; Hit description =B0809H07.4 protein
YQRNGRWLLPYSLGELEIDGSPETLQPCFLEDHNCLKKLQIRDSPSLRLLQLRSCTALEELMVYDCASLESLQLCTCTALEKLTIYKCASLTA

SEQ ID NO: 83347 - protein, 256 aa, Setaria italica
  Transcript Sequence Number=SeqID_17373
  Gene Ontology: Mol. function=nucleotide binding; Biological process =defense response
  Homolog annotation: Hit_ID=Q7XTQ9; Match level="QueryCoverage=84%, HitCoverage=11%, E-value=8e-50, Identity=52%"; Hit description =OSJNBa0053K19.1 protein
MKTTTSETEDGFSRIHLANLRLTVPLKRCNPASISLEGFRQLISLKTMDISYCINLFSSDVPPPPEHTHEDMTDINFNALPSLKHLRIQFCGITGMWLSVMLRHAPALEELCLYHCDQISGLLIEVGDSSSSNHTSAPRAPSAGNPDDALTSSTPDGLLRIPSNSVSSLKKMSIEYCEELTFQGNKDGFSVFTSLEELTIRGCPKLIPSLVQTYENNDQRNGRWLLPYSLGELEIDGSPETLQPCFYFTRRFQATH

SEQ ID NO: 83348 - protein, 155 aa, Setaria italica
  Transcript Sequence Number=SeqID_17374
  Homolog annotation: Hit_ID=Q9ZWI5; Match level="QueryCoverage=100%, HitCoverage=90%, E-value=2e-25, Identity=46%"; Hit description =ZmGR2a protein
MDALSAVMDKVKSHPEVVEKVKDEVKSLAHALHLRRHGSKDKEPEAEEKAEEGEAAQNADVAASADKTEESNVEQAVEEIQAVVAAVQQEQTAPTTETETPTKTDATAETSAEGEKPEETNREVEKDDPKKRLDFLGFFAMLFERFCSPANKKKD

SEQ ID NO: 83349 - protein, 231 aa, Setaria italica
  Transcript Sequence Number=SeqID_17375
  Gene Ontology: Mol. function=transferase activity, transferring glycosyl groups; Cellular component=chloroplast; Biological process =purine base biosynthetic process
  Homolog annotation: Hit_ID=B6SRU6; Match level="QueryCoverage=98%, HitCoverage=41%, E-value=1e-107, Identity=89%"; Hit description =Amidophosphoribosyltransferase
  Pfam annotation: Domain name=Pribosyltran; Domain location=18-146; Score=62.3; E_value=1.8e-15; Accession=PF00156.19; Description =Phosphoribosyl transferase domain
VRCRSFVVYYSYFALPNSVVFGHAVHERRSAYGRALAEESPAPTADVVIPVPDSGFYAALGFAQASGLEFQQGLIRWHYSGRSFIQPSQAIRDLAVKLKLAPVRGVITGKSVVVVDDSLVRGTTSSKIVRLLRDAGAREVHMRIASPPVIGSCLYGIDTPSEGELISNRMDLEGVRRTIGCDSLAFLSLDKLHSIYGDEAHELCDACFSRNYPVLPTVPEPVPELVSAFED

SEQ ID NO: 83350 - protein, 270 aa, Setaria italica
  misc_feature (262)..(262): Xaa can be any naturally occurring amino acid
  Transcript Sequence Number=SeqID_17376
  Gene Ontology: Mol. function=4 iron, 4 sulfur cluster binding; Cellular component=chloroplast; Biological process=protein folding
  Homolog annotation: Hit_ID=B6SQG7; Match level="QueryCoverage=92%, HitCoverage=72%, E-value=1e-121, Identity=88%"; Hit description =Electron transporter/ heat shock protein binding protein
  Pfam annotation: Domain name=DnaJ; Domain location=77-139; Score =95.0; E_value=2.5e-25; Accession=PF00226.23; Description=DnaJ domain
  Pfam annotation: Domain name=Fer4; Domain location=162-185; Score =20.4; E_value=0.00026; Accession=PF00037.19; Description=4Fe-4S binding domain
  Pfam module annotation: Pfam domain module=DnaJ::Fer4; Domain location=77-139::162-185
  Subcellular localization annotation: CTP_CleavageSite=41; ConfidenceScore=5.49e-01
MAPPLLSPPLLAEPLVALPRSFPCSRPTPQLATVGFAGAVRSDRQGSWSARRRRDLRIRATATEADYERPEEDVADDYYSVLGVMPDATPEEIKKAYYSCMKACHPDLSGDDPDVTNFCMFINEVYSVLSDPAQRAVYDEIHGYTATAINPFFDDSAPKDHVFVDEFTCIGCKNCANICPNVFQIEEDFGRSRVYSQSGSTELIQDAIDSCPVDCIHWTSAAQLSLLENEMRRVERVNVGLMLSGMGASVDVFRMASVRWEXRQAKILEK

SEQ ID NO: 83351 - protein, 108 aa, Setaria italica
  Transcript Sequence Number=SeqID_17377
  Homolog annotation: Hit_ID=B6TVP3; Match level="QueryCoverage=79%, HitCoverage=28%, E-value=2e-13, Identity=54%"; Hit description =Phloem-specific lectin
  Pfam annotation: Domain name=F-box; Domain location=15-62; Score =20.4; E_value=0.0074; Accession=PF00646.25; Description=F-box domain
MAASTAAAAAPPSSCEIARIPEDLLAASIARTTPRNACRAAAVSPAFRAAADSDAVWACFLPGDLPPLADGELSPAPPSKKELFMRLSNSDSPVLLADRLMVRESAYD

SEQ ID NO: 83352 - protein, 51 aa, Setaria italica
  Transcript Sequence Number=SeqID_17378
QQPGRGRRHLCFRSPYPQLCLPSQSVICPVAYGQLVPPALASADDECPFTS

SEQ ID NO: 83353 - protein, 118 aa, Setaria italica
  Transcript Sequence Number=SeqID_17379
SFWPFLFLGGGEESGGKEAVEFLHRRLLALLGVSSTCTPFNSVSLVASASQVHLVKATKTPFSPSLSLSPAIIVKQAPIFHSLHSIGFPCSSRRPPSAMSGTATTAATQREPNHLPKA

SEQ ID NO: 83354 - protein, 766 aa, Setaria italica
  Transcript Sequence Number=SeqID_17380
  Gene Ontology: Mol. function=sequence-specific DNA binding; Cellular component=nucleus
  Homolog annotation: Hit_ID=B5BRE2; Match level="QueryCoverage=99%, HitCoverage=39%, E-value=2e-82, Identity=31%"; Hit description =Transcription factor
APPNTCRRRMAILLKGNENIRGAVMCICNLLGKRYARYLEKERRSKKRRLLPQISKSSNETNLDSDSEKFNWDDFEVPEIKSALSEVLELIRTEKVDQTKRVGAKNEKNNNNDSDVTKDTRSSQELLNNQATRGKTKTPVPESGFCDQEKMCRHSNEVQPSESMDIHCKPQEKIIKDHRNKIIERGLRESLPVANALELLKLVFLSRSSGSDVQASLAATLQLYSESEIFTAVSLLKEKNFLVTGSGGKPYTLSSKFLTNACISPFPFGSGKKASEFSNWLIAQQKNATDNGVYLYPDIQCGEIVHLFSLVLSGKLFVSPFLPSEGVGEAEEPNSSSPLVVDTSGLVDSTQKRKADTMKQKSGKAKKHKPLPKIESDFCYRREKGFPAIQVGLDLERIQTSNNMQELHDKECLVFTSSRAMSNKDGDLHAERCIMPSFSNHSSTYRHLLSESQLEDSYCGWPWDAMKNYVEELPSVSDHQKESFTWSSDLFRNAFCVIHKAGEQGVTWKELSQALHPLAMQFVYRIVDTLKRFQLAIKVNAYDGVQIVDSLHLSKYHITTLAECNPCSCSGPPTSQVVDNGDPKNLLKEKHTIPINFHGPIKMLGDGHTVTVINVQSKLSSPHIYSKNPGDDERLSTSREDNKESSCYHDCEGHIYQPILPWINGDGSTNSTVYEGLSRRVIGYVMHYPGVMEEDIIHRMDVLNPQTCRTLLEKLILDGHLNVRVFEEPVPTAPTMLQGLFKQDPSKEASKCRKRFFANPMSTSLL

SEQ ID NO: 83355 - protein, 77 aa, Setaria italica
  Transcript Sequence Number=SeqID_17381
SLKPENTSIMLRYRDDTPTVHVMDLPTQLLINLLCEDRIAGSESSIYQVQLTLHEVGLPSPLPANLVAYTLGATPTL

SEQ ID NO: 83356 - protein, 79 aa, Setaria italica
  Transcript Sequence Number=SeqID_17382
  Gene Ontology: Mol. function=transporter activity; Cellular component= intracellular; Biological process=transport
  Homolog annotation: Hit_ID=B6TF16; Match level="QueryCoverage=100%, HitCoverage=26%, E-value=1e-21, Identity=56%"; Hit description =Transporter-like protein
EDLAGTENEVRRAYIPDYLDKNGRTVFVVMTSIKSLTSTKEHIKQLVYNLENMAMNSESAQEENVIWMCNFRDWTLSST

SEQ ID NO: 83357 - protein, 79 aa, Setaria italica
  misc_feature (44)..(44): Xaa can be any naturally occurring amino acid
  Transcript Sequence Number=SeqID_17383
  Gene Ontology: Mol. function=transporter activity; Cellular component= intracellular; Biological process=transport
  Homolog annotation: Hit_ID=B6TF16; Match level="QueryCoverage=100%, HitCoverage=26%, E-value=2e-22, Identity=60%"; Hit description =Transporter-like protein
IVKHFIEPTLQERVKFIYSNNSESQRIMADMFDMDKLESAFGGXRNTARLDINQYAERMRRRDQLRGTNKHANGNISSS

SEQ ID NO: 83358 - protein, 129 aa, Setaria italica
  misc_feature (110)..(110): Xaa can be any naturally occurring amino acid
  Transcript Sequence Number=SeqID_17384
  Gene Ontology: Mol. function=transporter activity; Cellular component= intracellular; Biological process=transport
  Homolog annotation: Hit_ID=B6TF16; Match level="QueryCoverage=96%, HitCoverage=43%, E-value=7e-40, Identity=58%"; Hit description =Transporter-like protein
HVQQSLTSTKEHIKQLVYNLENMAMNSESAQEENVIWMCNFRDWTLSSTPLWESRESLHIIQNYYPGLIRTAILSNPPKIFESFWKIVKHFIEPTLQERVKFNSNNSESXEIMADMFDMDKLESAFGGS

SEQ ID NO: 83359 - protein, 287 aa, Setaria italica
  Transcript Sequence Number=SeqID_17385
  Gene Ontology: Mol. function=transporter activity; Cellular component= intracellular; Biological process=transport
  Homolog annotation: Hit_ID=B6TF16; Match level="QueryCoverage=97%, HitCoverage=95%, E-value=1e-105, Identity=62%"; Hit description =Transporter-like protein
  Pfam annotation: Domain name=CRAL_TRIO; Domain location=109-278; Score=11.7; E_value=3.4e-05; Accession=PF00650.12; Description =CRALTRIO domain
  Pfam annotation: Domain name=CRAL_TRIO_N; Domain location=22-91; Score=39.2; E_value=1.6e-08; Accession=PF03765.7; Description =CRALTRIO, N-terminus
  Pfam module annotation: Pfam domain module=CRAL_TRIO::CRAL_TRIO_N; Domain location=109-278::22-91
MYSSSRKAMSYLFQTRRSDATQKKPASSEEQQQKIDDVRELLGDLRTEMPSFLSDGTIRRFLRARNWSTEQAAKALKEAVKWRRQFKPETICWEDLAGTENEVRRAYIPDYLDKNGRTVFVVMTSIKSLTSTKEHIKQLVYNLENMAMNSESAQEENVIWMCNFRDWTLSSTPLWESRESLHIIQNYYPGLIRTAILSNPPKIFESFWKIVKHFIEPTLQERVKFIYSNNSESQRIMADMFDMDKLESAFGGRNTARLDINQYAERMRRRDQLRGTNKHANGNISSS

SEQ ID NO: 83360 - protein, 101 aa, Setaria italica
  misc_feature (38)..(38): Xaa can be any naturally occurring amino acid
  misc_feature (88)..(88): Xaa can be any naturally occurring amino acid
  Transcript Sequence Number=SeqID_17386
  Homolog annotation: Hit_ID=Q019V7; Match level="QueryCoverage=99%, HitCoverage=7%, E-value=2e-14, Identity=41%"; Hit description =Putative aquarius (ISS)
AHYSRFQAFQLLAFKQVAKLRDFSLSSIGSLHKRADLXKRLLVLSDVELQDLVCNKLKLISEKDPCSGRRDFLIEVLVAFFEKRQSQXDAVNALPLYPNEQ

SEQ ID NO: 83361 - protein, 267 aa, Setaria italica
  Transcript Sequence Number=SeqID_17387
  Gene Ontology: Mol. function=endopeptidase activity; Cellular component=proteasome regulatory particle; Biological process =proteolysis
  Homolog annotation: Hit_ID=B4FCY9; Match level="QueryCoverage=100%, HitCoverage=100%, E-value=1e-141, Identity=90%"; Hit description=26S proteasome non-ATPase regulatory subunit 8
  Pfam annotation: Domain name=SAC3_GANP; Domain location=24-209; Score= 106.6; E_value=8.6e-29; Accession=PF03399.8; Description=SAC3GANP family
MDPKLTEVAQMFARFKAAYARNDLDACVTLLSQLKVQLTKFPSLPPLFQQAPNSVEELKLARDIYEHAVVLSVKLEDQDAFERDFCQLKPYYMDTCGIIPPSPEEYPILGLNLLRLLVQNRIAEFHTELELLPVKALEHPCIKHAVELEQSFMEGAYNRVLSARQAVPHETYVYFMDLLAKTVRDEIAGCSEKGYDSLSISDAKQMLMFSSDQELNQYITEEHPEWEIKNGSVFFQKAKESQPCKEIPSLQLINQTLSYARELERIV

SEQ ID NO: 83362 - protein, 315 aa, Setaria italica
  Transcript Sequence Number=SeqID_17388
  Gene Ontology: Mol. function=protein binding; Cellular component =integral to membrane; Biological process=iron-sulfur cluster assembly
  Homolog annotation: Hit_ID=B6TIG9; Match level="QueryCoverage=94%, HitCoverage=94%, E-value=1e-124, Identity=77%"; Hit description =Transmembrane protein 115
  Pfam annotation: Domain name=DUF1751; Domain location=55-153; Score =168.2; E_value=2.5e-47; Accession=PF08551.2; Description=Eukaryotic integral membrane protein (
  Subcellular localization annotation: CTP_CleavageSite=46; ConfidenceScore=5.14e-01
MMSGSAPPPPSLPAGSGSFFRGYTKLCKGLAVILLLVHLVVQLFPSAVAYLALIPARTIPFAWNLITAGYVEQTIPGVIVSIIGLLLFGKLLEPLWGSKELSKFIFIVNFSTSACVFITAIVLYYITQQEIYLYTPLSGFYGVLSGLLVGIKQLLPDQELNLFVLKIKAKWIPSLVALISIAVSFFVKDLMSYLPVLLFGIYMSWIYLRYFQKRLETGMKGDPSEEFSFSSFFPEFLRPILDPIASIFHRLLCGRSERSDARGQTLDTSPLPGSDSIEANRRRERGQRALEQRLAEKLAAVRSSEGTSLDAADKV

SEQ ID NO: 83363 - protein, 153 aa, Setaria italica
  Transcript Sequence Number=SeqID_17389
  Gene Ontology: Mol. function=zinc ion binding; Cellular component =intracellular
  Homolog annotation: Hit_ID=Q8LGM1; Match level="QueryCoverage=86%, HitCoverage=51%, E-value=2e-35, Identity=68%"; Hit description =CONSTANS-like protein CO7 (Fragment)
KDDDAAAAGMLGGAAKVDAKQLEFLFAEVMDPFLGQEEFARFPHADSVVPNNGSSGGALDLDFGGGVAAGAAKPSYSSYTAASVAHSGSSSEVGLVPDAICGRGGSVTGGVIELDFAQSKAAYLPYAATPTHSVSSLNVGAVPERGDGGVMAG

SEQ ID NO: 83364 - protein, 162 aa, Setaria italica
  Transcript Sequence Number=SeqID_17390
  Homolog annotation: Hit_ID=B6TND2; Match level="QueryCoverage=71%, HitCoverage=31%, E-value=2e-13, Identity=47%"; Hit description=DNA binding protein
MLSAQTAASSSSSGGVEQERSVVVEERRRTEPVGEEDEEEEEEEPEFRDIHALSPPPSQPSSYRRGRGESWGSAAGGSRHTSIRSVGSETAPSEPFPTMSREFSAMVAAAATANAANSAAANGAGSDTERDVDVMGRIGEGDELEETNPLAIVPDSNPIPSP

SEQ ID NO: 83365 - protein, 53 aa, Setaria italica
  Transcript Sequence Number=SeqID_17391
GLKKLTLIFVPSIVLASKFSRNWDDDSCSENHKKFLNQRPLHICDSEKNVLVN

SEQ ID NO: 83366 - protein, 113 aa, Setaria italica
  Transcript Sequence Number=SeqID_17392
  Subcellular localization annotation: CTP_CleavageSite=25; ConfidenceScore=5.03e-01
MAPAKFATILFVAAVACAFAITSTSAATVTAQSCAEQIKYFTNCLARDEIRQQCCIVVENASCLCQLKQAVAVPCIPHRRHGHRCPRNVVPPAVQMAELQRLPCFKGLKCLRA

SEQ ID NO: 83367 - protein, 150 aa, Setaria italica
  misc_feature (60)..(60): Xaa can be any naturally occurring amino acid
  Transcript Sequence Number=SeqID_17393
  Gene Ontology: Mol. function=receptor activity; Cellular component =integral to membrane
  Homolog annotation: Hit_ID=B9SG95; Match level="QueryCoverage=100%, HitCoverage=41%, E-value=2e-52, Identity=55%"; Hit description=Lung seven transmembrane receptor, putative
  Pfam annotation: Domain name=Lung_7-TM_R; Domain location=1-150; Score=-147.2; E_value=0.077; Accession=PF06814.5; Description=Lung seven transmembrane receptor
FAACYVAFLAGWLYITLYRNRLSAHRIHHLMSGLLVARMLYCISAAEDQHYIRTAGTPHXPFLQDKEKKVLMAVIPLQVATNIAAAVVGETGPFLQGWVTWNQIFLFVDVACCCAVLFPVVWSMRSLRESSKTDGKAARTLAKLTLFRQF

SEQ ID NO: 83368 - protein, 54 aa, Setaria italica
  Transcript Sequence Number=SeqID_17394
  Gene Ontology: Mol. function=aminopeptidase activity; Biological process=cellular process
  Homolog annotation: Hit_ID=B6TL64; Match level="QueryCoverage=88%, HitCoverage=9%, E-value=1e-18, Identity=89%"; Hit description=Xaa -Pro dipeptidase
GHAAAPNDRTLNDGDMALMDMGGEYHFYGSDITCSYPINGKFNSSHIINSRPHV

SEQ ID NO: 83369 - protein, 48 aa, Setaria italica
  Transcript Sequence Number=SeqID_17395
  Gene Ontology: Mol. function=aminopeptidase activity; Biological process=cellular process
  Homolog annotation: Hit_ID=B6TL64; Match level="QueryCoverage=100%, HitCoverage=10%, E-value=7e-13, Identity=70%"; Hit description=Xaa -Pro dipeptidase
FHLIGLHVFQINGKFNSSQIIIYNAVLKAHNAVISYMRPGVNYMDMHK

SEQ ID NO: 83370 - protein, 57 aa, Setaria italica
  Transcript Sequence Number=SeqID_17396
  Subcellular localization annotation: CTP_CleavageSite=19; ConfidenceScore=5.14e-01
LLLISFLQWVLSILFWRNRSSTAKYTFGLSTTFLGLLLLLDRSTMLSPWRRLPRPQG

SEQ ID NO: 83371 - protein, 122 aa, Setaria italica
  Transcript Sequence Number=SeqID_17397
  Homolog annotation: Hit_ID=B6TX39; Match level="QueryCoverage=99%, HitCoverage=60%, E-value=4e-37, Identity=69%"; Hit description=YLS9
  Pfam annotation: Domain name=Hin1; Domain location=31-122; Score=5.8; E_value=0.00057; Accession=PF07320.5; Description=Harpin-induced protein 1 (Hin1)
MSGSGRSREKTCCGSCCTLLISLGFVVLIYWAIFQPHQIRATVESAELSNLAVSNASSPVAVTYHVAVNLSLYNPSKRVNIYYDTIDAELRFRGAVLSPAAAAASPSEFYQRRKTAQAVRLE

SEQ ID NO: 83372 - protein, 309 aa, Setaria italica
  misc_feature (8)..(8): Xaa can be any naturally occurring amino acid
  Transcript Sequence Number=SeqID_17398
  Pfam annotation: Domain name=DUF593; Domain location=5-94; Score =105.4; E_value=1.9e-28; Accession=PF04576.7; Description=Protein of unknown function, DUF593
LEAAAVRXRGEKEAAEEAARGLQQELDAERASAETATSEAMLMIERLQREKAAAQMEARQFKRYAEGREDREREVQEELASLSDLAASYHSRLQSHGIDPDSFTDEDEEEMYEEGEEVEQIDMDAVLVERSGGDLSTGMELKAMVVDGGGEEEEEPSSPVEKEVEYTVDVSCASTTKAAGPVVVAQYVGDGNLYARVEALEADRVALRREIAALRAERAQVVMAREMARRLCWEMVAEQRAIVKKPAVPASSFSVIRVCKWVLSILFWRNRSSTAKYTFGLSTTFLGLLLLLDRSTMLSPWRRLPRPQG

SEQ ID NO: 83373 - protein, 508 aa, Setaria italica
  Transcript Sequence Number=SeqID_17399
  Gene Ontology: Mol. function=aminopeptidase activity; Biological process=cellular process
  Homolog annotation: Hit_ID=B6TL64; Match level="QueryCoverage=96%, HitCoverage=97%, E-value=0.0, Identity=89%"; Hit description=Xaa-Pro dipeptidase
  Pfam annotation: Domain name=AMP_N; Domain location=14-158; Score =148.7; E_value=1.8e-41; Accession=PF05195.8; Description =Aminopeptidase P, N-terminal domain
  Pfam annotation: Domain name=Peptidase_M24; Domain location=196-470; Score=296.1; E_value=7.7e-86; Accession=PF00557.16; Description =metallopeptidase family M24
  Pfam module annotation: Pfam domain module=AMP_N::Peptidase_M24; Domain location=14-158::196-470
MAASSPSSLTPPAVPMELHAGNRDRLVAALRGHLSASGRPPRGLVLLQGGEEQTRYCTDHLELFRQESYFAYLFGVQEPGFYGAIDIASGQSILFAPRLPADYAVWMGEIKPLSYFRDTYKVDMAFYVDEITQVVQDRFGDHGKPLLFLLYGKNTDSGNFSKPASFEGMEKFDTDLSILHPVLTECRVIKSDLELAVIQYANDISSEAHIEVMRRARPGMKEYQLESIFLHHVYMYGGCRHCSYTCICATGDNSAVLHYGHAAAPNDRTLNDGDMALMDMGGEYHFYGSDITCSYPINGKFNSSQIIIYNAVLKAHNAVISYMRPGVNYMDMHKLAERAILESLKKEQILQGDVDDMMAQRLGAVFMPHGLGHLLGIDTHDPGGYPEGLERPKEPGLSSLRTTRELKEGMVITVEPGCYFIDTLLTKARNDPISSKFFNWQEVEKYKSFGGVRIESDVYVTAQGCQNLTNCPRETWEIEAVMAGAPWPLPASSSTAAAAENGVSKASS

SEQ ID NO: 83374 - protein, 448 aa, Setaria italica
  Transcript Sequence Number=SeqID_17400
  Gene Ontology: Mol. function=receptor activity; Cellular component =integral to membrane
  Homolog annotation: Hit_ID=B9SG95; Match level="QueryCoverage=89%, HitCoverage=90%, E-value=1e-135, Identity=57%"; Hit description=Lung seven transmembrane receptor, putative
  Pfam annotation: Domain name=Lung_7-TM_R; Domain location=142-425; Score=130.1; E_value=7.1e-36; Accession=PF06814.5; Description=Lung seven transmembrane receptor
MARAAAARAALLLLAVAGVLIRPAAAEIKQESFKDDPRGSILFEKFGFGPHGMVSVSVDGAMASSTLAKPDPSQLGFFLLSDEALFEAIYEQPPPTDLNPNPESSPNCVLSSPYVIPLFTFADLDANGHYTKTFPITHPDEYSLFFASCAPETKVTMKVRTDMYNTNLDGSKDYLSVGMASVPAIYAFFAACYVAFLAGWLYITLYRNRLSAHRIHHLMSGLLVARMLYCISAAEDQHYIRTAGTPHGWDVMFYLFQLVKGVILFAVIALIGTGWSFLKPFLQDKEKKVLMAVIPLQVAANIAAAVVGETGPFLQGWVTWNQIFLFVDVACCCAVLFPVVWSMRSLRESSKTDGKAARTLAKLTLFRQFYVVVIGYLYFTRIIVYALKTITNYKYRWVSVAAEEVATVAFYMFMFYMFRPAERNQYFALDDDEEEAAEMALREEEFEL

SEQ ID NO: 83375 - protein, 153 aa, Setaria italica
  Transcript Sequence Number=SeqID_17401
  Gene Ontology: Mol. function=adenosylhomocysteinase activity; Cellular component=cytoplasm; Biological process=one-carbon compound metabolic process
  Homolog annotation: Hit_ID=A9PIA2; Match level="QueryCoverage=100%, HitCoverage=31%, E-value=1e-83, Identity=92%"; Hit description =Adenosylhomocysteinase
  Pfam annotation: Domain name=AdoHcyase; Domain location=9-152; Score =3.2; E_value=6.7e-19; Accession=PF05221.9; Description=S-adenosyl-L -homocysteine hydrolase
  Pfam annotation: Domain name=AdoHcyase_NAD; Domain location=1-71; Score=18.2; E_value=2.8e-06; Accession=PF00670.13; Description=S -adenosyl-L-homocysteine hydrolase, NAD binding domain
  Pfam module annotation: Pfam domain module=AdoHcyase::AdoHcyase_NAD; Domain location=9-152::1-71
VDHMRKMKNNAIVCNIGHFDNEIDMHGLETYPGVKRITIKPQTDRWVFPETKTGIIVLAEGRLMNLGCATGHPSFVMSCSFTNQVIAQLELWKEKSSGKYEKKVYVLPKHLDEKVAALHLGKLGARLTKLSKSQADYISVPIEGPYKPAHYRY

SEQ ID NO: 83376 - protein, 485 aa, Setaria italica
  misc_feature (162)..(162): Xaa can be any naturally occurring amino acid
  Transcript Sequence Number=SeqID_17402
  Gene Ontology: Mol. function=adenosylhomocysteinase activity; Cellular component=cytoplasm; Biological process=one-carbon compound metabolic process
  Homolog annotation: Hit_ID=A9PIA2; Match level="QueryCoverage=100%, HitCoverage=100%, E-value=0.0, Identity=85%"; Hit description =Adenosylhomocysteinase
  Pfam annotation: Domain name=2-Hacid_dh_C; Domain location=219-399; Score=-82.1; E_value=0.0018; Accession=PF02826.11; Description=D -isomer specific 2-hydroxyacid dehydr
  Pfam annotation: Domain name=ADH_zinc_N; Domain location=261-389; Score=-25.2; E_value=0.096; Accession=PF00107.18; Description=Zinc -binding dehydrogenase
  Pfam annotation: Domain name=AdoHcyase; Domain location=12-484; Score= 828.9; E_value=3.1e-246; Accession=PF05221.9; Description=S-adenosyl -L-homocysteine hydrolase
  Pfam annotation: Domain name=AdoHcyase_NAD; Domain location=240-403; Score=397.0; E_value=3.3e-116; Accession=PF00670.13; Description=S -adenosyl-L-homocysteine hydrolase, NAD binding domain
  Pfam annotation: Domain name=IlvN; Domain location=259-403; Score= -87.5; E_value=0.048; Accession=PF07991.4; Description=Acetohydroxy acid isomeroreductase, cata
  Pfam annotation: Domain name=Shikimate_DH; Domain location=248-360; Score=-21.8; E_value=0.019; Accession=PF01488.12; Description =Shikimate  quinate 5-dehydrogenase
  Pfam annotation: Domain name=THF_DHG_CYH_C; Domain location=206-370; Score=-120.6; E_value=0.061; Accession=PF02882.11; Description =Tetrahydrofolate dehydrogenasecyclohydrolase, NAD(P)-binding domain
  Pfam annotation: Domain name=TrkA_N; Domain location=265-364; Score =1.0; E_value=0.017; Accession=PF02254.10; Description=TrkA-N domain
  Pfam module annotation: Pfam domain module=2-Hacid_dh_C::ADH_zinc _N::AdoHcyase::AdoHcyase_NAD::IlvN::Shikimate_DH::THF_DHG_CYH_C::TrkA_ N; Domain location=219-399::261-389::12-484::240-403::259-403::248 -360::206-370::265-364
MALSVEKTSSGREYKVKDLSQADFGRLEIELAEVEMPGLMACRAEFGPSKPFAGARISGSLHMTIQTAVLIETLTALGAEVRWCSCNIFSTQDHAAAAIARDSAAVFAWKGETLEEYWWCTERCLDWGEGGGPDLIVDDGGDATLLIHEGVKAEEEYEKTGXSPTPESTDNAEFKIVLTIIRDGLKSDPKRYRKMKERLVGVSEETTTGVKRLYQMQETGTLLFPAINVNDSVTKSKFDNLYGCRHSLPDGLMRATDVMIAGKVAVVCGYGDVGKGCAAALKQAGARVIVTEIDPICALQALMEGLQVLTLEDVVSEADIFVTTTGNKDIIMVDHMRKMKNNAIVCNIGHFDNEIDMHGLETYPGVKRITIKPQTDRWVFPETNTGIIVLAEGRLMNLGCATGHPSFVMSCSFTNQVIAQLELWKEKSSGKYEKKVYVLPKHLDEKVAALHLGKLGAKLTKLSKSQSDYISVPIEGPYKPAHYRY

SEQ ID NO: 83377 - protein, 488 aa, Setaria italica
  misc_feature (37)..(37): Xaa can be any naturally occurring amino acid
  misc_feature (93)..(93): Xaa can be any naturally occurring amino acid
  misc_feature (164)..(164): Xaa can be any naturally occurring amino acid
  Transcript Sequence Number=SeqID_17403
  Gene Ontology: Mol. function=adenosylhomocysteinase activity; Cellular component=cytoplasm; Biological process=one-carbon compound metabolic process
  Homolog annotation: Hit_ID=A9PIA2; Match level="QueryCoverage=100%, HitCoverage=100%, E-value=0.0, Identity=89%"; Hit description =Adenosylhomocysteinase
  Pfam annotation: Domain name=2-Hacid_dh_C; Domain location=221-389; Score=-99.6; E_value=0.042; Accession=PF02826.11; Description=D -isomer specific 2-hydroxyacid dehydr
  Pfam annotation: Domain name=AdoHcyase; Domain location=12-487; Score= 815.1; E_value=4.5e-242; Accession=PF05221.9; Description=S-adenosyl -L-homocysteine hydrolase
  Pfam annotation: Domain name=AdoHcyase_NAD; Domain location=242-406; Score=387.9; E_value=1.7e-113; Accession=PF00670.13; Description=S -adenosyl-L-homocysteine hydrolase, NAD binding domain
  Pfam annotation: Domain name=TrkA_N; Domain location=268-367; Score= -4.5; E_value=0.044; Accession=PF02254.10; Description=TrkA-N domain
  Pfam module annotation: Pfam domain module=2-Hacid_dh_C::AdoHcyase::Ad oHcyase_NAD::TrkA_N; Domain location=221-389::12-487::242-406::268-367
MALSVEKTSSGREYKVKDLSQADFGRLEIELAEVEMXPGLMACRTEFGPSQPFAGARISGSLHMTIQTAVLIETLTALGAEVRWCSCNIFSTXQDHAAAAIARDSAAVFAWKGETLEEYWWCTERCLDWGEGGGPDLIVDDGGDATLLIHEGVKAEEEYEKSGXSPDPESTDNAEFKIVLTIIRDGLKSDPKKYRKMKERLVGVSEETTTGVKRLYQMQETGTLLFPAINVNDSVTKSKFDNLYGCRHSLPDGLMRATDVMIAGKVRQVVCGYGDVGKGCAAALKQAGARVIVTEIDPICALQALMEGLQVLTLEDVVSEADIFVTTTGNKDIIMVDHMRKMKNNAIVCNIGHFDNEIDMHGLETYPGVKRITIKPQTDRWVFPETKTGIIVLAEGRLMNLGCATGHPSFVMSCSFTNQVIAQLELWKEKSSGKYEKKVYVLPKHLDEKVAALHLGKLGARLTKLSKSQADYISVPIEGPYKPAHYRY

SEQ ID NO: 83378 - protein, 87 aa, Setaria italica
  Transcript Sequence Number=SeqID_17404
ESNHTVRDYPRRSLIRQPTKRAQRNGRRGQRAAAYLVVLLLVDLGRLQRLGLPSLFRHGGRGGSASGARNPSWRVPRRRGRWGKASE

SEQ ID NO: 83379 - protein, 111 aa, Setaria italica
  Transcript Sequence Number=SeqID_17405
LHVSELVHLPFDCLGYLLLFGAVSFGLSYYPVINLEAGWDRVFQDGNFFNGKNSTSCLKSKRECNYIIGRKLFMLLVLLLEHMAVKSHDKQAKLNPISTSKVYYEKDRVAI

SEQ ID NO: 83380 - protein, 147 aa, Setaria italica
  Transcript Sequence Number=SeqID_17406
NHLHHSQHHLRIKQLTATLLTQNPLKIVLLQSHLVNHSTYRQKIYHFPSNRLISSHFSSGQSRQSHPSVPWPSVLSAPFPHLSSSADTQDQTRRTPSCRPWAPSTAWPSLLVSTWRTGRIGEAGHETLAGGCRGGRGRWGKASETAA

SEQ ID NO: 83381 - protein, 328 aa, Setaria italica
  Transcript Sequence Number=SeqID_17407
MEKGAGTRRRRLVERGSDRLAFITGQTRSLSCDPIPGSPSSYDSASPLQSEQQQNEGAFGGEKFSDRTQLQKSVPRASIHQEPRARTLSYDDLVPEFKRADTPQEIKAKPLSYEDELFLEFKTGSASAVPEIQPVNETPSVRGKNETPSHRPDQETLSKKTSHEEAPSVQPIREVEIRPRSAPPSQPNQAHDAGWSVETLKELMNFTPQEITKAISATESNRLLASIAIAFLVVLSNWGLDIGGAITRVLVGTRPLLFLIITNITIVLTLLMENKDPNARGRPVGPNLGSADSLGQMLEIGLLLQKALGALLIDCSVCAVIMICFLGF

SEQ ID NO: 83382 - protein, 72 aa, Setaria italica
  Transcript Sequence Number=SeqID_17408
RCDRLQCRLPGFAVLEHPPGLLQVSTKGFACCSAVTEREPHFSVQLVCLIRLFVRTPACTWTGSGPCYEVAM

SEQ ID NO: 83383 - protein, 284 aa, Setaria italica
  misc_feature (54)..(54): Xaa can be any naturally occurring amino acid
  Transcript Sequence Number=SeqID_17409
  Gene Ontology: Mol. function=hydrolase activity, acting on glycosyl bonds; Cellular component=vacuole; Biological process=cell wall organization and biogenesis
  Homolog annotation: Hit_ID=Q6L5C5; Match level="QueryCoverage=98%, HitCoverage=58%, E-value=1e-144, Identity=89%"; Hit description =Putative polygalacturonase
  Pfam annotation: Domain name=Glyco_hydro_28; Domain location=1-271; Score=-55.9; E_value=2.5e-06; Accession=PF00295.9; Description =Glycosyl hydrolases family 28
GLVVWWDMWKKRTLPFTRPHLLELMYSTDVIVSNVVFQDSPFWNIHPVYCSNVXVIANVTVLAPHDSPNTDGIDLDSCNNVCIEDSYISAGDDLISIKSGWDEYGIAFGRPSSGITIRRITGSGPFAGFAVGSETSGGVENVLVEHLNLFSMGVGIHIKTNSGRGGFIRNITVSEVTLNGARYGLRIAGDVGGHPDTSYNPNVLPVVHSVTIKNVWGQNIRQAGLIRGIRNSVFSRICLSNVKLYGSASIGPWKCRDVSGGALDVQPSPCTELASTSETGFCTT

SEQ ID NO: 83384 - protein, 94 aa, Setaria italica
  Transcript Sequence Number=SeqID_17410
  Homolog annotation: Hit_ID=B6TWI5; Match level="QueryCoverage=76%, HitCoverage=18%, E-value=2e-17, Identity=68%"; Hit description =Meiotic recombination protein SPO11
ALGCDKQRLRRRQDAAALLLRRIKGLVRWVVKEVAAGRSPSIVLHRYRNYCSAADAASPSPCACSYDAPVGTDVLSLLHKDCHTSRLNVLLRVL

SEQ ID NO: 83385 - protein, 116 aa, Setaria italica
  Transcript Sequence Number=SeqID_17411
SGGGVAWSNNGGDSPPPWASISPISHTISSSMAGIGRETAPKRNNGQDRDDELIDGWIHWLCRRWWRQITGSRTPICCCCLDRTRAVSDSDPHPESTFSSGNCRFRLQRCHQPLNR

SEQ ID NO: 83386 - protein, 157 aa, Setaria italica
  Transcript Sequence Number=SeqID_17412
  Gene Ontology: Mol. function=metal ion binding; Cellular component =transcription factor TFIIE complex; Biological process=transcription initiation from RNA polymerase II promoter
  Homolog annotation: Hit_ID=B6SWY2; Match level="QueryCoverage=57%, HitCoverage=25%, E-value=2e-09, Identity=35%"; Hit description =Protein binding protein
  Pfam annotation: Domain name=zf-C3HC4; Domain location=69-114; Score =40.0; E_value=9.4e-09; Accession=PF00097.17; Description=Zinc finger, C3HC4 type (RING finger)
PIDPSINQLVVSVLAIVPLGCRLPSDPRGDAAAASISNKRGRVAASSKAIQGLREVTAPPTDGSDDDCCAICLQDLDYSDKAHPVPVRAMPCSHTFHEHCIFEWLRRNAVCPLCRHQLSTEDDHEQEQEQGRRRRRRIMNFRIPSSSSSPRSCSCSW

SEQ ID NO: 83387 - protein, 61 aa, Setaria italica
  Transcript Sequence Number=SeqID_17413
ASNFLVLPYFGEEYIQIQAGKKLNATDIRRIYNGNMGIAYSPKCVVSVTLPGYQDIANFWD

SEQ ID NO: 83388 - protein, 272 aa, Setaria italica
  Transcript Sequence Number=SeqID_17414
  Gene Ontology: Mol. function=nucleoside-triphosphatase activity; Cellular component=chloroplast; Biological process=proteolysis
  Homolog annotation: Hit_ID=B9S1T2; Match level="QueryCoverage=100%, HitCoverage=66%, E-value=1e-132, Identity=83%"; Hit description =Stage III sporulation protein AA, putative
  Pfam annotation: Domain name=AAA; Domain location=59-241; Score= -39.5; E_value=0.074; Accession=PF00004.21; Description=ATPase family associated with various cellular activities (AAA)
QQAVGEFGGDNRAGIEGTLHRISAIRSRKGMVVGLTCRVGRAVTGHVDMVRDLLNYKESILFLGRPGVGKTTVMREIARVLADEFQKRVVIVDTSNEIGGDGDIPHAAIGGARRMQVPEPSMQHRVMTEAVENHMPEVVIVDEIGTEAEAQACRSIAERGVMLIGTAHGERLANIIKNPTLSDLIGGVETVTLGDDEARARRSQKSILERKAPPTFPFLIEMRERHYWVTHRTERSVDMLLHGKKPLVEVRKRDNKFQVVIERWATYDGDGL

SEQ ID NO: 83389 - protein, 336 aa, Setaria italica
  Transcript Sequence Number=SeqID_17415
  Gene Ontology: Mol. function=hydrolase activity, acting on ester bonds
  Homolog annotation: Hit_ID=B6STR9; Match level="QueryCoverage=100%, HitCoverage=100%, E-value=1e-159, Identity=83%"; Hit description =Nuclease
  Pfam annotation: Domain name=SNase; Domain location=141-318; Score =146.4; E_value=8.6e-41; Accession=PF00565.9; Description =Staphylococcal nuclease homologue
MGNSIYRFLCGLCAPSSSEQALHGAHPAVAALGRDILSFGANSQVPDELSRHVVSSKKAQANWYKKLLVAWKKARPPPKTPEEAARFVVQTLKNHQKADVEGFLAFYGLPHPNAAAGAPAAPAPPKPQGPPKPQGAKFELHTLPIDPKSVADGDTINVYVDTADPRESGSVPREVQKAAAERAKARAAKNYQKADALQKVIVDAGYRPVPNARGEEVLAKKYRIRLRGIDAPESAMPYGKEAKEALLKLVQGKSLKVYVYDQDRYGRCVGDIYCDGVFVQEQMLKKGFAWHYTAYDQRPELAKWEKQAQTGRKGLWASSKPQKPWEWRKDKRNGTA

SEQ ID NO: 83390 - protein, 80 aa, Setaria italica
  misc_feature (73)..(73): Xaa can be any naturally occurring amino acid
  Transcript Sequence Number=SeqID_17416
  Subcellular localization annotation: CTP_CleavageSite=58; ConfidenceScore=5.50e-01
VGSLYQLLQPFKAQPPSVPPMPTLNASSVEEAPLPPVASRNGSGGSSSGAETPGAPPAAAHKATVSTGMLFVXVFTALLI

SEQ ID NO: 83391 - protein, 566 aa, Setaria italica
  misc_feature (454)..(454): Xaa can be any naturally occurring amino acid
  Transcript Sequence Number=SeqID_17417
  Gene Ontology: Mol. function=glycerophosphodiester phosphodiesterase activity; Cellular component=anchored to membrane; Biological process=glycerol metabolic process
  Homolog annotation: Hit_ID=Q9ZTU6; Match level="QueryCoverage=75%, HitCoverage=93%, E-value=1e-136, Identity=57%"; Hit description=S222
  Pfam annotation: Domain name=GDPD; Domain location=157-450; Score =91.6; E_value=2.8e-24; Accession=PF03009.9; Description =Glycerophosphoryl diester phosphodiesterase family
PELGFLQNISGTVHRKTKLVFSFLDKSLLDHSINQTYGSLLSNLTLIKSIASGIMVPKTYIWPVTKDNYLQPSTSIVAEAHNAGLEIYASDFANDRVIPYNYSYDPLAEYLNFISDGGFSVDGVLSEHPFTASEAIGCLASLHSSKTDHGEPLVISHNGASGDYPDCTDLAYHSAINDGADVIDCPVQVTSDGVLMCMSSINLLDTTNVQGTTFSSLSSVVPEIQATAGIFTFNLTWDDINSSTLKPKISSPVSDYYLVRNPRYTNQGKFLNLSDFLAIGMDKDLSGVMIIIENAAFVAKSLGIDIVDSVNAALSAAGYDNQTTKQVLIQSKDSAVLVKLKQQKTKCKLVYTLPLGIGDASTSSLEAMKKFADAVVVDRKSVFTLSQDFAIRQNSLVKDLQSAGLAVYAQVFRNEFVSQPLDFFADETVEINYYVQSFNLSGIITDFPKTVRRXKNTCTGLGNDMPNYMQRIDVGSLYQLLQRFKAQPPSLPPMPTLNASSVEEPPLPPVASRKRDLLRYTNSRLPNGSGGSSSGAETPGAPPAAAHKATVSTGMLFVMVFTALLI

SEQ ID NO: 83392 - protein, 631 aa, Setaria italica
  misc_feature (356)..(356): Xaa can be any naturally occurring amino acid
  Transcript Sequence Number=SeqID_17418
  Gene Ontology: Mol. function=protein kinase activity; Cellular component=plasma membrane; Biological process=protein amino acid phosphorylation
  Homolog annotation: Hit_ID=Q8RUT5; Match level="QueryCoverage=99%, HitCoverage=92%, E-value=0.0, Identity=48%"; Hit description =Putative receptor-like protein kinase
  Pfam annotation: Domain name=LRR_1; Domain location=117-139; Score =15.1; E_value=0.29; Accession=PF00560.25; Description=Leucine Rich Repeat
  Pfam annotation: Domain name=LRR_1; Domain location=141-163; Score =15.9; E_value=0.16; Accession=PF00560.25; Description=Leucine Rich Repeat
  Pfam annotation: Domain name=LRR_1; Domain location=165-187; Score =17.7; E_value=0.048; Accession=PF00560.25; Description=Leucine Rich Repeat
  Pfam annotation: Domain name=LRR_1; Domain location=189-212; Score =11.9; E_value=1.6; Accession=PF00560.25; Description=Leucine Rich Repeat
  Pfam annotation: Domain name=LRR_1; Domain location=46-68; Score=8.9; E_value=5.9; Accession=PF00560.25; Description=Leucine Rich Repeat
  Pfam annotation: Domain name=LRR_1; Domain location=70-92; Score =12.7; E_value=1.1; Accession=PF00560.25; Description=Leucine Rich Repeat
  Pfam annotation: Domain name=LRR_1; Domain location=94-116; Score =10.8; E_value=2.6; Accession=PF00560.25; Description=Leucine Rich Repeat
  Pfam annotation: Domain name=Pkinase; Domain location=347-616; Score =107.1; E_value=6e-29; Accession=PF00069.17; Description=Protein kinase domain
  Pfam annotation: Domain name=Pkinase_Tyr; Domain location=347-616; Score=85.2; E_value=2.4e-22; Accession=PF07714.9; Description =Protein tyrosine kinase
  Pfam module annotation: Pfam domain module=LRR_1::LRR_1::LRR_1::LRR _1::LRR_1::LRR_1::LRR_1::Pkinase::Pkinase_Tyr; Domain location=117 -139::141-163::165-187::189-212::46-68::70-92::94-116::347-616::347 -616
  Subcellular localization annotation: CTP_CleavageSite=29; ConfidenceScore=5.50e-01
MHVDVSWNSLTGGLPTWVFASGVQWVSVSQNTLSGEVAMPMNVSSVLQGVDLSNNAFSGVIPSEISKLQNLQSLNMSWNSMSGSIPASILEVKSLEVLDLTANRLNGSIPAAIGGESLKELRLGKNSLTGNIPAQIGNCSALASLDLSHNNLTGAIPETIANLTSLEIVDLSRNRLTGVLPKQLSNLPHLLQFNISHNQLSGDLPPGSFFDTIPLSSVLDNPGLCGAKLNSSCPGVLPKPIVLNPNTSSDPISPTEPVPDGGLHHKKTILSISALVAIGAAALIAVGVITITVLNFRVRAPGSHSAAVLELSDGYLSQSPTTDMNAGKLVMFGGGNPEFSASTHALLNKDCELGRXGFGTVYKTTLRDGQPVAIKKLTVSSLVKSQVEFEREVKMLGKLRHRNLVALKGYYWTPSLQLLIYEFVSGGNLHKQLHESSTTNCLSWKERFDIILGIARSLAHLHRHDIIHYNLKSSNILLDGSGEAKVGDYGLAKLLPMLDRYVLSSKVQSALGYMAPEFACRTVKITEKCDVYGFGVLILEILTGRTPVEYMEDDVIVLCDVVRAALDEGKVEECVDERLCGKFPLEEAVPIMKLGLVCTSQVPSNRPDMSEVVNILELIRCPQDSPETELG

SEQ ID NO: 83393 - protein, 226 aa, Setaria italica
  Transcript Sequence Number=SeqID_17419
  Gene Ontology: Mol. function=nucleoside-triphosphatase activity
  Homolog annotation: Hit_ID=Q2R8Q8; Match level="QueryCoverage=98%, HitCoverage=22%, E-value=5e-81, Identity=69%"; Hit description =ATPase, AAA family protein, expressed
EAAMVGAGMRPGCLVSVSLISSRSDQLDGFPLDDLFKECNRFFDLDVDNDLLCGEAGRNFVVATVFPSREVQKNGIKLSWDLACVLGYPSVGQSLFISPLCTSQDPKHSDDVDILRVVKCKNLYLGLIPPEVGSSSGIHSESDYLSERNEMLMETPKKSPFTTLHRKESHDFASNSGSSMCLDPTTTRSALADEKVNELLQTSASRWLNGRHLLKGNFIPLLTKLS

SEQ ID NO: 83394 - protein, 277 aa, Setaria italica
  Transcript Sequence Number=SeqID_17420
  Gene Ontology: Mol. function=oxidoreductase activity; Biological process=oxidation reduction
  Homolog annotation: Hit_ID=B9RYQ7; Match level="QueryCoverage=82%, HitCoverage=66%, E-value=6e-77, Identity=64%"; Hit description=Short- chain dehydrogenase, putative
PSVAECPDADVVVLPLDLSSLASVRRFVASFLDLGLPLNLLVNNAGKYADRFALSEDGVEMTFATNYLGHFLLTRLLLEKMAETARASGFEGRIVNVSSTIHSWFAGDDAVGYLDRVTRRKIPYDPTRAYALSKLANVLHTRALAERLREMNANVTANCVHPGIVRTRLIRDRDGLVTNTVFFLASKLLKTIPQAAATTCYVAVHPAVAGVSGKYFADCNEASPSRLGASSEEAAKLWSFSENITAEKIPKMSVHVSAGGFRLQVQSSNADRGMALA

SEQ ID NO: 83395 - protein, 204 aa, Setaria italica
  Transcript Sequence Number=SeqID_17421
  Gene Ontology: Mol. function=nucleotide binding; Biological process =defense response
  Homolog annotation: Hit_ID=Q5Z5Z4; Match level="QueryCoverage=86%, HitCoverage=15%, E-value=7e-29, Identity=36%"; Hit description =Putative Pib
VRSLSSCRFCLCIAAAAAPPPLDVAVAEIEQLKARVEDVSSRNSRYSLISDSGSNPGDSASSAAVTATAVDMPGEARNTVKKQPGFSDLTQLIAKDGKELGVMSVWGRSDDLGAMSVIRKAYEDPEVRKTFGCRGWVKLEYPFNRRKFLQSVVAQFYTNSCLEEEKSVDVVELERMENAVVKQGGFVQEFKAQVDEKRYLLVLE

SEQ ID NO: 83396 - protein, 68 aa, Setaria italica
  misc_feature (13)..(13): Xaa can be any naturally occurring amino acid
  Transcript Sequence Number=SeqID_17422
VALLQVAMACVAXVPDARPDAPDVVRMIEEIGGGHGGRTTTEESEGVRGTSEEERSRSGGTPPAAPTP

SEQ ID NO: 83397 - protein, 157 aa, Setaria italica
  Transcript Sequence Number=SeqID_17423
  Gene Ontology: Mol. function=binding; Cellular component=integral to membrane; Biological process=transport
  Homolog annotation: Hit_ID=B6TE30; Match level="QueryCoverage=99%, HitCoverage=41%, E-value=4e-68, Identity=80%"; Hit description =Mitochondrial carrier protein
  Pfam annotation: Domain name=Mito_carr; Domain location=59-156; Score= -15.9; E_value=0.097; Accession=PF00153.19; Description=Mitochondrial carrier protein
SLEGWGALWRGLRPGIARDCVFGGMFFSTWQIIHTAMLTWKAVNMKPEPRNIEDAGPVHPFASSVAAGFAGAVAAAASHTFDTAKSRSECTVVPKYIAMERKFLKWKAPGTWIERKTGISPADRNVLFRGIGLRMAHSGIASFVLVGSYYLAVDYIS

SEQ ID NO: 83398 - protein, 140 aa, Setaria italica
  Transcript Sequence Number=SeqID_17424
  Subcellular localization annotation: CTP_CleavageSite=55; ConfidenceScore=5.42e-01
MAMEYLSWWPTSSWISPGAALFLLCNVLVGAIVVTSSRGEQGGGRAAASTRRLCRSASSMVLGRLRSFSMFAVHAVPMEDGYHPSLELEAEAYQPQPDAAEPAIPTATASAPVVAAASATLSESAKEVAEVGKKDEPISS

SEQ ID NO: 83399 - protein, 131 aa, Setaria italica
  Transcript Sequence Number=SeqID_17425
  Gene Ontology: Mol. function=hydrolase activity, hydrolyzing O -glycosyl compounds; Biological process=carbohydrate metabolic process
  Homolog annotation: Hit_ID=Q9AXL6; Match level="QueryCoverage=42%, HitCoverage=10%, E-value=1e-15, Identity=67%"; Hit description=Beta -glucosidase (Fragment)
  Subcellular localization annotation: CTP_CleavageSite=53; ConfidenceScore=5.57e-01
MIHGSTSVTSLKSSPTRAHQSPVIATARQEEQQPVVGRGMAPLSSSGVLRRLRAQATPRLLTVLLAVVVGVAPRSASAITRRDFPEGFVFGAGSSAFQVEGAAAEDGRAPSIWDTFTHEGYSYDGSTADVS

SEQ ID NO: 83400 - protein, 150 aa, Setaria italica
  Transcript Sequence Number=SeqID_17426
  Gene Ontology: Mol. function=nutrient reservoir activity; Cellular component=extracellular region
  Homolog annotation: Hit_ID=Q688L5; Match level="QueryCoverage=86%, HitCoverage=60%, E-value=4e-51, Identity=78%"; Hit description =Germin-like protein 5-1
  Pfam annotation: Domain name=Cupin_1; Domain location=67-150; Score= -2.6; E_value=0.001; Accession=PF00190.14; Description=Cupin
MATSAVLLVVAAVVALVAGHGAAFDPNPLQDFCVADTTSKVRVNGVPCKDPAAVTPDDFFFSGVDRAGAGTASRRYGFTALSVQIPGLNTLGASHARVDVAPGAVFPPHYHPRASETAVVLDGAVYFGFVSSYPENMVYAKVLRKGDSSP

SEQ ID NO: 83401 - protein, 45 aa, Setaria italica
  Transcript Sequence Number=SeqID_17427
VVVLLLHFLLLRTLHHHRKIRHCRKCVTDLKSRNMIEFPKMHLTS

SEQ ID NO: 83402 - protein, 60 aa, Setaria italica
  Transcript Sequence Number=SeqID_17428
  Gene Ontology: Mol. function=long-chain-fatty-acid-CoA ligase activity; Cellular component=endoplasmic reticulum membrane; Biological process=metabolic process
  Homolog annotation: Hit_ID=Q8LKS6; Match level="QueryCoverage=100%, HitCoverage=8%, E-value=1e-29, Identity=93%"; Hit description=Long chain acyl-CoA synthetase 6
PRGEICVRGPTIFRGYYKDEVQTKEVIDEDGWLHTGDIGLWLPGGRLRIIDRKKNIFKLA

SEQ ID NO: 83403 - protein, 317 aa, Setaria italica
  Transcript Sequence Number=SeqID_17429
  Gene Ontology: Mol. function=catalytic activity; Cellular component =endoplasmic reticulum membrane; Biological process=metabolic process
  Homolog annotation: Hit_ID=B6SWC4; Match level="QueryCoverage=80%, HitCoverage=36%, E-value=1e-119, Identity=82%"; Hit description=AMP -binding protein
  Subcellular localization annotation: CTP_CleavageSite=61; ConfidenceScore=5.65e-01
VIGLSSEPSRARNPFPLSLAAAPSLPSSLPSLPTQVKSSPARKPRNPLPPMEDAQRRLRAVAAHLQPPPTAAGCGLAANPTAGEYVHAQGYSVVLPEKLQTGKWNVYRSARSPLRLISRYPDNPDIGTLHDNFEYAVDTFRDCRYLGTRIRADGTIGDYKWMTYGEASTSRTAVGSALIYHGVLEGARIGLYFINRPEWIIVDHACAAYSYVSVPLYDTLGPDAVQFIVNHATVEVIFCVPQTLSALLSFITKMPCVRLIVVVGGEDVKIPPTPANTGVQIITYPSLHNQGKMSPQPFRPPKPEKELVFPFGSYLVG

SEQ ID NO: 83404 - protein, 97 aa, Setaria italica
  Transcript Sequence Number=SeqID_17430
  Gene Ontology: Mol. function=catalytic activity; Biological process =metabolic process
  Homolog annotation: Hit_ID=Q2RAL6; Match level="QueryCoverage=100%, HitCoverage=13%, E-value=2e-47, Identity=92%"; Hit description=AMP -binding enzyme family protein, expressed
WAASEGIQYEDLRQLCADPRARAAVLADMDSIGKEAQLRGFEFAKSVTLVAEPFTLENGLLTPTFKVKRPQAKAYFAKEISDMYAQLQEAESARSKL

SEQ ID NO: 83405 - protein, 644 aa, Setaria italica
  Transcript Sequence Number=SeqID_17431
  Gene Ontology: Mol. function=catalytic activity; Cellular component =endoplasmic reticulum membrane; Biological process=metabolic process
  Homolog annotation: Hit_ID=B6SWC4; Match level="QueryCoverage=96%, HitCoverage=90%, E-value=0.0, Identity=89%"; Hit description=AMP -binding protein
  Pfam annotation: Domain name=AMP-binding; Domain location=64-525; Score=353.3; E_value=4.5e-103; Accession=PF00501.20; Description=AMP- binding enzyme
TCRPVHVPLSSLQLLRLISRYPDNPDIGTLHDNFEYAVDTFRDCRYLGTRIRADGTIGDYKWMTYGEASTSRTAVGSGLIYHGVLEGARIGLYFINRPEWIIVDHACASYSYVSVPLYDTLGPDAVQFIVNHAAVEVIFCVPQTLSILLSFVAQMPCVRLIVVVGGNDANMPSTPGTTGVQIITFSRLLIQGKASPQPFRPPKPEDVATICYTSGTTGTPKGAVISHENLIANVAGSSLNIKFYPSDVYISYLPLAHIYERVNQVALLHCGVAVGFYQGDNLKLMDDLAALRPTVFASVPRLYNRIYAAITNAVKESGGLKEKLFHSAYNAKRQAIIKGRNPSPMWDKLVFNKIKARLGGRVRLMSSGASPLSADVMEFLRICFGGEVIEGYGMTETSCIVTAMDIGDKSIGHVGSPISSCEVKLVDVPEMNYSSDDQPYPRGEICVRGPTIFRGYYKDEVQTKEVIDEDGWLHTGDIGLWLPGGRLRIIDRKKNIFKLAQGEYIAPEKIENVYAKCKFIAQCFIYGDSFNSSLVAVVAVEPEVLKAWAGSEGIQYEDLRQLCADPRARAAVLADMDSIGKEAQLRGFEFAKAVTLVAEPFTLENGLLTPTFKVKRPQAKAYFAKEISDMYAELQETETARPKL

SEQ ID NO: 83406 - protein, 484 aa, Setaria italica
  Transcript Sequence Number=SeqID_17432
  Gene Ontology: Mol. function=kinase activity; Cellular component =mitochondrion; Biological process=protein amino acid phosphorylation
  Homolog annotation: Hit_ID=B6U2C9; Match level="QueryCoverage=100%, HitCoverage=77%, E-value=0.0, Identity=97%"; Hit description=Protein kinase-like
  Pfam annotation: Domain name=ABC1; Domain location=128-254; Score =133.5; E_value=6.5e-37; Accession=PF03109.8; Description=ABC1 family
  Pfam annotation: Domain name=APH; Domain location=142-402; Score= -18.5; E_value=0.05; Accession=PF01636.15; Description=Phosphotransfer ase enzyme family
  Pfam module annotation: Pfam domain module=ABC1::APH; Domain location= 128-254::142-402
LAQKTSADGEYYPIRERAQDGRIYITSLIYSAVEMVIIILRSIYLALLFTPSILMAPFAETLGSKYRKTWLRLVHRTLELAGPAFIKWGQWAATRPDLFASDLCTELSKLHTKAPAHSFKYTKKTVEKAFGRKLSDIFENFEENPVASGSVAQVHRAVLRFRYPNQQTKRVTVAVKVRHPGVGDSIRRDFSIINAVAKISRYIPTLNWLRLDESVQQFAVFMMSQVDLAREAAHLSRFIYNFRRWKDVSFPRPLYPLVHPAVLVETYEHGESVSHYVDDLEGHDRIKSALAHIGTHALLKMLLVDNFVHADMHPGNILVRVVQPKNSNNTLIKSRPHVVFLDVGMTAELSSNDRVNLLEFFKAVARRDGRTAAESTLKLSKQQNCPNPKAFIEEVERSFSFWGTTEGDAVHPAECMHQLLEQVRRHKVNIDGNVCTVMVTTLVLEGWQRKLDPDYNVMKTLQTLLFKEDWAKSLQYTIQGLMAP

SEQ ID NO: 83407 - protein, 159 aa, Setaria italica
  Transcript Sequence Number=SeqID_17433
  Gene Ontology: Cellular component=integral to membrane
  Homolog annotation: Hit_ID=B9RUR4; Match level="QueryCoverage=98%, HitCoverage=57%, E-value=5e-56, Identity=69%"; Hit description=Novel plant snare, putative
MDLASVNEELAEIDGQIGDILRALQNGFQKLDKIKDANRRSRQLEELTDKMRDCKRLIKDFERVSKDEAGRTDPDTAKMLHDRKQSMIKELNSYVALKKQHASGNKRIDLFDGPSVEDGYGEENVLLASNMTNQQLMDQGNQLMNETDQAIARSKKTTV

SEQ ID NO: 83408 - protein, 129 aa, Setaria italica
  Transcript Sequence Number=SeqID_17434
  Homolog annotation: Hit_ID=B6SWG5; Match level="QueryCoverage=100%, HitCoverage=17%, E-value=7e-42, Identity=71%"; Hit description =Signal transducer
EQEEFFDSREVLSPASVSSPASSGRRDDGCLFDESLLEVWVRDPCSVQERRQRFAKSMGLLDPSSHGARADEEPCSRLEATEEILPASPSADLFSAAPTFACRGGEPTASGDDGAGTEELECVFKNLDD

SEQ ID NO: 83409 - protein, 232 aa, Setaria italica
  misc_feature (41)..(41): Xaa can be any naturally occurring amino acid
  Transcript Sequence Number=SeqID_17435
  Gene Ontology: Biological process=protein localization
FDDDGDDGKSYKVIPRSSYHLVNKKYNYGIAFVDGLLEFVXKPGNPFKVQIFDESIVPHMSLDNNTYLDVEDDVPFSVRDRLASGASSQHVIINVDKIVFTITHEVFDTDNVFPLVQTCISDIRVVTQIFPSKIRILSSFKVSGQYFDARRNLWEDLISPIASYTFFRSRFFTPDPVTKYGKMPIRFFFHLKQVDIFINELSVDILLYLVGKLDLMGPYAVRSSAIFPNSCK

SEQ ID NO: 83410 - protein, 144 aa, Setaria italica
  misc_feature (106)..(106): Xaa can be any naturally occurring amino acid
  Transcript Sequence Number=SeqID_17436
  Gene Ontology: Mol. function=protein serine/threonine kinase activity; Cellular component=integral to membrane; Biological process=protein amino acid phosphorylation
  Homolog annotation: Hit_ID=B6UCC0; Match level="QueryCoverage=97%, HitCoverage=20%, E-value=4e-71, Identity=89%"; Hit description=Wall -associated kinase 3
  Pfam annotation: Domain name=EGF_CA; Domain location=12-51; Score =33.2; E_value=1e-06; Accession=PF07645.7; Description=Calcium binding EGF domain
GLTRYLPDGCHDADECKNSPCPSGGACHNTVGGYRCSCPVGRKFNQRSNTCDPDTTLITGLAIGFFLVVIFSSFGYMILQKRKLNQVKQEHFRQHGGMILFERMRXEKGLAFTVFSEAELVKATDNYDKSRIIGKGGHGTVYKG

SEQ ID NO: 83411 - protein, 244 aa, Setaria italica
  misc_feature (48)..(48): Xaa can be any naturally occurring amino acid
  misc_feature (79)..(79): Xaa can be any naturally occurring amino acid
  Transcript Sequence Number=SeqID_17437
  Gene Ontology: Mol. function=nuclease activity; Cellular component =chloroplast; Biological process=nucleotide-excision repair
  Homolog annotation: Hit_ID=Q9SR38; Match level="QueryCoverage=75%, HitCoverage=74%, E-value=2e-50, Identity=50%"; Hit description =F3L24.12 protein
NFRRCQRRRLLGRGCGRLQPWGSARRPSSQAAPASPLRDSVSDEAARXRTFAGIQIADSNLRRCKIVHVKSGESDGHPXTEDMLVDEETLQSNLDKAIAEEDYARAAKIRDDLRILHEDAEASLLAANARFYSAFRNGDIAAMYSIWAKGDHVYVIHPAAGRISGYDVVMQSWEMVCNADYEFPLSIDLRNIEVHIRGNLGYVTCLEVVKNKGRTWGKQVATNIFEKVNGTWLISVHHASHIEE

SEQ ID NO: 83412 - protein, 153 aa, Setaria italica
  Transcript Sequence Number=SeqID_17438
  Gene Ontology: Mol. function=metal ion binding
  Homolog annotation: Hit_ID=B6SQT6; Match level="QueryCoverage=56%, HitCoverage=35%, E-value=9e-11, Identity=36%"; Hit description=PHD finger protein
EGSFSRKYNVNQPTCVTGNSDGNWELRPPKLLTPPGQPDPRMFGIKLVRGNMKHPKWLAYIATHCDAWLIRISFFLGANLGTQARQHLSALINSLQTIHEAFVASDTYHRICHLEKMNVEIEDEDEGCGTEPTSVQAVVTITVGMGFGSVAMS

SEQ ID NO: 83413 - protein, 267 aa, Setaria italica
  Transcript Sequence Number=SeqID_17439
NENTCNCRCLARMFKRKLDADGDAEVTMDDSSGDVVAGDPEKPAFLEEHMNEEKGDVAVSAQEDSYIVPSPSEVVDTSEEQAATCDNNDQVPSSAEFELCAAHSMSEEVGILEEHVETCHDAQIHSSVQADSCTTLLSEYTKIAEEQTPTSQDNQMHAFQIQKSIKDTSLKPRILHLNDADVSVDTDIVQESDFGNLNGFEVDPIHEAEFNYVKDIFKKSSFSNEILLDEWYAQNIGALQEEDCQHYEAAAAACDFTDMSTDQLLLF

SEQ ID NO: 83414 - protein, 248 aa, Setaria italica
  Transcript Sequence Number=SeqID_17440
  Gene Ontology: Mol. function=protein domain specific binding; Cellular component=germline ring canal; Biological process=oocyte microtubule cytoskeleton polarization
  Homolog annotation: Hit_ID=B6TED9; Match level="QueryCoverage=100%, HitCoverage=100%, E-value=1e-130, Identity=90%"; Hit description=14 -3-3-like protein
  Pfam annotation: Domain name=14-3-3; Domain location=4-237; Score =390.3; E_value=3.3e-114; Accession=PF00244.12; Description=14-3-3 protein
MEEREKVVCLAKLAEQAERYDDMVEFMKKLARMDVDMNAEERHLFSVGFKNTIGAKRASWRIICSLEQKLTSGDQAGVMIDAYKKKVEGELRKVCNEVLSIIAIHCLPLASSGENVVFFYKMKGDYYRYLAEFSTGTEKKAAADQSLMAYQHAMVVASSELSPAHQIRLGLALNFSVFFYEIMNSHERACQVAKQAFDEALTEINAAGEGVYKDSTLMMQLLKDNLALWTSELTGGEASKDNDIDMEG

SEQ ID NO: 83415 - protein, 87 aa, Setaria italica
  Transcript Sequence Number=SeqID_17441
  Gene Ontology: Mol. function=protein domain specific binding; Cellular component=cytoplasm; Biological process=oocyte microtubule cytoskeleton polarization
  Homolog annotation: Hit_ID=B6TED9; Match level="QueryCoverage=70%, HitCoverage=24%, E-value=3e-23, Identity=88%"; Hit description=14-3 -3-like protein
MLLDGPPVYKKASTSVTEFSCFFSIFRACQVAKQAFDEALTEINAAGEGVYKDSTLMMQLLKDNLALWTSELTGGEASKDNDIDMEG

SEQ ID NO: 83416 - protein, 127 aa, Setaria italica
  Transcript Sequence Number=SeqID_17442
  Subcellular localization annotation: CTP_CleavageSite=44; ConfidenceScore=5.04e-01
SDSSIYTSSSEYEAAFSDAGSSSARRAVEVPASRRRMPRDREARAAGRADRPRVRKKPAGHEVVPSARAVFAAAAREPDEDIRRNREETLAAFAATAAEPNRPGGDGADDDEDVSMDSLWESIVQRR

SEQ ID NO: 83417 - protein, 91 aa, Setaria italica
  Transcript Sequence Number=SeqID_17443
FFFFLATSNSNPHFSRRIAHLMQHKNISLQHQQKTYHFQIDFCNIGIQEHQHLKLSFATSTQRLVEVLARHVAHQLLRPSLSSPGCLRFNL

SEQ ID NO: 83418 - protein, 59 aa, Setaria italica
  Transcript Sequence Number=SeqID_17444
RRGWPAAAGGAEGEKERLLANERYLSEIMKEKASTARDRRRGRVAVRRPHLESITEDDL

SEQ ID NO: 83419 - protein, 668 aa, Setaria italica
  misc_feature (22)..(22): Xaa can be any naturally occurring amino acid
  misc_feature (445)..(445): Xaa can be any naturally occurring amino acid
  misc_feature (464)..(464): Xaa can be any naturally occurring amino acid
  Transcript Sequence Number=SeqID_17445
  Gene Ontology: Mol. function=zinc ion binding; Cellular component =nucleus
  Homolog annotation: Hit_ID=Q2QZM0; Match level="QueryCoverage=84%, HitCoverage=65%, E-value=1e-127, Identity=40%"; Hit description =Transposon protein, putative, unclassified
  Pfam annotation: Domain name=FAR1; Domain location=61-145; Score =113.9; E_value=5.4e-31; Accession=PF03101.7; Description=FAR1 family
  Pfam annotation: Domain name=MULE; Domain location=264-360; Score =119.2; E_value=1.4e-32; Accession=PF10551.1; Description=MULE transposase domain
  Pfam annotation: Domain name=SWIM; Domain location=552-588; Score =26.0; E_value=0.00016; Accession=PF04434.9; Description=SWIM zinc finger
  Pfam module annotation: Pfam domain module=FAR1::MULE::SWIM; Domain location=61-145::264-360::552-588
MITLDMMAMEVEEPFAQSKNPXRARRRDLNALDPSMEESDGEDIGVPEVGMVFNNHAEVNRFYRKYARRVGFGVSVRRSSFSQEGTCLYLELMCCKGGRPRYEPKFRKRASSTTNCPAKIRVKLWGDKLLHVELANLDHNHPVSPAMARFLNSYKQLSGPAKRRMRMGGPGAMPVEEPSKMPMDKLGELEELLFGESKHHSFVERGRLKLQPGDSEALRLFFTRMQAKNANFFNVIDLDDEGCIRNVFWADARSRAMYEYYSDVITLDTSYVVSKHDMPLATFIGVNHHGQSVLMGCALLSDETAETYSWLLKAWIACMSGNLPKALVTDYCRGIQSAVTEVIPGVRHRMCLFQIMRKAAERLSGLSEYRAINKAMHKAVYDSLTIDEFEGEWNALVTCNGLQGNDWLRSLYECRASWVPVFIKDTFWAGMSVTQRNETVTPFFXDGYVDLKTTLKQFLGKYEXALQSKYEKEAQADFETFHKQRPPVSKFYMEEQLSKVYTHNMFKKFQDEIEAIMYCHVSLIGVDGPISTFNVKECIFLEDGKRTMSTIFAVTYNADEKDITCICGGFQFSGILCRHSLSTLKFQLVREIPPQYIVDRWKKDFRQLHVMGRPPSDLVPNNRVDRYDYLSMRCLQLVDSAVLSDKYRLALRLVREMEKFLLNSNTHD

SEQ ID NO: 83420 - protein, 215 aa, Setaria italica
  Transcript Sequence Number=SeqID_17446
  Gene Ontology: Mol. function=transferase activity
  Homolog annotation: Hit_ID=Q5ZCH7; Match level="QueryCoverage=90%, HitCoverage=36%, E-value=1e-100, Identity=89%"; Hit description=O -acetyltransferase-like
TIEVGQFTEYRYLEYVNNLELIGMIYAYFHPNVERWMEKLEESETKVRLSIKGTIVTTSVVAGYLWYEYIYKLDKLTYNKYHPYTSWIPITVYIALRNCTQQLRSASLTLFAWLGKITLETYISQIHIWLRSSMPNGQPKWLLSFIPGYPMLNFMLVTAIYLLISYRVFELTTILKSAFIPSRDNNRLYQNFVAGIIISLCLYFCSVILLKITVV

SEQ ID NO: 83421 - protein, 352 aa, Setaria italica
  Transcript Sequence Number=SeqID_17447
  Gene Ontology: Mol. function=transferase activity; Cellular component= integral to membrane; Biological process=oxidation reduction
  Homolog annotation: Hit_ID=Q5ZCH7; Match level="QueryCoverage=99%, HitCoverage=64%, E-value=0.0, Identity=93%"; Hit description=O -acetyltransferase-like
  Pfam annotation: Domain name=Cas1p; Domain location=2-204; Score =431.3; E_value=1.5e-126; Accession=PF07779.4; Description=Cas1p-like protein
LSLKQLNEKSAFSGKSILYLNRHQTEEWKGWMQVLFLMYHYFAATEIYNAIRIFIAAYVWMTGFGNFSYYYIKKDFSLARFAQMMWRLNFFVAFCCIVLDNDYMLYYICPMHTLFTLMVYGCLGLFNKYNEIPSVMAMKIVGCFLVVILIWEIPGVFELLWRPFTFLLGYKDPEPSKANLPLLHEWHFRSGLDRYIWIIGMIYAYFHPNVERWMEKLEESETKVRLSIKGTIVTTSVVAGYLWYEYIYKLDKLTYNKYHPYTSWIPITVYIALRNCTQQLRSASLTLFAWLGKITLETYISQIHIWLRSSMPNGQPKWLLSFIPGYPMLNFMLVTAIYLLISYRVFEFCSLN

SEQ ID NO: 83422 - protein, 142 aa, Setaria italica
  Transcript Sequence Number=SeqID_17448
  Gene Ontology: Mol. function=lyase activity; Cellular component =anchored to membrane
  Homolog annotation: Hit_ID=B6SWR0; Match level="QueryCoverage=95%, HitCoverage=28%, E-value=4e-62, Identity=84%"; Hit description =Pectate lyase 12
  Subcellular localization annotation: CTP_CleavageSite=21; ConfidenceScore=5.41e-01
AATASTLPLLNSSVPDPAAVVADFHSKVATSRRRMQEAGGGASSGGCMTGNPIDDCWRCAGTDWRQDRQRLADCGIGFGRNALGGKGGPLYVVTDSSDPGPVNPVPGTLRHAAIQEGPLWIVFAADMTIRLNEELLVNSYKT

SEQ ID NO: 83423 - protein, 284 aa, Setaria italica
  Transcript Sequence Number=SeqID_17449
  Gene Ontology: Mol. function=3'-5'-exoribonuclease activity; Cellular component=exosome (RNase complex); Biological process=RNA processing
  Homolog annotation: Hit_ID=B9SW53; Match level="QueryCoverage=100%, HitCoverage=98%, E-value=1e-117, Identity=73%"; Hit description =Exosome complex exonuclease rrp42, putative
  Pfam annotation: Domain name=RNase_PH; Domain location=29-169; Score =116.0; E_value=1.3e-31; Accession=PF01138.13; Description=3' exoribonuclease family, domain 1
  Pfam annotation: Domain name=RNase_PH_C; Domain location=199-265; Score=24.7; E_value=0.00039; Accession=PF03725.7; Description=3' exoribonuclease family, domain 2
  Pfam module annotation: Pfam domain module=RNase_PH::RNase_PH_C; Domain location=29-169::199-265
MVGLSEGEKHFIRGGIAQDIRTDGRRRLQFRALSVETGVIPQANGSARVRLGATEIIASVKAELGKPSILHPDKGKVSIFVDCSPTAEPTFEGRGSEELSAELSVALQRCLLGGKSGAGAAIDLSSLIVVEGKVCWDLYIDGLVVSSDGNLLDALATAIKVALSDTGLPKVNVSLSAASDEEPEVDVSDEEFLQFDTSSVPVIITLTKVGRHYIVDATSEEESQMSSAVSVSVNRNGQICGLTKRGGAGLDPSVIFDMISVARHASQQFIALVDSQIAAAEADE

SEQ ID NO: 83424 - protein, 55 aa, Setaria italica
  Transcript Sequence Number=SeqID_17450
MRAVRHDGRRAPGLRGRLLPEEMVYTLMDYGPPTANTNTRGGMNPSPDPPSPPTH

SEQ ID NO: 83425 - protein, 705 aa, Setaria italica
  misc_feature (11)..(11): Xaa can be any naturally occurring amino acid
  Transcript Sequence Number=SeqID_17451
  Gene Ontology: Cellular component=membrane
  Homolog annotation: Hit_ID=B6SS81; Match level="QueryCoverage=99%, HitCoverage=90%, E-value=0.0, Identity=85%"; Hit description=HYP1
  Pfam annotation: Domain name=DUF221; Domain location=257-580; Score =467.1; E_value=2.5e-137; Accession=PF02714.7; Description=Domain of unknown function DUF221
DARSYLKFLNXWMPAALKMPQDELINHAGLDSVVYLRIYLTGLKIFVPITALAFLVLVPVNWFNDALDGMKKVVHSDIDKLSISNIPNGSKRFIAHLVMAYAITFWTCYILLKEYQIIAKLRLRFLASEKRRPDQFTVLVRNIPQDPDESISELVEHFFLVNHPDNYLRHQVVYNANKLADLVEKKKKMQNWLDYYRLKYERNPSERPTTKTGFLGCFGSKVDAIDYYKSEIEKIGKEEAEERKKVMKDPKSVVPAAFVSFRSRWGAAVCAQTQQTSNPTVWLTEWAPEPRDVYWNNLSIPFVSLTVRRLIIAVAFFFLNFFYVIPITFVQSLANLEGIEKALPFLKPLVELPLIKSFIQGLLPGIVLKIFLIVLPTILMFMSKFEGLISQSSLERRSASKYYIFLFFNVFLGSVIAGSALEQLQKYIHMSANEIPKLIGFSVPMKATFFITYVMVDGWAGVAGEILRLKPLIFFHLKNFFLVKTEKDREEAMDPGSICFDSCEPRIQLYFLLGLVYAAVTPLLLPFILVFFGFAYVVYRHQIINVYNQQYESGAQFWPSVHGRIITALIVSQLLLLGLLSTKGLEEATPVLLVLPVLTFWFFKYCKHRYEPAFVRNPLQEAMRKDTLERAREPNFDLKAYLANSYLHPVFKGTDHDDDRYSTVDDDGWMEEEVLVPTKRHSRRTTPAQSKYDGSDGLSSVPEKS

SEQ ID NO: 83426 - protein, 69 aa, Setaria italica
  Transcript Sequence Number=SeqID_17452
  Gene Ontology: Mol. function=transferase activity, transferring nitrogenous groups; Biological process=cellular amino acid and derivative metabolic process
  Homolog annotation: Hit_ID=B9RVV0; Match level="QueryCoverage=95%, HitCoverage=15%, E-value=1e-13, Identity=53%"; Hit description =Tyrosine aminotransferase, putative
VHLLESAADTLYRRVNQIEALQCYSKPEGSMFMMVEINTSILHGVADDMDFARELIKEECVLVLPGIIH

SEQ ID NO: 83427 - protein, 312 aa, Setaria italica
  Transcript Sequence Number=SeqID_17453
  Gene Ontology: Mol. function=transferase activity, transferring nitrogenous groups; Biological process=cellular amino acid and derivative metabolic process
  Homolog annotation: Hit_ID=A9CM06; Match level="QueryCoverage=92%, HitCoverage=58%, E-value=7e-85, Identity=50%"; Hit description =Nicotianamine aminotransferase
  Pfam annotation: Domain name=Aminotran_1_2; Domain location=1-299; Score=78.0; E_value=3.5e-20; Accession=PF00155.13; Description =Aminotransferase class I and II
DVFMTAGGTGAITAIATVLGGAPGANILLPRPGFAPYEAACEIAGAKPRFYDLLPRRGWEADLAMVRALADGSTAAIVVINPNNPCGAVYSAHHLLQITETARDLGIPVIADEVYAHMVFGGSKFVPMASFAHIAPVISIGALSKRFMLPGWRLGWLAFCDPNGALKHVRTATEMLLNVTSGPASIVQAAVPEILSNEHHEFHQNVVHLLESAADTLYRRVNQIEALQCYSKPEGSMFMMVEINTSILHGVADDMDFARELIKEECVLVLPGSVIGLKNWVRIFFGAPVSLILEACDRIELFCRTRTIKQND

SEQ ID NO: 83428 - protein, 163 aa, Setaria italica
  Transcript Sequence Number=SeqID_17454
  Gene Ontology: Mol. function=nucleic acid binding; Biological process= DNA integration
  Homolog annotation: Hit_ID=Q8H7T1; Match level="QueryCoverage=99%, HitCoverage=7%, E-value=6e-45, Identity=56%"; Hit description =Putative Zea mays retrotransposon Opie-2
AGRGLENTWLIDSGCSRHMTGDHRWFSSLTPVMTKEYITFGDNSKGKVLSEGVIKVSENFMLKRVALVDSLGFNLLSVSQLLDDGFEVRFKQGTSRILDSRGDLVCMIVPEGQVFRVDFSKSFGLSRCLVAGSSSELWKWHRRLGHLSFDLLSRLSTLDLIRG

SEQ ID NO: 83429 - protein, 277 aa, Setaria italica
  Transcript Sequence Number=SeqID_17455
  Gene Ontology: Mol. function=transcription regulator activity; Cellular component=nucleus; Biological process=regulation of transcription
  Homolog annotation: Hit_ID=Q7F1Y1; Match level="QueryCoverage=69%, HitCoverage=90%, E-value=4e-44, Identity=47%"; Hit description =B1065G12.3 protein
  Pfam annotation: Domain name=HLH; Domain location=205-253; Score =40.6; E_value=6.2e-09; Accession=PF00010.18; Description=Helix-loop -helix DNA-binding domain
RYGGHGEISLGHGQGMHHHRYHQFGVEGKQLDGGPAAAPLPRRSSSPPGFFSSPVVDNGFPSARAGVGVGGDVHHATSSYHKKMKSPMNLAGQGTLSHISEDGIPDLTNNVYGSGHSEENITTNSVARSSNGFSIGTWEDSNSIVFSNPASNAGIHNNDDIIASLSNYELQFGATKETSGMDKYLQMQQDQVPFRVRAKRGCATHPRSIAERERRTRISEKLRKLQALVPNMDKQTSTADMLDLAVDHIRGLQSELQALKQDKEQCTCRGNHHPSGR

SEQ ID NO: 83430 - protein, 77 aa, Setaria italica
  Transcript Sequence Number=SeqID_17456
LRLHRSRKELFLYMIFCNYIKIAFSSIGQLDNVTNHSGEETILELSCIENGRQQALNAKFGTKLYMGTLRTRPNKVY

SEQ ID NO: 83431 - protein, 126 aa, Setaria italica
  Transcript Sequence Number=SeqID_17457
  Gene Ontology: Mol. function=calcium-dependent phospholipid binding; Cellular component=cytoplasm
  Homolog annotation: Hit_ID=Q8H5B8; Match level="QueryCoverage=100%, HitCoverage=41%, E-value=1e-44, Identity=69%"; Hit description =Annexin-like protein
  Pfam annotation: Domain name=Annexin; Domain location=1-46; Score =8.7; E_value=0.0023; Accession=PF00191.12; Description=Annexin
  Pfam annotation: Domain name=Annexin; Domain location=56-121; Score =68.7; E_value=2.2e-17; Accession=PF00191.12; Description=Annexin
  Pfam module annotation: Pfam domain module=Annexin::Annexin; Domain location=1-46::56-121
IRIVSTRSKRQLRATFQRYERDHGADIDEDIAKHSSSQFSKILRSAIWCLTSPEKHFAEAIRYSILGFGTDEDTLTRAIVSGADIGMEKIKEEYKVRFKTTVTSDIVGDTSGYYKDFLLTLVGSEE

SEQ ID NO: 83432 - protein, 72 aa, Setaria italica
  Transcript Sequence Number=SeqID_17458
MADWDGIPERERRQMEEILQLDMEELNVEVVDEDEEEEEEEQGAGNEEDDDVDAFLRANDGDGVASTSGPFT

SEQ ID NO: 83433 - protein, 61 aa, Setaria italica
  Transcript Sequence Number=SeqID_17459
GKICIEVSLQCALLFLTNIFPYSSGLKCMLLFLSIACTLIIAFYVFVWINRNCYATRILRT

SEQ ID NO: 83434 - protein, 112 aa, Setaria italica
  Transcript Sequence Number=SeqID_17460
  Pfam annotation: Domain name=LRRNT_2; Domain location=50-90; Score =50.4; E_value=7.1e-12; Accession=PF08263.4; Description=Leucine rich repeat N-terminal domain
  Subcellular localization annotation: CTP_CleavageSite=66; ConfidenceScore=5.42e-01
MPLRISVPPSQAEPPGASSSSTKLLRDKMRLVFWPWISLFFTFVASSWSLSSDGQALLALSKNLILPSSVSSSWSASDATPCTWNGVSCNKRNRVVSLDLSSSKVSGSLGPE

SEQ ID NO: 83435 - protein, 149 aa, Setaria italica
  misc_feature (133)..(133): Xaa can be any naturally occurring amino acid
  Transcript Sequence Number=SeqID_17461
  Homolog annotation: Hit_ID=B9SRQ3; Match level="QueryCoverage=77%, HitCoverage=8%, E-value=1e-46, Identity=68%"; Hit description =Protein binding protein, putative
PKTTSTNLESMPMATQSSSEALKEEELLDVMLLLYHLGISPNFRQAFYFMSQQSQSIYLLEETDRQIREKSCAEQVRRLKEARNSYHEDLVDCVRHCVWYRATLFSPWKQRGMYATCMWVVELLLVLSDSKTXFQYVPEFYVESLVDCF

SEQ ID NO: 83436 - protein, 89 aa, Setaria italica
  Transcript Sequence Number=SeqID_17462
  Gene Ontology: Mol. function=isomerase activity; Biological process =protein folding
  Homolog annotation: Hit_ID=B6U100; Match level="QueryCoverage=100%, HitCoverage=13%, E-value=3e-38, Identity=87%"; Hit description =Peptidyl-prolyl isomerase
  Pfam annotation: Domain name=FKBP_C; Domain location=29-89; Score= -5.0; E_value=0.011; Accession=PF00254.20; Description=FKBP-type peptidyl-prolyl cis-trans isomer
QFDVELLSWVNIKDICKDGGILKKVLSEGEKWENPKDPDEVFVKYEARLEDGTVVSKSDGVEFTVKDGLFCPAISKAVKTMKKNEKAFL

SEQ ID NO: 83437 - protein, 131 aa, Setaria italica
  Transcript Sequence Number=SeqID_17463
  Gene Ontology: Mol. function=transferase activity, transferring groups other than amino-acyl groups
  Homolog annotation: Hit_ID=Q5VP59; Match level="QueryCoverage=66%, HitCoverage=17%, E-value=2e-13, Identity=50%"; Hit description =Putative anthocyanin 5-aromatic acyltransferase
PEIEAAQLPAPLLAVQATRPAGEDGHGRAVVVGVSMLHAVADGHAVWQFMKAWSTAAREGSLAAAGLPPPTFDRAGVRHPKADELAATVTCVFAPALPLLRPRSSPSALDVTQQSRRTFVLSAGEIQSLKQ

SEQ ID NO: 83438 - protein, 104 aa, Setaria italica
  misc_feature (63)..(63): Xaa can be any naturally occurring amino acid
  Transcript Sequence Number=SeqID_17464
  Gene Ontology: Mol. function=hydrolase activity, hydrolyzing O -glycosyl compounds; Biological process=carbohydrate metabolic process
  Homolog annotation: Hit_ID=B6SKX7; Match level="QueryCoverage=90%, HitCoverage=25%, E-value=2e-32, Identity=54%"; Hit description=Beta -glucosidase
MSSVVFVSGSYQYMLGAYPPSHCSAPFGTCNSGDSQREPYAAAHNIIMSHAAAVRNYKENYQXFLDPIFFGDYPSHMREILRSNLPTFTSEEKKLLQYKSDFIG

SEQ ID NO: 83439 - protein, 82 aa, Setaria italica
  Transcript Sequence Number=SeqID_17465
  Gene Ontology: Mol. function=hydrolase activity, hydrolyzing O -glycosyl compounds; Biological process=carbohydrate metabolic process
  Homolog annotation: Hit_ID=B6SKX7; Match level="QueryCoverage=92%, HitCoverage=14%, E-value=7e-26, Identity=72%"; Hit description=Beta -glucosidase
TLQTALGGFYVVPQAVEPAIMYVNQRYKDTPVYVSENGYSQWSDVGREELINDVERLNYLQGYVTHLSRAIRNGADVVGGTF

SEQ ID NO: 83440 - protein, 518 aa, Setaria italica
  Transcript Sequence Number=SeqID_17466
  Gene Ontology: Mol. function=hydrolase activity, hydrolyzing O -glycosyl compounds; Biological process=carbohydrate metabolic process
  Homolog annotation: Hit_ID=B6SKX7; Match level="QueryCoverage=94%, HitCoverage=94%, E-value=0.0, Identity=78%"; Hit description=Beta -glucosidase
  Pfam annotation: Domain name=Glyco_hydro_1; Domain location=29-503; Score=623.9; E_value=1.6e-184; Accession=PF00232.10; Description =Glycosyl hydrolase family 1
MAAARGIAAVAAALMVVVAALAPAARGVDRSEFPPEFLFGAATSAYQIEGAYLEDGKSLCNWDVFTHTHVGIKDGRNGDVADDHYHRYMGDVEILQSLGVNAYRFSISWARILPRGRLGGVNPDGIAFYNRLIDALLQKGIQPFVTLHHFDMPHELEVRHVGWLGAGIREEFEHYADVCFRAFGDRVRFWTTFNEPNLFTKFQYMLGAYPPSHCSAPFGTCNSGDSQREPYAAAHNIIMSHAAAVRNYKENYQAKQGGSIGIVIAMKWYEPLTNTTEDILAARRAQSFELEWFLDPIFFGDYPSHMREILRSNLPTFTSEEKKLLQYKSDFIGLNLYTAIYAKDCIHSPCDLSTYEGNALVFATGERDGVMIGGDTALGGFYVVPQAVEPAIMYVNQRYKDTPVYVSENGYSQWSDVGREELINDVERLNYLQGYVTHLSRAIRNGADVRGYFVWTLMDNFEWTFGYTVRFGLYHVDFDTPERTRTPRMSARWYRSFLTGSSAGALTDEAQQGRRADS

SEQ ID NO: 83441 - protein, 59 aa, Setaria italica
  Transcript Sequence Number=SeqID_17467
WFAIKQGLFIGLVSSFNLAWFAINNPCFIANQARLNEETKLKRSRRDEGTGPSDMSACM

SEQ ID NO: 83442 - protein, 48 aa, Setaria italica
  Transcript Sequence Number=SeqID_17468
SLDFSNIFAGMLLKHDFTLCHAVKDHRFNVFLRPTKKKKKQKRGTNHR

SEQ ID NO: 83443 - protein, 130 aa, Setaria italica
  Transcript Sequence Number=SeqID_17469
  Homolog annotation: Hit_ID=B7XB92; Match level="QueryCoverage=53%, HitCoverage=53%, E-value=2e-26, Identity=81%"; Hit description =Chloroplast protein 12
  Pfam annotation: Domain name=CP12; Domain location=61-130; Score =149.1; E_value=1.4e-41; Accession=PF02672.7; Description=CP12 domain
  Subcellular localization annotation: CTP_CleavageSite=48; ConfidenceScore=5.68e-01
MASAVTAMAAIASFPAPRSLQQAPAPLQLRQNAVSFVARPVRAHRRLVAVAASSPATPPDLSNKVSESIKHAQEACADDPVSGECAAAWDEVEELSAAASHARDRQKGADPLEEYCKENPETDECRTYED

SEQ ID NO: 83444 - protein, 88 aa, Setaria italica
  Transcript Sequence Number=SeqID_17470
INIQMGRKTGGIKQAMVIRTTIAIVLVLLGLLHAFPRSTASHSSLGASSRVPCAGADGYVHSCGWLEELFRVKFVPCLLFDLSTEENY

SEQ ID NO: 83445 - protein, 845 aa, Setaria italica
  Transcript Sequence Number=SeqID_17471
  Gene Ontology: Mol. function=heat shock protein binding; Cellular component=plasma membrane
  Homolog annotation: Hit_ID=B9SF05; Match level="QueryCoverage=94%, HitCoverage=89%, E-value=7e-76, Identity=45%"; Hit description =Auxilin, putative
  Pfam annotation: Domain name=TolA; Domain location=362-706; Score= -93.4; E_value=0.00025; Accession=PF06519.3; Description=TolA protein
APPPPTTKPAPSPSPSFDSIFDSYKEPSSAAPPPPKPKHSSMPVYDKPVYDDDIFDGVPGVKSSSARYEDVFGGTQSHAPPPAFDDLLGGFGKKSQGREEVEEKRKPKPAAASAGFDDLIPGFGGRSSPRQRETVGAKEKKVSMSTSKPAASMASDPFVVLETTSSSAHPFTDPLDELAKPAKYQGKSHEGTSADSSLFEDPSTFNQASKSEPLFTSEVNNVSKDRNDSSRARNSNPVQSFPKRNSAQQPSVEDFENIFPKSQSARYSDVHVDIGSEKYSGNGINDQSPRSDESEDEIWLTVSEIPLFTQPTSAPPPSRPPPPLAIKQKHGSKSKRKDGDNLRRSRKNYDHQRSSSNQAGVSSVDELEDFAMGRSQNAHAFNEEEFERSTAAAASAAAMKEAMDKAEAKFKHAKEVRERERDAKLRNREHQEQDTEPRSYAQDREDKERKERLEQEREMRQKEEKEREQRRLEEEREHERQRERERARQAVERATKEARERAATEARAKAEREARQRAERVAVQRAQQEARERAAVEAKERAERATAEAKERAAAEAKEKATSQARDRAAAERAAVERAQQEARKRAERAAVERAAAEARERQAAEARERQAAATAAAAAREKQSKPDDLESFFGMGARANSAPKQRAPTVDSMFDTQTQNRGTSTSASMKKASSTTNIADDLSAIFGGAPTSSDEFQEIDGESEERRRARLERHQRTRERAAKALAEKNERDMQQQREQAERHRIAETLDFEIKRWAAGKEGNLRALLSTLQYVLWPECGWQPVSLTDLITAAAVKKVYRKATLCIHPDKVQQKGANLQQKYIAEKVFDLLKEAWNKFNSEELF

SEQ ID NO: 83446 - protein, 535 aa, Setaria italica
  misc_feature (29)..(29): Xaa can be any naturally occurring amino acid
  Transcript Sequence Number=SeqID_17472
  Pfam annotation: Domain name=DEK_C; Domain location=187-240; Score =74.7; E_value=3.3e-19; Accession=PF08766.3; Description=DEK C terminal domain
LCCSFLMEFVKGHCSGIDGTNSDKKIKKXRRTKEEESLSGGKPSKKKKREGEEEADGRNGVEDREKYFDCDLMDNRYICADNKKGKFPKERTNLEPAERINGCVSEDLDGVSLSEVPNPTDEAMITTPSKKSVKIADGDSTDMKAFKKTSSITKKKATPKEDCKVKSCGKQESKGDTKPRKLTMKPSKDELREAVFLILDTADFATMTFGDVVKEVDKYFGKDLFERKPLIRSLIEEELFRLTEEAEKKELEEEEVAEAKARAEQAAKETAQVRTVESGIDKRNALQAGSDGKTKDSSKDTNDSPNEKGINGGASVKSAVKRNNSNAAEGSQDHKANADTQNEDIHDELTKDGEGEQAAPIVNGDSAIQGSSDDEAETMKNSNAQALEGSKNDNVKGASNGENNVTEDCRNEEGRGQNVGSNAETGNGCEAEEFNNRGNDGCAEHTDGKAQEANHNENSANVEIHGDKDGKVKEGYISAEQSQADAGGNGKAEDADHNANAKVDVDSVKNGAAENGRTDGDVKGNSDSAVEESPV

SEQ ID NO: 83447 - protein, 91 aa, Setaria italica
  Transcript Sequence Number=SeqID_17473
  Gene Ontology: Mol. function=hydrolase activity, acting on acid anhydrides, catalyzing transmembrane movement of substances; Cellular component=proton-transporting ATP synthase complex, coupling factor F(o); Biological ...
  Gene Ontology: Cellular component=process=ATP synthesis coupled proton transport
  Homolog annotation: Hit_ID=P35013; Match level="QueryCoverage=48%, HitCoverage=53%, E-value=3e-16, Identity=95%"; Hit description=ATP synthase subunit c, chloroplastic
  Pfam annotation: Domain name=ATP-synt_C; Domain location=8-77; Score =108.9; E_value=1.8e-29; Accession=PF00137.13; Description=ATP synthase subunit C
MNPLIAAASVIAAGLAVGLASIGPGVGQGTAAGQAVEGIARQPEAEGKIRGTLLLSLAFMEALTIYGLVVALALLFANPFVNPKKEKSPLD

SEQ ID NO: 83448 - protein, 97 aa, Setaria italica
  Transcript Sequence Number=SeqID_17474
  Gene Ontology: Mol. function=catalytic activity; Cellular component =membrane
  Homolog annotation: Hit_ID=UPI000186DE03; Match level="QueryCoverage =86%, HitCoverage=42%, E-value=6e-10, Identity=35%"; Hit description =presqualene diphosphate phosphatase, putative
  Pfam annotation: Domain name=PAP2; Domain location=2-90; Score=21.4; E_value=0.0001; Accession=PF01569.13; Description=PAP2 superfamily
  Subcellular localization annotation: CTP_CleavageSite=26; ConfidenceScore=5.20e-01
PAYNAKDMYVAVAADHWSFPSGHSSRAFLVAAFLAAGGFQPREALFLWAAATSASRVLLGRHYVLDIVAGALLGVFEAWLSNLLLRFMCAQSTFLVC

SEQ ID NO: 83449 - protein, 79 aa, Setaria italica
  Transcript Sequence Number=SeqID_17475
MLEDFFTLTEMKDGISTAARIAELISEIQKLKDAAEINTADMIRQCSTAANTLASTKNEECLQHFVQLNGVGFLNHWLQ

SEQ ID NO: 83450 - protein, 61 aa, Setaria italica
  Transcript Sequence Number=SeqID_17476
DAISKFKSQEQSSQENHSSLLQQETEKLHGDIDKMRSELQGDGGTTARWLRSDPESIATAI

SEQ ID NO: 83451 - protein, 167 aa, Setaria italica
  Transcript Sequence Number=SeqID_17477
  Gene Ontology: Mol. function=protein binding; Cellular component =plasma membrane
  Homolog annotation: Hit_ID=Q5KFC6; Match level="QueryCoverage=99%, HitCoverage=76%, E-value=4e-24, Identity=33%"; Hit description =Mitochondrion protein, putative
  Pfam annotation: Domain name=DUF1640; Domain location=1-166; Score =259.9; E_value=5.9e-75; Accession=PF07798.3; Description=Protein of unknown function (DUF1640)
LESQGVPTKQAEAITSAITEVLNDSLESISESFVSKAEMQKSEMLQESNISKFKSQVQSSQENHFSLLQRETEKLRGDIDKMRSELKYEIDKVTAGQRLDLNLERGRIRDELAKQNEETTELTTKLDKEIHSLKAQLEAAKYDVIKYCIGTIVSISAVGLAVLRIVM

SEQ ID NO: 83452 - protein, 105 aa, Setaria italica
  Transcript Sequence Number=SeqID_17478
  Gene Ontology: Mol. function=oxidoreductase activity
  Homolog annotation: Hit_ID=B9S8J4; Match level="QueryCoverage=85%, HitCoverage=32%, E-value=1e-19, Identity=58%"; Hit description=Short- chain dehydrogenase, putative
RAFFSPVRRAPSYSEKLSQLAEEIAQEAKAQVFALRVDCADARSVREAFEGVLSLGPVEVLVYNACEPPADDAAPPRPTPFLAVTPDAFHRSLAVSAAGAFHCAQ

SEQ ID NO: 83453 - protein, 372 aa, Setaria italica
  Transcript Sequence Number=SeqID_17479
  Gene Ontology: Mol. function=binding
  Homolog annotation: Hit_ID=UPI0001A7B3D0; Match level="QueryCoverage =99%, HitCoverage=21%, E-value=9e-62, Identity=37%"; Hit description =binding
CGDVILLPHTKLVKSLTTDRILREINLIRLESLLWNNDENINKITHTEFMKLLPPLLLSTKDVYVGNAYGPQRESENVISLELSALDVLISACEKAKPMNIQVYLDSHRRKIQVLTVAAGMVGSVTPPKGKGSSNMDFVEAMNRNRLENVVEAIKDVSRNASKAKDFIDQCDNSDGQDGWSSLVSIVGDIQSLLLTIMCAAVKIILSRKLSCSGTSYQVDQLESSCLIDAAIAFCKLQHLDPTISIKTQVNLIVALHDLLAEYGLCCSGKDGEGEEGTFLKFAIKHLMALDVKLKSQLNSNGIEEDAVPKNVGAQDSMVDEPSVNDSKQNSEDEEDSELDEIQSCLDSALDQAFFCLYGLKINPDSCSEDDL

SEQ ID NO: 83454 - protein, 419 aa, Setaria italica
  misc_feature (20)..(20): Xaa can be any naturally occurring amino acid
  Transcript Sequence Number=SeqID_17480
  Gene Ontology: Mol. function=binding; Cellular component=cytoplasmic membrane-bounded vesicle; Biological process=biological_process
  Homolog annotation: Hit_ID=Q6H7S8; Match level="QueryCoverage=97%, HitCoverage=15%, E-value=0.0, Identity=89%"; Hit description =Putative LvsC
  Pfam annotation: Domain name=Beach; Domain location=115-393; Score =614.6; E_value=9.9e-182; Accession=PF02138.10; Description =BeigeBEACH domain
LDGGRGNAAESSDTQIKNTXSNKIKHHRRWKITRIKAVHWTRYLLQYTATEIFFDDGNAPVFLNFSSQNDAKSVGSLLVSLRNDALFPKGTSRDKNSLISFVDRKVALEMAESARESWRRREISNFEYLMILNTLAGRSYNDLTQYPTFPWIIADYSSEKLDFNKSSTFRDLSKPVGALDAKRFKAFEDRYLNFVDPDIPSFYYGSHYSSMGIVLYYLLRLEPFTALHRNLQGGKFDHADRLFQSIESTYRNCLSNTSDVKELIPEFFYMPEFLENSNSYHLGIKQDGEPLGDVGLPPWAKGSPEEFIYINREALESEYVSSNLHNWIDLIFGYKQRGKPAVEAANIFYYLTYEGAVDLENMDDMLQKSAIEDQIANFGQTPIQIFRKKHPRRGPPIPIAHPLYFAPQSITVTSVVPTL

SEQ ID NO: 83455 - protein, 66 aa, Setaria italica
  Transcript Sequence Number=SeqID_17481
  Gene Ontology: Mol. function=nucleic acid binding
  Homolog annotation: Hit_ID=B6TRN6; Match level="QueryCoverage=98%, HitCoverage=34%, E-value=5e-26, Identity=87%"; Hit description=RNA recognition motif-containing protein
  Subcellular localization annotation: CTP_CleavageSite=54; ConfidenceScore=5.34e-01
VVNGRIAGYGISPNHSYDSHSQAPSSGLPSRGLSNGTYEYSRRVFGSVMNDVSRRATREPVPYPSY

SEQ ID NO: 83456 - protein, 82 aa, Setaria italica
  Transcript Sequence Number=SeqID_17482
  Gene Ontology: Mol. function=nucleic acid binding
  Homolog annotation: Hit_ID=B6TRN6; Match level="QueryCoverage=97%, HitCoverage=40%, E-value=6e-25, Identity=76%"; Hit description=RNA recognition motif-containing protein
  Subcellular localization annotation: CTP_CleavageSite=42; ConfidenceScore=5.51e-01
QISGQDKVDKPSSNGNMPVTPRLNPIPAPKPPQLMRSSDTPSSQHTVVNGRIAGYGISPNHSYDSHSQAPSSGLPSRGLSNE

SEQ ID NO: 83457 - protein, 642 aa, Setaria italica
  Transcript Sequence Number=SeqID_17483
  Gene Ontology: Mol. function=protein serine/threonine kinase activity; Cellular component=ubiquitin ligase complex; Biological process=protein amino acid phosphorylation
  Homolog annotation: Hit_ID=Q652N9; Match level="QueryCoverage=53%, HitCoverage=85%, E-value=1e-172, Identity=83%"; Hit description =Putative serine/threonine protein kinase
  Pfam annotation: Domain name=Pkinase; Domain location=342-602; Score =126.7; E_value=7.5e-35; Accession=PF00069.17; Description=Protein kinase domain
  Pfam annotation: Domain name=Pkinase_Tyr; Domain location=342-604; Score=51.7; E_value=3.7e-17; Accession=PF07714.9; Description =Protein tyrosine kinase
  Pfam module annotation: Pfam domain module=Pkinase::Pkinase_Tyr; Domain location=342-602::342-604
GARVPAAQVEEQELAAYKEMELQRVNDSLDQYLHLCAQGKIHAEKLVVESDDVAQGLVELISEHHVTTLVMGAAADKHYTKKMKTLKSRKARFVEQQAHPLCKVWFICKGTLIYRRYCWKAVQLSHEEMQECRQSSGVRHYSVEKSASLSEMWCVANTWLCKSIGEPQIERTKSDPLYISGKDNIEESCEPYYNFQNILRELENARQEAYEEKCRHVKAERELFEALQKAQASENSYFREMKQKNELEEKLTTIMEEFESLTVRVDELCAELQGEREQRMVLEKRGEHADRIIKDLMLQRDKALRETETLRARKGESTATEEGMMHITEFPYSEIKEATNDFDHSMKIGESVYGSVYKGFLRHTNVAIKKLNPETTQTQSQFSQEVEILSRVRHPNLVTLIGACKDAQALVYEYMPNGSLDDRLACKDNSKPLSWQLRTRIASNICSALIFLHSNKPHSIVHSDLKASNILLDGNNVAKLSGFGVSQILTDQFKATTTLYRHTHPKGSFVYIDPEYLISGDLTPLSDVYSFGIVLLRLLTGRSGFGLLKEVQQAMEKGCLQAILDSSAGEWPAMYAEQLAGLGLRCCKIRRKNRPDLQTEVWTVLEPMYRSASVMLCSLSFKSVSEDLGGVPSYFICPILQD

SEQ ID NO: 83458 - protein, 206 aa, Setaria italica
  misc_feature (8)..(8): Xaa can be any naturally occurring amino acid
  Transcript Sequence Number=SeqID_17484
  Gene Ontology: Mol. function=oxidoreductase activity; Cellular component=cytoplasm; Biological process=cell redox homeostasis
  Homolog annotation: Hit_ID=Q7XPE8; Match level="QueryCoverage=93%, HitCoverage=74%, E-value=2e-69, Identity=48%"; Hit description =OSJNBa0060N03.13 protein
  Pfam annotation: Domain name=AhpC-TSA; Domain location=4-114; Score= -2.5; E_value=0.0013; Accession=PF00578.13; Description=AhpCTSA family
  Pfam annotation: Domain name=C1_2; Domain location=171-198; Score =25.0; E_value=0.00032; Accession=PF03107.8; Description=C1 domain
  Pfam annotation: Domain name=C1_3; Domain location=170-198; Score =26.8; E_value=8.9e-05; Accession=PF07649.4; Description=C1-like domain
  Pfam annotation: Domain name=Redoxin; Domain location=2-146; Score= -15.0; E_value=0.062; Accession=PF08534.2; Description=Redoxin
  Pfam module annotation: Pfam domain module=AhpC-TSA::C1_2::C1 _3::Redoxin; Domain location=4-114::171-198::170-198::2-146
YVVSAYGXKVSIADLTGKTVGLYFGAHWCPPCRAFTKQLMEVYNELKILRPRSFEVIFISIDRSKEEFEESLSATPWLAIPYSDTARQELTRIFAIKGIPALLILGLDGKVLKTDGRTAISTYGATAFPFTESRVSEVNEALRKEGDKLPRRVNNPRHRHELELDMAKAYVCDECQQKGRYWVFSCKPCNFDLHPSCVGASNAESI

SEQ ID NO: 83459 - protein, 219 aa, Setaria italica
  misc_feature (159)..(159): Xaa can be any naturally occurring amino acid
  Transcript Sequence Number=SeqID_17485
  Gene Ontology: Cellular component=protein complex; Biological process= protein polymerization
  Homolog annotation: Hit_ID=Q9SSG9; Match level="QueryCoverage=93%, HitCoverage=28%, E-value=9e-34, Identity=38%"; Hit description =F25A4.3
DHIMAMELLSAVKSAGNLAASIFLKPFCFEGQRRQVEAADLIGKLRTCSNFHIVIEADSLLETEVETLAEALESANNAVLSTISMISIMMSGYNKMFWSSLNAQIKEVDPEEVAKLLRSYGEARVGFGAGYNIQSAIKQAVFHCPFLRGGIKDLNNVVXFLSLTTARVLSESDMISILHIFRRVTGFSKDIIFSRNSEPDLEPKLIVVSLLTIRTTYCT

SEQ ID NO: 83460 - protein, 67 aa, Setaria italica
  Transcript Sequence Number=SeqID_17486
WYLQIWDLTLICQVLIVVGKALRMWSSALKLLALVGPMVLSSSTVWSWLCIIWVLLPLLGHMQTCFC

SEQ ID NO: 83461 - protein, 542 aa, Setaria italica
  misc_feature (12)..(12): Xaa can be any naturally occurring amino acid
  Transcript Sequence Number=SeqID_17487
  Gene Ontology: Cellular component=nucleus; Biological process =regulation of transcription, DNA-dependent
  Homolog annotation: Hit_ID=Q339D4; Match level="QueryCoverage=100%, HitCoverage=100%, E-value=0.0, Identity=80%"; Hit description=Chitin- inducible gibberellin-responsive protein 2, putative, expressed
  Pfam annotation: Domain name=GRAS; Domain location=172-542; Score =621.1; E_value=1.1e-183; Accession=PF03514.6; Description=GRAS family transcription factor
MSARASNHPYKXTNDSQMPYYSDSAPVGENGRFHAMQNNLDHHYSSPDDGSQRINSSNTQVFEAQYCTLESSSANGIYPAQSSTSSHSISPLSGSPLSQHDGHSDHTYSSPPSASCLTEVADLQIKLKELENVILGPELDITSDSPESFLQANVQLRPDNWRQLLGIDAGDLKQVIIACGKAVAENDVFATELLISELGQLVSVSGDPMQRLGAYMLEGIVARLSSSGSMLYKSLKCKEPTGSELMSYMHLLYEICPFYKFGYMSANGAIAEAIKGENFVHIIDFQIAQGSQWITLIQALAARPGGPPYIRITGIDDSNSAYARGGGLDIVGRRLHSVAQSCGLPFEFNAVPAASHEVQLEHLAVRPGEIIVVNFAYQLHHVPDESVSIENHRDRIIRMIKSINPRVVTLVEQESNTNTAPFFPRYMETLNYYTAMFESIDVALPRDDRRRMSAEQHCVARDIVNLIACEGPERVERHELFGKWKARFAMAGFRPYPLSSVVNNTINTLLRSYNSCYSLEERDGVLYLGWKNRVLVVSSAWC

SEQ ID NO: 83462 - protein, 419 aa, Setaria italica
  misc_feature (17)..(17): Xaa can be any naturally occurring amino acid
  misc_feature (234)..(234): Xaa can be any naturally occurring amino acid
  Transcript Sequence Number=SeqID_17488
  Gene Ontology: Mol. function=protein serine/threonine kinase activity; Cellular component=ubiquitin ligase complex; Biological process=protein amino acid phosphorylation
  Homolog annotation: Hit_ID=Q2HTK4; Match level="QueryCoverage=96%, HitCoverage=46%, E-value=1e-133, Identity=59%"; Hit description =Protein kinase; U box
  Pfam annotation: Domain name=Pkinase; Domain location=59-320; Score =124.8; E_value=2.8e-34; Accession=PF00069.17; Description=Protein kinase domain
  Pfam annotation: Domain name=Pkinase_Tyr; Domain location=59-321; Score=71.8; E_value=1.7e-18; Accession=PF07714.9; Description =Protein tyrosine kinase
  Pfam annotation: Domain name=U-box; Domain location=345-418; Score =77.7; E_value=4.3e-20; Accession=PF04564.7; Description=U-box domain
  Pfam module annotation: Pfam domain module=Pkinase::Pkinase_Tyr::U -box; Domain location=59-320::59-321::345-418
RGQYERLLSEHDHLLHXRDHAVREVQELRQKRGQMLSVLVTSMHCEFSSSELECATENFSSSLKIGEGGFGCVYRGILRNMTVAIKVLKHDNLQGQSQFEQEVAILSRVRHPYLVTLLGACSESSTLVYEFLPNGSLEDFLVCAEKRRTLPWQTRIRIIAEICSALTFLHKNKPHPVVHGDLKPANILLDVNLVSKLSDFGISRHLLQSSTNNTTMYRTMHPMGTLQYMDPEFXATGELTCQSDVYSFGIVVLRLLTGKPPDGIKKIVENAMLKGDLNSVVDTSAGEWPDVYAQQLAHLALSCTEPSRKCRPDLSVVVWGVVEAMRDASTIPSASSSRSVSDENGVPSYFICPIFQDVMNDPHIAADGFTYEAEAIRSWLEGHDTSPMTNMRLEHEELIPNRALRSAIQEWLQQQNMTL

SEQ ID NO: 83463 - protein, 224 aa, Setaria italica
  misc_feature (69)..(69): Xaa can be any naturally occurring amino acid
  Transcript Sequence Number=SeqID_17489
  Gene Ontology: Mol. function=DNA-directed RNA polymerase activity; Biological process=metabolic process
  Homolog annotation: Hit_ID=Q2QYS5; Match level="QueryCoverage=72%, HitCoverage=36%, E-value=7e-31, Identity=46%"; Hit description=DNA -directed RNA polymerase
MRHVSRFLHGSPNMASISGVKGEELCCEDEECWAAEVPGYPMDDVDPMDILPNSSHRDGSIYSGTPSCXRDYRIADRNETRQEAMAFSDPQDCDNINGTCWLHSTRHMLQIFSFKLANIPVKRGPVELYGYIAARDTLDPLLNYVINFSRDDPIIVEQGSLINMSGPKRGIQLVDTTLIEYDMKIKTGGHESEDLQLIDGVSLVDDMDTWNCSPFTWRIVYWLV

SEQ ID NO: 83464 - protein, 132 aa, Setaria italica
  Transcript Sequence Number=SeqID_17490
IGFPEPDAVKLVAAVSLFLPPLSLAGPLGRQAGLTRGVGCGERWIHNPRAPVKLTPSPHHTARRRRALSCEKRPPIEMVQMRILLRSILGALRRSNVATSPVSAHRLVSSSRPLLSFTESGTPRLWPSALER

SEQ ID NO: 83465 - protein, 235 aa, Setaria italica
  misc_feature (16)..(16): Xaa can be any naturally occurring amino acid
  Transcript Sequence Number=SeqID_17491
  Gene Ontology: Mol. function=catalytic activity; Biological process =metabolic process
  Homolog annotation: Hit_ID=Q7XV34; Match level="QueryCoverage=57%, HitCoverage=37%, E-value=5e-38, Identity=60%"; Hit description =OSJNBa0086B14.25 protein
MLQIFSFKLANIPVSXGPVELYGYIAARDTLDPLLNYVINFSRDDPIIVEQGSLINMSGPKRGIQLVDTTLIEYDMKIKTGGHESEDLQLIDGVSLVDDMDTWNCSPFTWRMHGGCGAIDITASRLNFAVEATVEVAISQVQSDFSMCLSCFTSGLHEEIRLFDGAIAESCGLKRSVIAVVMGAQMDLKFKVASVLCIPGEHCCSFKATKHGRATQEIKTDFALITVKVTWSTLD

SEQ ID NO: 83466 - protein, 203 aa, Setaria italica
  misc_feature (84)..(84): Xaa can be any naturally occurring amino acid
  Transcript Sequence Number=SeqID_17492
  Gene Ontology: Mol. function=DNA-directed RNA polymerase activity; Biological process=metabolic process
  Homolog annotation: Hit_ID=Q2QYS5; Match level="QueryCoverage=69%, HitCoverage=32%, E-value=4e-26, Identity=46%"; Hit description=DNA -directed RNA polymerase
MISCLRWMLKLIIYIYALCDRFLHGSPNMASISGVKGEELCCEDEECWAAEVPGYPMDDVDPMDILPNSSHRDGSIYSGTPSCXRDYRIADRNETRQEAMAFSDPQDCDNINGTCWLHSTRHMLQIFSFKLANIPVKRGPVELYGYIAARDTLDPLLNYVINFSRDDPIIVEQGSLINMSGPKRGIQLVDTTLIEYDMKIKTG

SEQ ID NO: 83467 - protein, 143 aa, Setaria italica
  Transcript Sequence Number=SeqID_17493
  Subcellular localization annotation: CTP_CleavageSite=45; ConfidenceScore=5.83e-01
SPPAISAAAMFGTPSSSPLFGTPSSTLAFGTPSTTPAFGTPSSTPAFGATSSTPAFGTPSSTPAFGTPSSTPAFGTPSSTPAFGTASSSPAFGGLSAFGTPSSTSAFGAPSSTPAFGATPSPSPFGFQQQATPSPSPFGLLGG

SEQ ID NO: 83468 - protein, 80 aa, Setaria italica
  Transcript Sequence Number=SeqID_17494
  Gene Ontology: Mol. function=metalloendopeptidase activity; Biological process=proteolysis
  Homolog annotation: Hit_ID=B6UCS1; Match level="QueryCoverage=82%, HitCoverage=12%, E-value=1e-26, Identity=80%"; Hit description =Metalloendopeptidase
  Subcellular localization annotation: CTP_CleavageSite=62; ConfidenceScore=5.34e-01
MSSSPPSRAAARAYGCCHRLLLASTTVPATSGCAGRARSLTLALRCLPIAGHRLRSRRVACQAMTETEPEGNDDDEEKEV

SEQ ID NO: 83469 - protein, 156 aa, Setaria italica
  misc_feature (50)..(50): Xaa can be any naturally occurring amino acid
  Transcript Sequence Number=SeqID_17495
PSTGEIGAVSDTLQHACTIKQLIDESDDGLCAQLHEDYYADVSSPIKVNXPVSEQHSYTASASMDHNRHNWFPEGCQLHNSNLCGLESGDCLAQALPVGSSTDGALISAISQYKQPSAHMEHEAKNQVGLPKNVLPRTQEASPPFPDTCNCTQNMA

SEQ ID NO: 83470 - protein, 360 aa, Setaria italica
  misc_feature (178)..(178): Xaa can be any naturally occurring amino acid
  Transcript Sequence Number=SeqID_17496
  Gene Ontology: Mol. function=nucleic acid binding
  Homolog annotation: Hit_ID=B6U0B7; Match level="QueryCoverage=100%, HitCoverage=64%, E-value=1e-160, Identity=77%"; Hit description =Calmodulin binding protein
QHWLEAIDPRHRYGHNLHIYYDVWSKSESTEPFFYWLDIGEGKEVNLEKCPRSKLQSQCIKYLGPKERQEYEVVVESGKLVYKKNGAFVQTLDDSKWIFVLSTTKALYVGQKKKGSFQHSSFLAGGAITSAGRLVVKEGILKAIWPYSGHYLPTEENFREFIRYLEENGVDLTDVKEXPIDKDDEYPLLSKPDAQPNATVSDDTNGTDHATAAAAADEQMSESEVVDGDVRRTTDDGNMSEAEEDDADIHSHTDTEQEAHSSEQPPANGDASEHGKNHLMCRWSTGTGPRIRCVRDYPQDLQSRALEHVNLSPRLSGSPSRKRDPVPSPRPSPAMILSPRLASVGFQPQTTVSLTLPDFK

SEQ ID NO: 83471 - protein, 123 aa, Setaria italica
  Transcript Sequence Number=SeqID_17497
  Gene Ontology: Mol. function=electron carrier activity; Biological process=oxidation reduction
  Homolog annotation: Hit_ID=Q5ZE54; Match level="QueryCoverage=89%, HitCoverage=20%, E-value=2e-16, Identity=42%"; Hit description =Cytochrome P450-like
MAIDALLELFYVLGALVALWLTWRSLEWAWLSPRRLGRALRAQGLRGTAYRFPSGDLAEEARLLAAERTKPMPLLSHGISSRVDPLVYNTVKEHGKVSMLWGGPTPRVILSDPKLVREVLSNK

SEQ ID NO: 83472 - protein, 478 aa, Setaria italica
  Transcript Sequence Number=SeqID_17498
  Gene Ontology: Mol. function=translation elongation factor activity; Cellular component=plasma membrane; Biological process=nuclear mRNA splicing, via spliceosome
  Homolog annotation: Hit_ID=Q9LNC5; Match level="QueryCoverage=100%, HitCoverage=48%, E-value=0.0, Identity=86%"; Hit description =Elongation factor like protein
  Pfam annotation: Domain name=EFG_C; Domain location=332-421; Score =111.3; E_value=3.3e-30; Accession=PF00679.16; Description=Elongation factor G C-terminus
  Pfam annotation: Domain name=EFG_IV; Domain location=209-330; Score =101.9; E_value=2.2e-27; Accession=PF03764.10; Description=Elongation factor G, domain IV
  Pfam annotation: Domain name=GTP_EFTU_D2; Domain location=1-72; Score= 31.4; E_value=3.7e-06; Accession=PF03144.17; Description=Elongation factor Tu domain 2
  Pfam module annotation: Pfam domain module=EFG_C::EFG_IV::GTP_EFTU _D2; Domain location=332-421::209-330::1-72
RVYSGTIQTGQTVRVLGEGYSPDDEEDMTVKEVTKLWVYQARYRVAISKAPAGSWVLIEGVDASIMKTATICPMNIDEDVYIFRPLRFNTLPVVKIAAEPLNPSELPKMVEGLRKISKSYPLAITKVEESGEHTILGTGELYLDSIMKDLRELYSEVEVKVADPVVTFCETVVDTSSMKCFAETPNKRNKITMVAEPLEKGLAEDIENGLVNLDSRQKEITDFFRQRYQWDVLAARSIWAFGPDKQGPNILLDDTLSVEVDKNLLNAIKDSIVQGFQWGAREGPLCDEPIRNVKFKILHANIAPEPLHRGGGQIIPTARRVVYSAFLMANPRLMEPVYYVEIQTPIDCVSAIYTVLSRRRGHVTADVPKPGTPIYIVKAFLPVIESFGFETDLRYHTQGQAFCVSVFDHWAIVPGDPLDKSIVLRPLEPAPIQHLAREFMVKTRRRKGMSEDVSISKFFDEAMMHELAQQAADLHIQM

SEQ ID NO: 83473 - protein, 181 aa, Setaria italica
  misc_feature (24)..(24): Xaa can be any naturally occurring amino acid
  Transcript Sequence Number=SeqID_17499
  Gene Ontology: Mol. function=DNA binding; Cellular component=nucleus; Biological process=regulation of transcription, DNA-dependent
  Homolog annotation: Hit_ID=Q6H976; Match level="QueryCoverage=76%, HitCoverage=14%, E-value=2e-39, Identity=61%"; Hit description =STYLOSA protein
  Pfam annotation: Domain name=SSDP; Domain location=2-181; Score= -38.4; E_value=6.1e-06; Accession=PF04503.5; Description=Single -stranded DNA binding protein, SSDP
  Subcellular localization annotation: CTP_CleavageSite=75; ConfidenceScore=5.16e-01
QGNKQHQQPPQQQQQQQQIQMQQXLLQRAAQQQQQQQQQQQQQRRDGSLLNGAASGFSGNDPLIRQNPATANSMAAKMYEERLKLPPQRDSLDEASMKLQQRYGENAGQVIDPNQALLKAAATGQSSGQILHGTASGLSGTPQQVQARSPQPPTTEQNIRTEINPMLTPRTAGTEGSLIGL

SEQ ID NO: 83474 - protein, 155 aa, Setaria italica
  Transcript Sequence Number=SeqID_17500
  Gene Ontology: Mol. function=transcription regulator activity; Cellular component=nucleus; Biological process=regulation of transcription
  Homolog annotation: Hit_ID=Q2HVX8; Match level="QueryCoverage=67%, HitCoverage=11%, E-value=6e-18, Identity=43%"; Hit description=Helix- loop-helix DNA-binding
PSDTGCSVPAADTICSLVNKVMASEIHVVGQGTVGRAAFSGNHQWIVHGTANGHELSSEVAAEMNNQFRVGIQTIAIIPVLPRGVLQLGSTGLVMENTNFVMFAKKLCSQLNNRSSMAASASVKNASSQHGQSRSVHGVIHVRSDDSSSKSAVNF

SEQ ID NO: 83475 - protein, 44 aa, Setaria italica
  Transcript Sequence Number=SeqID_17501
KFPHFERAMFFRNNFELKVGNILPASTNSYITWKYQSIIIFHLI

SEQ ID NO: 83476 - protein, 380 aa, Setaria italica
  Transcript Sequence Number=SeqID_17502
  Gene Ontology: Mol. function=peptide-N4-(N-acetyl-beta-glucosaminyl)as paragine amidase activity; Cellular component=plasma membrane
  Homolog annotation: Hit_ID=P81898; Match level="QueryCoverage=94%, HitCoverage=62%, E-value=1e-116, Identity=58%"; Hit description =Peptide-N4-(N-acetyl-beta-glucosaminyl)asparagine amidase A heavy chain
FAIQNATDVQSKKLAIPSNTYRAVLEVFVSFHSNDEFWYTNPSNDYIQANNLSNVPGNGAFREVVARVDGEVVGAVWPFTVIYTGGVNPLLWRPITGIGSFNLPTYDIDITPFLGKLLDGKEHDFGFGVTNALDVWYIDANLHLWLDHNSEKTTGSLLSYDAAGLDLNVNSEFNGLDGQFVTSASRHVSATGWVKSSYGEVTTTFYQRFRYKNSNVFRKNGTVQIVNQTIDAKSGIFAKDATTVLLSEELHKIFPLYLYTGTTDKVGDEYSLDSLVKLGINEKKTSGGKMGFLYSSLQNAQSARGIMRVKKNLVVSGLGKTHQVYKYVGTDGCYFRDVSSRNYTVLFDRSGDSCSKGAYSRASTKLNNQSARRKLLVNKL

SEQ ID NO: 83477 - protein, 52 aa, Setaria italica
  Transcript Sequence Number=SeqID_17503
TFLEIGSHIRQCALMIDAISQNSFYLTPISYGPDFDIVYWCIHILLLAFHIF

SEQ ID NO: 83478 - protein, 493 aa, Setaria italica
  misc_feature (472)..(472): Xaa can be any naturally occurring amino acid
  Transcript Sequence Number=SeqID_17504
  Gene Ontology: Cellular component=plasma membrane
  Subcellular localization annotation: CTP_CleavageSite=54; ConfidenceScore=5.26e-01
GGASTSRVVDPASSYNPNERLSRLRYGSPQLQRNGSQRSPSLNGHTPGVPPAYPSMTAQQDLHGYGEPVAHIGAPSYPVGPYPWRNFDNYFHGQYDPDPLISYHHDGFYHQPACSCLHCYHREFLPVHGAPLGFNHCRAPYLMNNPSLYPVEGPVMFGAQNYNSRGMNGLMRRNHMRATLSKKPAQRCEPIVNGAPFTICYNCYEVLQLPKKSLSLGKDEYKLVGIQCSHAIVVRLDGSRLDVSAPTPVSHLSPGSKNCPNNGQGSNGHTADERLLPSYSFSVGSHCSQEKDLPSNSSEADKMRSISSSASISEDDESPARSNSQKNSGSRDIPPDAEVATRVPSLPLRDHFVYSPSERVVDGSGKGSRSTRSEHEKGVLTESFKPSTVKDVPVASVLDLSDDEYDDPEYSQDPGDGGQYVDHPRATKSGDSFFSSLIKKSFKINGGMGNGRAKVFINGYPISDRAVRKAEXKIAGPIYPGEYWYDYRAGFWG

SEQ ID NO: 83479 - protein, 135 aa, Setaria italica
  misc_feature (9)..(9): Xaa can be any naturally occurring amino acid
  Transcript Sequence Number=SeqID_17505
  Gene Ontology: Mol. function=DNA-directed DNA polymerase activity; Cellular component=nucleus; Biological process=nucleobase, nucleoside, nucleotide and nucleic acid metabolic process
  Homolog annotation: Hit_ID=O48653; Match level="QueryCoverage=98%, HitCoverage=8%, E-value=1e-57, Identity=81%"; Hit description=DNA polymerase alpha catalytic subunit
LPVQGTSPXRLAECLGLDSSKFQSRLTESSNQDTSTMLLSVIDDEDERYRGCEPLRLSCPSCSGTFDCPPVSSLITSASPTSVSDSDEAKDATANFWRRMRCPRCPDNVDDSRISPPVLANQMKRQADNFINMYY

SEQ ID NO: 83480 - protein, 66 aa, Setaria italica
  Transcript Sequence Number=SeqID_17506
  Subcellular localization annotation: CTP_CleavageSite=5; ConfidenceScore=5.07e-01
MAAPTAAAAAADTATPPPPPSAEPAAAPAPDQKVSPPPLPPQPDAPAPSPATAPAATPRASPAGTP

SEQ ID NO: 83481 - protein, 131 aa, Setaria italica
  Transcript Sequence Number=SeqID_17507
  Gene Ontology: Mol. function=fumarate hydratase activity; Cellular component=tricarboxylic acid cycle enzyme complex; Biological process=fumarate metabolic process
  Homolog annotation: Hit_ID=Q9FI53; Match level="QueryCoverage=100%, HitCoverage=26%, E-value=3e-51, Identity=75%"; Hit description =Fumarate hydratase 2, chloroplastic
  Pfam annotation: Domain name=FumaraseC_C; Domain location=75-129; Score=116.1; E_value=1.2e-31; Accession=PF10415.1; Description =Fumarase C C-terminus
TMVCAQVMGNHGGVTVGGANGHFELNVFKPMIAAGLLRSLRLLGDASVSFEKNCVRGIQANHKRISQLLHESLMLVTSLNPKIGYDNAAAVAKKAHKEGTTLKKAALDLGVLTEEEFHELVVPEKMIGPSD

SEQ ID NO: 83482 - protein, 149 aa, Setaria italica
  Transcript Sequence Number=SeqID_17508
  Subcellular localization annotation: CTP_CleavageSite=72; ConfidenceScore=5.24e-01
SGREDDVAPSPSSSSSVRLDVDDPLDIVSVPAATQPPSHRSPSTTSPRRRRPWSVTTASQAASPPITIYRTEAAAARSSSLQRMGPRSGFRACAPFIYARRPAGGGGDHGMELDWLGSHKARKREGADMHCMGTFQWAGGYPPRSQRGL

SEQ ID NO: 83483 - protein, 199 aa, Setaria italica
  Transcript Sequence Number=SeqID_17509
  Gene Ontology: Mol. function=hydrolase activity; Biological process =metabolic process
  Homolog annotation: Hit_ID=B9RDG3; Match level="QueryCoverage=96%, HitCoverage=56%, E-value=8e-37, Identity=42%"; Hit description =Gibberellin receptor GID1, putative
  Pfam annotation: Domain name=Abhydrolase_3; Domain location=1-175; Score=35.5; E_value=1.1e-09; Accession=PF07859.5; Description =alphabeta hydrolase fold
  Subcellular localization annotation: CTP_CleavageSite=45; ConfidenceScore=5.07e-01
DAALAWLRGAVAGTDPWLAAHGDLSRCYVMGSSSGGNMAFFAGLRAAKGGADPSSSPAATAAVRGLLLHQPYLGGVERTPSEAGSEDDAMLPLEANDKLWSLALPVGADRDHEFCNPAKAMPPEALTGLPRCLVTGNRDDPLIDRQREFARWLQDSGGVEVVVRADHPGSHASELFVPERAEELFAAMREFLSADGGAR

SEQ ID NO: 83484 - protein, 389 aa, Setaria italica
  misc_feature (81)..(81): Xaa can be any naturally occurring amino acid
  Transcript Sequence Number=SeqID_17510
  Gene Ontology: Mol. function=nucleic acid binding
  Homolog annotation: Hit_ID=B9RGI1; Match level="QueryCoverage=58%, HitCoverage=19%, E-value=1e-34, Identity=43%"; Hit description=DNA repair helicase rad5,16, putative
NNGQYRTLPPSFTNGRPTESARYTFGSGDMIHPHPSSYTAVRHDSARGLSASNRVDSVGVKHDSSTVAANDNNKRVLPSFXSNGNTSKSMHPDVASATRKLPPLFADRNSQSLGEHRMGTNTTNGNAHPSSSRMAIGSFNASNTQKKVDDDDVIVYGGPSTHRVLPSSLGVNNSNNSEVNAFDPQGRLNPENRLLDSDERAVYQEALQHISREKREDDLPEGVLTVSLLKHQKMALAWMVSKENSSHCAGGILADDQGLGKTVSTIALIQKERNHQSKFMSVDSDRLKSEALNLDEDDEGEQTVNNEPKNDQGASSSSTAAGTSSVEPCVSQPNNVPDKMAASKTERKRKAKACTSSVSTTRSMTRPTAGTLVVCPASVLKQWANELTD

SEQ ID NO: 83485 - protein, 312 aa, Setaria italica
  Transcript Sequence Number=SeqID_17511
  Gene Ontology: Cellular component=chloroplast
  Homolog annotation: Hit_ID=B1WTU3; Match level="QueryCoverage=49%, HitCoverage=90%, E-value=9e-32, Identity=44%"; Hit description =DUF1230-containing protein
  Pfam annotation: Domain name=DUF1230; Domain location=77-222; Score =304.4; E_value=2.5e-88; Accession=PF06799.3; Description=Protein of unknown function (DUF1230)
  Subcellular localization annotation: CTP_CleavageSite=49; ConfidenceScore=5.39e-01
MLLRLKIVGVHSVVVPGGHDHGATFAAAPRRRSRSTAAGVARRTRRVVVTMALKEEPESSRSGFAGGGPSWDPGLEIQVPFEQRPVNEYSALKDSVLYSWAELSPGSFFLRLGGLWMITFTVLAAPIAAASFNPGKDPLKFVLAAGIGTLLLVSLVVLRIYLGWSYVGDRLLSAVVPYEETGWYDGQMWVKPPEVLARDRLLGSYKVKPVINLLKQTLVGTGALLVGAVSLFAFAAPVEDFLHSMNQPPSAASSKPSLRREELLRLPVEVMQDDDLAAAAAEAADGRPVYCRDRYYRALAGGQYCKWDDLLN

SEQ ID NO: 83486 - protein, 142 aa, Setaria italica
  misc_feature (90)..(90): Xaa can be any naturally occurring amino acid
  Transcript Sequence Number=SeqID_17512
  Gene Ontology: Mol. function=nucleic acid binding
  Homolog annotation: Hit_ID=Q3ED78; Match level="QueryCoverage=95%, HitCoverage=23%, E-value=1e-40, Identity=57%"; Hit description=Zinc finger CCCH domain-containing protein 7
  Pfam annotation: Domain name=zf-CCCH; Domain location=10-37; Score =19.3; E_value=0.0043; Accession=PF00642.16; Description=Zinc finger C-x8-C-x5-C-x3-H type (and similar)
  Pfam annotation: Domain name=zf-CCCH; Domain location=38-62; Score =5.1; E_value=0.32; Accession=PF00642.16; Description=Zinc finger C -x8-C-x5-C-x3-H type (and similar)
  Pfam annotation: Domain name=zf-CCCH; Domain location=90-114; Score =12.9; E_value=0.03; Accession=PF00642.16; Description=Zinc finger C -x8-C-x5-C-x3-H type (and similar)
  Pfam module annotation: Pfam domain module=zf-CCCH::zf-CCCH::zf-CCCH; Domain location=10-37::38-62::90-114
LHTVRTRLAKKQQYCQFFTRFGECKKSGGKCPYIHDRAKVAICTKFLKGLCSNTSCKLTHKVRYFFLILLLIMPLIFFFHHEYLSCRFFXRMPDCSYFLRGLCTNTACPYRHVKVNSKAPVCEDFLKGYCADGDEVSMISLQ

SEQ ID NO: 83487 - protein, 144 aa, Setaria italica
  misc_feature (56)..(56): Xaa can be any naturally occurring amino acid
  Transcript Sequence Number=SeqID_17513
  Gene Ontology: Mol. function=nucleic acid binding
  Homolog annotation: Hit_ID=Q3ED78; Match level="QueryCoverage=93%, HitCoverage=27%, E-value=4e-10, Identity=33%"; Hit description=Zinc finger CCCH domain-containing protein 7
  Pfam annotation: Domain name=zf-CCCH; Domain location=11-37; Score =14.6; E_value=0.018; Accession=PF00642.16; Description=Zinc finger C- x8-C-x5-C-x3-H type (and similar)
NNLCYKQCRKKHSYVCPVFEATGECPQESRCKLHHPKKKIKSKRSRVDTLQTNSWXRYFDTSIGHRRGARVVSSEEEERQKREQVSGDDLADFIDLGADIEVTGDVDTSDDIQLMELDSRNLKMRADNLEALIKPLRIMRTARV

SEQ ID NO: 83488 - protein, 464 aa, Setaria italica
  Transcript Sequence Number=SeqID_17514
  Gene Ontology: Mol. function=nucleic acid binding
  Homolog annotation: Hit_ID=Q3ED78; Match level="QueryCoverage=90%, HitCoverage=95%, E-value=1e-102, Identity=45%"; Hit description=Zinc finger CCCH domain-containing protein 7
  Pfam annotation: Domain name=zf-CCCH; Domain location=219-246; Score =19.3; E_value=0.0043; Accession=PF00642.16; Description=Zinc finger C-x8-C-x5-C-x3-H type (and similar)
  Pfam annotation: Domain name=zf-CCCH; Domain location=247-271; Score =5.1; E_value=0.32; Accession=PF00642.16; Description=Zinc finger C -x8-C-x5-C-x3-H type (and similar)
  Pfam annotation: Domain name=zf-CCCH; Domain location=274-298; Score =13.7; E_value=0.024; Accession=PF00642.16; Description=Zinc finger C- x8-C-x5-C-x3-H type (and similar)
  Pfam annotation: Domain name=zf-CCCH; Domain location=301-326; Score =21.0; E_value=0.0026; Accession=PF00642.16; Description=Zinc finger C-x8-C-x5-C-x3-H type (and similar)
  Pfam annotation: Domain name=zf-CCCH; Domain location=327-349; Score =12.4; E_value=0.035; Accession=PF00642.16; Description=Zinc finger C- x8-C-x5-C-x3-H type (and similar)
  Pfam module annotation: Pfam domain module=zf-CCCH::zf-CCCH::zf -CCCH::zf-CCCH::zf-CCCH; Domain location=219-246::247-271::274 -298::301-326::327-349
  Subcellular localization annotation: CTP_CleavageSite=69; ConfidenceScore=5.79e-01
SFLNAALKTTNTVGSFSHVWTLSGQHPRRKSFVGTSHMKVFPRILPWKRKMFCQNFRSSYPSLLNTSPLGMVRKVLQTRKRSTIYTVSTDGFSLRKSGVLSIGGSSLKWSRSLEKHSQKVNEEATLAVAEVERKKREKRNRQSIRNKGRNDQYSATVAANQLRNSNRASSDSRVPSTCNEYVRVNKGNQLVRNPKKVIRMLASEKVRWSLHTVRTRLAKKQQYCQFFTRFGECKKSGGKCPYIHDRAKVAICTKFLKGLCSNTSCKLTHKVLPERMPDCSYFLRGLCTNTACPYRHVKVNSKAPVCEDFLKGYCADGDECRKKHSYVCPVFEATGECPQESRCKLHHPKKKIKSKRSRVDTLQTNSWGRYFDTSIGHRRGARVVSSEEEERQKREQVSGDDLADFIDLGADIEVTGDVDTSDDIQLMELDSRNLKMRVAKDRPHRGNILCKTLASVPFNQFVAI

SEQ ID NO: 83489 - protein, 75 aa, Setaria italica
  Transcript Sequence Number=SeqID_17515
MSLVRRSNVFDPFADFWDPFDVFRSVVPAASPDRDAAAFAAARIDWKETPEAHVFKADLPGVKKEEVKVEVEDGN

SEQ ID NO: 83490 - protein, 134 aa, Setaria italica
  Transcript Sequence Number=SeqID_17516
  Gene Ontology: Mol. function=metalloendopeptidase activity; Biological process=proteolysis
  Homolog annotation: Hit_ID=B6UET0; Match level="QueryCoverage=100%, HitCoverage=22%, E-value=1e-64, Identity=94%"; Hit description =Peptidase, M50 family
LFDIPVARTASAYITSVVLAVSAFIADGSFNGGENALFVRPEFFYNNPLLSFVQVAIGPYADELGNVLPNAVEGVGVPVDPLAFAGLLGIVVTSLNLLPIGRLEGGRIAQALFGRSTAALLSFGTSVLLGLGAI

SEQ ID NO: 83491 - protein, 84 aa, Setaria italica
  Transcript Sequence Number=SeqID_17517
GLAWHLFVIHALTRTCKSFQTGQYRISELEILHCHLHTEETSNATISMCCFLFDQDLSIVVHNHHLLLMNYFYLIGLLYTMHGQ

SEQ ID NO: 83492 - protein, 225 aa, Setaria italica
  misc_feature (29)..(29): Xaa can be any naturally occurring amino acid
  Transcript Sequence Number=SeqID_17518
  Gene Ontology: Mol. function=isomerase activity; Cellular component =chloroplast envelope
  Homolog annotation: Hit_ID=B6TFR7; Match level="QueryCoverage=100%, HitCoverage=81%, E-value=1e-100, Identity=85%"; Hit description =Chalcone isomerase
  Pfam annotation: Domain name=Chalcone; Domain location=34-222; Score =4.0; E_value=2.5e-08; Accession=PF02431.7; Description=Chalcone -flavanone isomerase
  Subcellular localization annotation: CTP_CleavageSite=37; ConfidenceScore=5.21e-01
PVPHPAPSAPLWASLSLVDGAAPGSVEPXTGVAFPTEASAGRRLLGVGLRKTSVLGLKSIEVYAFGVYADGNDLKQQLEEKYQKFSGSELKENAELINDALEHDIRMTVKLQIVYGRLSIRSVRSAFEKSVGSRLQKFGGQDTKELLQSFVAIFKDEYKLPKGSVIELSRESNHVLKISIEGEEVGNIQSKLLCRSLFDLYIGDEPFDKNAKDNVQENIASILKS

SEQ ID NO: 83493 - protein, 52 aa, Setaria italica
  Transcript Sequence Number=SeqID_17519
RSDRASREHCRAVSVWKSIVVNPHEPTIAPWRYTGHPAINRPPFVTRTMAQI

SEQ ID NO: 83494 - protein, 402 aa, Setaria italica
  Transcript Sequence Number=SeqID_17520
  Gene Ontology: Mol. function=oxidoreductase activity, acting on paired donors, with incorporation or reduction of molecular oxygen; Cellular component=integral to membrane; Biological process=lipid metabolic process
  Homolog annotation: Hit_ID=Q8S459; Match level="QueryCoverage=77%, HitCoverage=93%, E-value=1e-158, Identity=82%"; Hit description =Putative sphingolipid delta 4 desaturase DES-1
  Pfam annotation: Domain name=FA_desaturase; Domain location=150-376; Score=103.6; E_value=6.5e-28; Accession=PF00487.16; Description =Fatty acid desaturase
  Pfam annotation: Domain name=Lipid_DES; Domain location=88-126; Score= 94.1; E_value=4.8e-25; Accession=PF08557.2; Description=Sphingolipid Delta4-desaturase (DES)
  Pfam module annotation: Pfam domain module=FA_desaturase::Lipid_DES; Domain location=150-376::88-126
QISPTPSAAARLPPIDGTGDTSISKDSTQDSRRPWEKEATNPIHPPAFGRHPVPLPLLRPRTAAIRGARGREGGEGAMGAGMEADEGVMATDFFWSYTDEPHASRRREILAKYPQIKELFGPDPWAFLKIAVVVSLQLWTATFLRDASWLKLLTVAYFFGSFLNHNLFLAIHELSHNLAFTTPSLNRWLGIFANLPIGVPMSITFQKYHLEHHRFQGVDGIDMDVPSQAEAHAVRNAVSKSVWVVLQLFFYALRPLFLKPKPPGLWEFTNLAIQVALDAGLVYLYGWKSLAYLILSTFVGGGMHPMAGHFISEHYVFSPDQETYSYYGPLNLMTWHVGYHNEHHDFPRIPGTRLHKVKEIAPEYYDSLRSYRSWSQVIYMYIMDQTVGPFSRMKRKAPKKDS

SEQ ID NO: 83495 - protein, 471 aa, Setaria italica
  misc_feature (135)..(135): Xaa can be any naturally occurring amino acid
  misc_feature (448)..(448): Xaa can be any naturally occurring amino acid
  Transcript Sequence Number=SeqID_17521
  Gene Ontology: Mol. function=ARF GTPase activator activity; Cellular component=cytoplasm; Biological process=regulation of ARF GTPase activity
  Homolog annotation: Hit_ID=B9RY53; Match level="QueryCoverage=94%, HitCoverage=57%, E-value=1e-165, Identity=63%"; Hit description=Gcn4- complementing protein, putative
  Pfam annotation: Domain name=ArfGap; Domain location=415-470; Score =3.6; E_value=1.5e-05; Accession=PF01412.10; Description=Putative GTPase activating protein for Arf
  Pfam annotation: Domain name=BAR; Domain location=2-169; Score=-58.3; E_value=0.02; Accession=PF03114.10; Description=BAR domain
  Pfam annotation: Domain name=PH; Domain location=244-373; Score=81.1; E_value=4e-21; Accession=PF00169.21; Description=PH domain
  Pfam module annotation: Pfam domain module=ArfGap::BAR::PH; Domain location=415-470::2-169::244-373
  Subcellular localization annotation: CTP_CleavageSite=24; ConfidenceScore=5.03e-01
LINLQSFIDASLVKFTQNHSLYYVAGPVMSKFTTAFRELGTYKELLRSQVEHMLSDRLSQFINMDLNGVKDCRRRLDRAAVAYDQAREKFVSVRKGTRAEVVTELEEDLQNAKSTFERCRFNLVHALANIEAKKXYEFLESISAVMDAHLRYFKQGYELLGQMEPFIHQVLTYAQQSKEMAVSEQDKLAKRIQEFRTQEEIANVRMASNVDTSTSGDGIHVVGLQSYKTIEALMHSTANGEVQVIKQGYLFKRPQNTRGEWKRRFFVLDSHGTLYYYGNKGKSQGVASQQTAGEGAGVFGRFRFLNQRASSQGEDSISCHTIDLRTSTIKIDADENDLRFCFRIISPIKTFMLQAESVADQKDWIQKITGVIASLLNSPFPQQLSYGNPATESNRSTSSVDSLSIEDNKSSEGHDDIFNLLRNIPGNDSCAECRSPDPDWASLNLGIXICIECSGAHRNLGVHISKGFVFL

SEQ ID NO: 83496 - protein, 338 aa, Setaria italica
  Transcript Sequence Number=SeqID_17522
  Gene Ontology: Mol. function=ARF GTPase activator activity; Cellular component=cytoplasm; Biological process=regulation of ARF GTPase activity
  Homolog annotation: Hit_ID=B9RY53; Match level="QueryCoverage=87%, HitCoverage=39%, E-value=7e-97, Identity=54%"; Hit description=Gcn4 -complementing protein, putative
  Pfam annotation: Domain name=Ank; Domain location=247-279; Score =38.4; E_value=2.9e-08; Accession=PF00023.22; Description=Ankyrin repeat
  Pfam annotation: Domain name=Ank; Domain location=280-312; Score =24.5; E_value=0.00043; Accession=PF00023.22; Description=Ankyrin repeat
  Pfam annotation: Domain name=ArfGap; Domain location=42-178; Score =175.7; E_value=1.3e-49; Accession=PF01412.10; Description=Putative GTPase activating protein for Arf
  Pfam module annotation: Pfam domain module=Ank::Ank::ArfGap; Domain location=247-279::280-312::42-178
FCYNSPFPQQLSYGNPATESNRSTSSVDSLSIEDNKSSEGHDDIFNLLRNIPGNDSCAECRSPDPDWASLNLGILICIECSGAHRNLGVHISKVRSLRLDVKVWEPVIMDLFHALGNDYANSIWEALLPKEDQGMDESNGAILFIEKPKPSDAFSIKERYIQTKYVDKLLFARDTDQVTIDILEAIRTNDVRGAYRILAIAEVSANMTYDALSKDVHHVQPVTDKSLLDPVSCEIIRDSGKPEGCLQGCSLLHFACQYGHPVMVELLLLFGADINMQDFHGRSPLHHCVQKKNDDLTKQLLKRGARTTIKDGGGLTALERRMELGAITDEDLFILFVR

SEQ ID NO: 83497 - protein, 165 aa, Setaria italica
  Transcript Sequence Number=SeqID_17523
  Gene Ontology: Mol. function=protein serine/threonine kinase activity; Cellular component=cytoplasm; Biological process=protein amino acid phosphorylation
  Homolog annotation: Hit_ID=Q2QRH8; Match level="QueryCoverage=99%, HitCoverage=53%, E-value=1e-73, Identity=83%"; Hit description =Protein kinase AFC1, putative, expressed
VNAISAVALGLSSGGIVSSQLNQGQPRDGSPPLRDCTRLGHYVFAVGDNLTPRYKINAKMGEGTFGQVLECWDRERKEMVAIKIIRGIKKYRDAAMIEIGMLEQLGKYDESRSSCVQIRNWFDYRNHICIVFERLGPSLYDFLRKNNYRSFPIALVREVAKQLLE

SEQ ID NO: 83498 - protein, 89 aa, Setaria italica
  Transcript Sequence Number=SeqID_17524
  Gene Ontology: Mol. function=protein serine/threonine kinase activity; Biological process=protein amino acid phosphorylation
  Homolog annotation: Hit_ID=Q2QRH9; Match level="QueryCoverage=100%, HitCoverage=21%, E-value=3e-47, Identity=96%"; Hit description =Protein kinase AFC1, putative, expressed
VSSRSPKEGSYYKRLPKSSAIKVIDFGSTTYDQQDQSYVVSTRHYRAPEVILGLGWSYPCDIWSVGCILVELCTGEALFQTHENLEHLA

SEQ ID NO: 83499 - protein, 165 aa, Setaria italica
  misc_feature (111)..(111): Xaa can be any naturally occurring amino acid
  Transcript Sequence Number=SeqID_17525
  Gene Ontology: Mol. function=protein serine/threonine kinase activity; Cellular component=nucleus; Biological process=protein amino acid phosphorylation
  Homolog annotation: Hit_ID=A7XW60; Match level="QueryCoverage=99%, HitCoverage=49%, E-value=2e-87, Identity=94%"; Hit description =Lammer-type protein kinase
  Pfam annotation: Domain name=Pkinase; Domain location=1-140; Score= -101.8; E_value=0.02; Accession=PF00069.17; Description=Protein kinase domain
VSSRSPKEGSYYKRLPKSSAIKVIDFGSTTYDQQDQSYVVSTRHYRAPEVILGLGWSYPCDIWSVGCILVELCTGEALFQTHENLEHLAMMERVFGPLPYHMLKRADRQSXKYIRKGRLNWPEGCTSRESMKAVMKLPRLQNLVMQNVDQSAGDLIDLLSKGLVL

SEQ ID NO: 83500 - protein, 160 aa, Setaria italica
  misc_feature (65)..(65): Xaa can be any naturally occurring amino acid
  Transcript Sequence Number=SeqID_17526
  Gene Ontology: Mol. function=protein serine/threonine kinase activity; Cellular component=nucleus; Biological process=protein amino acid phosphorylation
  Homolog annotation: Hit_ID=A7XW60; Match level="QueryCoverage=93%, HitCoverage=70%, E-value=1e-48, Identity=97%"; Hit description =Lammer-type protein kinase
  Pfam annotation: Domain name=Pkinase; Domain location=4-160; Score= -34.2; E_value=1.9e-06; Accession=PF00069.17; Description=Protein kinase domain
  Pfam annotation: Domain name=Pkinase_Tyr; Domain location=4-159; Score=-179.5; E_value=0.086; Accession=PF07714.9; Description =Protein tyrosine kinase
  Pfam module annotation: Pfam domain module=Pkinase::Pkinase_Tyr; Domain location=4-160::4-159
MPITERVSGIHQGTFGQVLECWDRERKEMVAIKIIRGIKKYRDAAMIEIGMLEQLGKYDESRSRXSSRSPKEGSYYKRLPKSSAIKVIDFGSTTYDQQDQSYVVSTRHYRAPEVILGLGWSYPCDIWSVGCILVELCTGEALFQTHENLEHLAMMERVFG

SEQ ID NO: 83501 - protein, 224 aa, Setaria italica
  Transcript Sequence Number=SeqID_17527
  Gene Ontology: Mol. function=protein serine/threonine kinase activity; Cellular component=nucleus; Biological process=protein amino acid phosphorylation
  Homolog annotation: Hit_ID=A7XW60; Match level="QueryCoverage=100%, HitCoverage=67%, E-value=1e-123, Identity=93%"; Hit description =Lammer-type protein kinase
  Pfam annotation: Domain name=Pkinase; Domain location=2-216; Score= -2.7; E_value=2.5e-08; Accession=PF00069.17; Description=Protein kinase domain
CVAVMHELRLIHTDLKPENILLVSPEYIKVPDYKVSSRSPKEGSYYKRLPKSSAIKVIDFGSTTYDQQDQSYVVSTRHYRAPEVILGLGWSYPCDIWSVGCILVELCTGEALFQTHENLEHLAMMERVFGPLPYHMLKRADRQSEKYIRKGRLNWPEGCTSRESMKAVMKLPRLQNLVMQNVDQSAGDLIDLLQGLLKYDPADRHTAQEALSHPFFTEGFERRR

SEQ ID NO: 83502 - protein, 127 aa, Setaria italica
  Transcript Sequence Number=SeqID_17528
  Gene Ontology: Mol. function=protein serine/threonine kinase activity; Biological process=protein amino acid phosphorylation
  Homolog annotation: Hit_ID=Q2QRH8; Match level="QueryCoverage=85%, HitCoverage=34%, E-value=2e-42, Identity=79%"; Hit description =Protein kinase AFC1, putative, expressed
MECIAEMPRAPLDRRPRKRQRLGWDVGPAEMHQVQLGLCGQEVVNAISAVALGLSSGGIVSSQLNQGQPRDGSPPLREDDKDGHYVFAVGDNLTPRYKINAKMGEGTFGWSCLGSCLVHNLVASQDH

SEQ ID NO: 83503 - protein, 334 aa, Setaria italica
  Transcript Sequence Number=SeqID_17529
  Gene Ontology: Mol. function=protein serine/threonine kinase activity; Cellular component=nucleus; Biological process=protein amino acid phosphorylation
  Homolog annotation: Hit_ID=A7XW60; Match level="QueryCoverage=97%, HitCoverage=99%, E-value=0.0, Identity=95%"; Hit description=Lammer -type protein kinase
  Pfam annotation: Domain name=Pkinase; Domain location=4-326; Score =202.1; E_value=1.5e-57; Accession=PF00069.17; Description=Protein kinase domain
  Pfam annotation: Domain name=Pkinase_Tyr; Domain location=7-291; Score=-101.7; E_value=5.8e-07; Accession=PF07714.9; Description =Protein tyrosine kinase
  Pfam module annotation: Pfam domain module=Pkinase::Pkinase_Tyr; Domain location=4-326::7-291
TCLWNTSGTFGQVLECWDRERKEMVAIKIIRGIKKYRDAAMIEIGMLEQLGKYDESRSSCVQIRNWFDYRNHICIVFERLGPSLYDFLRKNNYRSFPIALVREVAKQLLECIAFMHELRLIHTDLKPENILLVSPEYIKVPDYKVSSRSPKEGSYYKRLPKSSAIKVIDFGSTTYDQQDQSYVVSTRHYRAPEVILGLGWSYPCDIWSVGCILVELCTGEALFQTHENLEHLAMMERVFGPLPYHMLKRADRQSEKYIRKGRLNWPEGCTSRESMKAVMKLPRLQNLVMQNVDQSAGDLIDLLQGLLKYDPADRHTAQEALSHPFFTEGFERRR

SEQ ID NO: 83504 - protein, 347 aa, Setaria italica
  misc_feature (123)..(123): Xaa can be any naturally occurring amino acid
  misc_feature (157)..(157): Xaa can be any naturally occurring amino acid
  Transcript Sequence Number=SeqID_17530
  Gene Ontology: Mol. function=protein serine/threonine kinase activity; Cellular component=nucleus; Biological process=protein amino acid phosphorylation
  Homolog annotation: Hit_ID=A7XW60; Match level="QueryCoverage=70%, HitCoverage=100%, E-value=1e-102, Identity=94%"; Hit description =Lammer-type protein kinase
  Pfam annotation: Domain name=Pkinase; Domain location=97-339; Score =64.3; E_value=4.6e-16; Accession=PF00069.17; Description=Protein kinase domain
  Pfam annotation: Domain name=Pkinase_Tyr; Domain location=97-304; Score=-154.5; E_value=0.0019; Accession=PF07714.9; Description =Protein tyrosine kinase
  Pfam module annotation: Pfam domain module=Pkinase::Pkinase_Tyr; Domain location=97-339::97-304
MECIAEMPRAPLDRRPRKRQRLGWDVGPAEMHQVQLGLCGQEVVNAISAVALGLSSGGIVSSQLNQGQPRDGSPPLREDDKDGHYVFAVGDNLTPRYKINAKMGEGTFGQVLECWDRERKEMXAIKIIRGIKKYRDAAMIEIGMLEQLGKYDESRSXVSSRSPKEGSYYKRLPKSSAIKVIDFGSTTYDQQDQSYVVSTRHYRAPEVILGLGWSYPCDIWSVGCILVELCTGEALFQTHENLEHLAMMERVFGPLPYHMLKRADRQSEKYIRKGRLNWPEGCTSRESMKAVMKLPRLQNLVMQNVDQSAGDLIDLLQGLLKYDPADRHTAQEALSHPFFTEGFERRR

SEQ ID NO: 83505 - protein, 59 aa, Setaria italica
  Transcript Sequence Number=SeqID_17531
TKIQVTQDKKTKLAVIKQSLGSIPGSTKQQIQILLVLKITNLFSVICHWIIHARTHSST

SEQ ID NO: 83506 - protein, 386 aa, Setaria italica
  misc_feature (80)..(80): Xaa can be any naturally occurring amino acid
  Transcript Sequence Number=SeqID_17532
  Gene Ontology: Mol. function=nucleotide binding
  Homolog annotation: Hit_ID=B6SXX1; Match level="QueryCoverage=100%, HitCoverage=66%, E-value=0.0, Identity=78%"; Hit description=Auxin -independent growth promoter
  Pfam annotation: Domain name=DUF246; Domain location=8-349; Score =769.4; E_value=2.5e-228; Accession=PF03138.6; Description=Plant protein family
TQPERYLIVVTSGGLNQQRTGIVDAVVAARILNATLVVPKLDQTSFWKDSSNFSEIFDMDWFISFLAKDVKIIKEPPEKXGKAMKPYKMRVPRKCTPRCYLNRVLPALLKKHVIRMTKYDYRLSNKLDTDLQKLRCRVNYHALRFTDQIQELGKKLIQRMREKSRYFIALHLRFEPDMLAFSGCYYGGGEKERRELAAIRRRWRTLHIRDPEKGRRQGRCPLTPEEVGLMLRALGYRSDVHIYVASGEIYGGDDTLAPLKALFPNFHTKESLSSQEELAPFLKFSSRMAAIDFIVCDESDAFVANNIGNMAKILSGRRRYFGHKRTIRPNAKQLYPLFMKRGNMSWDAFSAQVRIIQKGYMGEPMEIAPGRGDFHANPATCICEKT

SEQ ID NO: 83507 - protein, 132 aa, Setaria italica
  Transcript Sequence Number=SeqID_17533
HAAPVAPAPENDEEHNKAEPEAEEEQDESISLDEAYALARRLRAQELASPPSPPPAPATATVTARTKKPARKVVPDGISRRRTKAEEAMEGKAELNARAELFIRQFREELKLQRLNSTLSYTHALRSPTAAR

SEQ ID NO: 83508 - protein, 87 aa, Setaria italica
  Transcript Sequence Number=SeqID_17534
  Gene Ontology: Mol. function=hydrolase activity
  Homolog annotation: Hit_ID=Q6ER78; Match level="QueryCoverage=98%, HitCoverage=15%, E-value=3e-14, Identity=53%"; Hit description =Putative metallo beta subunit lactamase
  Subcellular localization annotation: CTP_CleavageSite=45; ConfidenceScore=5.82e-01
MVALASLSSLCPCGVARRRAASASASASASTSTSVSISCCAVAIPSSGKGPQESRTPRKKLRRTEGATKSLEDSVKRKLEQFYEGVM

SEQ ID NO: 83509 - protein, 111 aa, Setaria italica
  Transcript Sequence Number=SeqID_17535
  Gene Ontology: Mol. function=protein tyrosine/serine/threonine phosphatase activity; Biological process=protein amino acid dephosphorylation
  Homolog annotation: Hit_ID=A2V7M8; Match level="QueryCoverage=92%, HitCoverage=13%, E-value=5e-47, Identity=87%"; Hit description=MAP kinase phosphatase
KCRQGKSAKRIRNFGKRIGSEGLRLDLSSLRMQGRKDQIAFFDKECSKVAEHVYLGGDAVAKNRDILRKNGITHVLNCVGFVCPEYFKSDLVYRTLWLQDSPTEDITSILV

SEQ ID NO: 83510 - protein, 124 aa, Setaria italica
  Transcript Sequence Number=SeqID_17536
  Gene Ontology: Mol. function=transferase activity, transferring glycosyl groups; Biological process=metabolic process
  Homolog annotation: Hit_ID=A1IWC6; Match level="QueryCoverage=99%, HitCoverage=27%, E-value=8e-45, Identity=70%"; Hit description =Putative glucosyl transferase
LRWLDAQPDRSVVFLCFGSRGTFPKSQLEEIAVGLEKSGQRFLWVVRSPPGAGEALDLDALLPAGFLERTEGRGLVVGSWAPQVDVLRHRAAGAFVTHCGWNSTLEGVTAGLPLLCWPLYAEQE

SEQ ID NO: 83511 - protein, 253 aa, Setaria italica
  misc_feature (93)..(93): Xaa can be any naturally occurring amino acid
  misc_feature (204)..(204): Xaa can be any naturally occurring amino acid
  Transcript Sequence Number=SeqID_17537
  Homolog annotation: Hit_ID=B6TE71; Match level="QueryCoverage=81%, HitCoverage=85%, E-value=1e-100, Identity=86%"; Hit description =Lysine decarboxylase-like protein
  Pfam annotation: Domain name=Lysine_decarbox; Domain location=58-190; Score=208.1; E_value=2.3e-59; Accession=PF03641.6; Description=Lysine decarboxylase family
MGDGAAAVPTSRFRTICVFCGSSAGHRQVFPDAALELGHELVRRGINLVYGGGSIGLMGVIARTVDAGGCHVLGVIPKALMPIEISGDSLGKXVVADMHQRKAEMARQSEAFIALPGGYGTMEELLEMITWCQLGIHDKPVGLVNVDGYYDPLIALFEKGATEGFINPDCKQIFVSAPTASELLTKMEQYTRLHQEVAPGTSWXMSLKAAHGKGYGKGGAPAALHLLNLNRSSPLMMHLFSPAMSFKSPKPLN

SEQ ID NO: 83512 - protein, 42 aa, Setaria italica
  Transcript Sequence Number=SeqID_17538
LICLGFLFLYMNIVLNSGLRRFSSWILKQLIAGYEAIVGNSS

SEQ ID NO: 83513 - protein, 597 aa, Setaria italica
  misc_feature (18)..(18): Xaa can be any naturally occurring amino acid
  misc_feature (32)..(32): Xaa can be any naturally occurring amino acid
  misc_feature (288)..(288): Xaa can be any naturally occurring amino acid
  Transcript Sequence Number=SeqID_17539
  Gene Ontology: Mol. function=arginyltransferase activity; Cellular component=cytoplasm; Biological process=protein arginylation
  Homolog annotation: Hit_ID=B9SLM9; Match level="QueryCoverage=99%, HitCoverage=92%, E-value=1e-147, Identity=47%"; Hit description =Arginyl-tRNA--protein transferase, putative
  Pfam annotation: Domain name=ATE_C; Domain location=304-450; Score =235.2; E_value=1.6e-67; Accession=PF04377.7; Description=Arginine -tRNA-protein transferase, C terminus
  Pfam annotation: Domain name=ATE_N; Domain location=1-68; Score=49.9; E_value=1e-11; Accession=PF04376.5; Description=Arginine-tRNA-protein transferase, N terminus
  Pfam module annotation: Pfam domain module=ATE_C::ATE_N; Domain location=304-450::1-68
HGMWANSLKADDYQALLXDRGWRRSGCFLYKXPEMERTCCPSYTIRLKANDFICSKEHGRVLKKMQRFLDGELDPQVGIPQCKASPTKRTLSEPLNSPTSKVSKVSTNEFQAATCPNFLKEDEFIRCLSSKINEAIDTCFQGGILGSTVQLPKAVVKTVKPQVKKKVGEAAQEHKVGGVIDLVYTCNISFQIVAAVRRALPKENGANQTEVLADLSPNSVAEKLAMTTECLGGLSGFEVKACNGHLNFYSATNPAMQNHTGVVPAQASDDSSRSKQSSVNKISAKQPXKRKSLEIRMSTSHFDPEEFALYRKYQTKVHKEKTVTEGSYKRFLVDTPIIFVPPKSGDDTVPPCGFGSFHQQYRLDGKLVAVGVVDILPKCLSSKYLFWDPDLAFLSLGKYTALKEIDWVKTAQEQCPSLQYYYLGYYIHSCNKMRYKAAYRPSELLCPVRYEWVRYDLAKPLMDKSQYSILSDYATMQDETPQPQICGPSDDSSAKVDHHESPSDEDDEDFNDYESEMMVDEELVDSEKADTTESDSSIKDIENITLDLNGSKVKYKDLQQVFGPIERVHLNALDGQLSRYAKVVGKELSDRMVYCLS

SEQ ID NO: 83514 - protein, 218 aa, Setaria italica
  Transcript Sequence Number=SeqID_17540
MVGFAGKRKELEQVVDGLSDFSLSGPAAKSRRLDPGLPPIMEEEPPAPSMAFQMLGEKINGVNMPSVEVMMEGVTSHHVPSEDMALVLYKPVDNPGISSSSFIVSSDLIRGLKSHAFNQVNYHELEDESPERSNSLALVPWKPPQMPVRSDWVAAEPESTQNFEVPMEADETEVTSMDFEEAPEPTSGGFDAENVHQWQHCMTPPSLPNPSAHVMWSR

SEQ ID NO: 83515 - protein, 70 aa, Setaria italica
  Transcript Sequence Number=SeqID_17541
  Pfam annotation: Domain name=DUF662; Domain location=17-70; Score= -82.7; E_value=0.077; Accession=PF04949.5; Description=Family of unknown function (DUF662)
MQQGDPTMEGSGGNKEQQMQIVCVRSASTGDQEAEWTAEQASSRSALSLFKEKEEEIERKKLEVRDKVFS

SEQ ID NO: 83516 - protein, 64 aa, Setaria italica
  Transcript Sequence Number=SeqID_17542
SYYVFSLPGSDHKIKLVLHNEATTCSKGITLHMDMILLIYMFSDHKPSPKAIKHHEIEEPVGLQ

SEQ ID NO: 83517 - protein, 72 aa, Setaria italica
  Transcript Sequence Number=SeqID_17543
KLLLLAVMKLGKDSRGGQAMKSNQIHIQIDALLVHFQAESTVLLREVWGWGGMATYGHIVMLCPGPWILRGC

SEQ ID NO: 83518 - protein, 86 aa, Setaria italica
  Transcript Sequence Number=SeqID_17544
MLLCFLSPLTEKRSSFDYRNIQFQHPELPIFQLHLKCLIFYLTLINCSLFSAISTYVNVTDISPRLSDHIPTTNRNKMLHTRYSLN

SEQ ID NO: 83519 - protein, 156 aa, Setaria italica
  Transcript Sequence Number=SeqID_17545
LKHSPAAIEDPGLEALKERGFSAETPSSHQQHRHSRSAISTYVNVTDISPRLSDHIPTTNRNKMLHTRYSLNLPDQLPEHRIITSAERTERTISKSVADLTWEIAVLEEEVVRKELHLLSLYRAAFDQYLGVSPRASALVEKESHRQRGRKTTDEG

SEQ ID NO: 83520 - protein, 96 aa, Setaria italica
  misc_feature (87)..(87): Xaa can be any naturally occurring amino acid
  Transcript Sequence Number=SeqID_17546
  Gene Ontology: Mol. function=hydrolase activity, hydrolyzing O -glycosyl compounds; Biological process=carbohydrate metabolic process
  Homolog annotation: Hit_ID=Q5NBJ1; Match level="QueryCoverage=100%, HitCoverage=10%, E-value=4e-43, Identity=84%"; Hit description=Alpha- glucosidase-like
DWVGQRKTSIGSQLWWNWEVDDAHYNGWKDLVGDLRRSGIRMMTYCNPCLVPMDQKPNTKRHLFEEAKKLGILVRDESGEPYMMPNXTAFDVAMLD

SEQ ID NO: 83521 - protein, 327 aa, Setaria italica
  misc_feature (314)..(314): Xaa can be any naturally occurring amino acid
  Transcript Sequence Number=SeqID_17547
  Gene Ontology: Mol. function=drug transporter activity; Cellular component=membrane; Biological process=multidrug transport
  Homolog annotation: Hit_ID=B9R7N6; Match level="QueryCoverage=99%, HitCoverage=67%, E-value=7e-88, Identity=50%"; Hit description =Multidrug resistance pump, putative
  Pfam annotation: Domain name=MatE; Domain location=1-121; Score=54.9; E_value=3.2e-13; Accession=PF01554.10; Description=MatE
  Pfam annotation: Domain name=MatE; Domain location=181-325; Score =69.8; E_value=1e-17; Accession=PF01554.10; Description=MatE
  Pfam module annotation: Pfam domain module=MatE::MatE; Domain location=1-121::181-325
MVCGMQMGMGSALETLCGQAYGAKQLHMLGVYLQRSWIILNALAVLMLPLYLFAAPVLRFFHQDAEIAALASRFALYMIPQLFAYACNFPIQKYLQAQGKVMAMAVVSAVALVFHVALSWLLVGPMGMGVVGLAVALNASWWFVVLGQLAYILMGYCPGAWNGFDWLAFSDLYGFARLSVGSAVMTCLEFWFYMFLIVIVGNLENAQVAVAAVSICTNLFGWQIMVFFGFNAAISVRVSNELGAGRPRAAKFAILVVLMSSVAIGLAFFAAILALRDVYGAPFTESPEVVRAVARLGVVFAFSLLLNSVQPVLXGVAVGAGWQWLVA

SEQ ID NO: 83522 - protein, 539 aa, Setaria italica
  Transcript Sequence Number=SeqID_17548
  Gene Ontology: Mol. function=kinase activity; Cellular component =plasma membrane
  Homolog annotation: Hit_ID=UPI0001A8238C; Match level="QueryCoverage =95%, HitCoverage=95%, E-value=0.0, Identity=94%"; Hit description =plant synaptotagmin
  Pfam annotation: Domain name=C2; Domain location=262-346; Score =114.3; E_value=3.9e-31; Accession=PF00168.22; Description=C2 domain
  Pfam annotation: Domain name=C2; Domain location=421-504; Score=64.1; E_value=5.3e-16; Accession=PF00168.22; Description=C2 domain
  Pfam module annotation: Pfam domain module=C2::C2; Domain location =262-346::421-504
MGVVSTVLGFSGFGFGFSAGIVIGYFLFIYVQPNDVKEVKVRPLVEYDSKSLEGILPEIPLWVKNPDYDRIDWLNRFLELMWPYLNKAICRTAQDIAKPIIAENTAKYKIDSVEFETLTLGSLPPTFQGMKVYVTEEQELIMEPSLKWAANPNVTVVVKAYGLKATVQIVDLQVFASPRITLKPLVPTFPCFAKILVSLMEKPHVDFGLKLLGADVMAIPGLYRFVQETIKKQVASMYLWPKTLEVPIMDPSKASKKPVGILLVKVVRAQNLRKKDLLGKSDPYVKLKMSDDKLPSKKTTVKRSNLNPDWNEDFKFVVTDPETQALEVNVFDWEQVGKHEKMGMNRVLLKDLPADETRVTTLDLLKTMDPNDVQNEKSRGQLTLELTYKPFKEEDMEKEGTEGTDMVEKAPDGTPAGGGLLYVIVHEAQDLEGKHHTNPYAKIIFKGDEKKTKVIKKNRDPRWEDEFEFVCEEPPVNDKLHVEVLSKAPKKGLIHGKETLGYIDISLADVISNKRINEKYHLIDSKNGQIQIELQWRTS

SEQ ID NO: 83523 - protein, 93 aa, Setaria italica
  Transcript Sequence Number=SeqID_17549
  Gene Ontology: Mol. function=metal ion binding
  Homolog annotation: Hit_ID=A2Q4Q8; Match level="QueryCoverage=74%, HitCoverage=27%, E-value=1e-27, Identity=79%"; Hit description=Zinc finger, RING-type
TIYCKDIDKAAVLIEPCGIYLGCRRSRSQSCPFCRDSLKRVNSGDLWMFTDCRDIVDMATVTRENIRRLFMYIEKLPLVTPDNIFYPYDSHVK

SEQ ID NO: 83524 - protein, 226 aa, Setaria italica
  Transcript Sequence Number=SeqID_17550
  Gene Ontology: Mol. function=metal ion binding
  Homolog annotation: Hit_ID=A2Q4Q8; Match level="QueryCoverage=96%, HitCoverage=86%, E-value=2e-89, Identity=73%"; Hit description=Zinc finger, RING-type
  Pfam annotation: Domain name=zf-C3HC4; Domain location=123-160; Score= 27.3; E_value=6.3e-05; Accession=PF00097.17; Description=Zinc finger, C3HC4 type (RING finger)
DFSRDYDGACLQMRMSYSPAAQFFLFLVQWTDCSLAGALGLLRILIYKVYVDGSTTMSTHERKASIREFYAVIFPSLMQLPKGISDVDDRRQKAVCTERYRRRDEDESKRPVSEIDVEREEECGICMEMNSKVVLPTCSHAMCIKCYRQWRSRSQSCPFCRDSLKRVNSGDLWMFTDCRDIVDMATVTRENIRRLFMYIEKLPLVTPDNIFYPYDSHRMFLVLGCG

SEQ ID NO: 83525 - protein, 122 aa, Setaria italica
  Transcript Sequence Number=SeqID_17551
  Gene Ontology: Mol. function=binding; Cellular component=cell division site; Biological process=embryonic development via the syncytial blastoderm
  Homolog annotation: Hit_ID=B6TFA8; Match level="QueryCoverage=83%, HitCoverage=30%, E-value=1e-35, Identity=70%"; Hit description =Protein Mo25
  Pfam annotation: Domain name=Mo25; Domain location=1-122; Score= -121.2; E_value=1.1e-05; Accession=PF08569.3; Description=Mo25 protein family
ELYSRLLSSANYVTRRQAMKFLSEFLLEAPNSQIMKRYIVEVRFLNIMINLLKDSSKNIRICAFHVFKVFVANPNKPRPIIEALLENRRELLKLLHNLPTSKGDDELDEEKDLIIQQIQKLA

SEQ ID NO: 83526 - protein, 332 aa, Setaria italica
  Transcript Sequence Number=SeqID_17552
  Gene Ontology: Mol. function=binding; Cellular component=cytoplasm; Biological process=embryonic development ending in birth or egg hatching
  Homolog annotation: Hit_ID=B6TFA8; Match level="QueryCoverage=94%, HitCoverage=92%, E-value=1e-141, Identity=76%"; Hit description =Protein Mo25
  Pfam annotation: Domain name=HEAT; Domain location=203-239; Score =7.9; E_value=5.3; Accession=PF02985.14; Description=HEAT repeat
  Pfam annotation: Domain name=HEAT; Domain location=247-284; Score =10.6; E_value=2.4; Accession=PF02985.14; Description=HEAT repeat
  Pfam annotation: Domain name=Mo25; Domain location=1-332; Score =522.7; E_value=4.7e-154; Accession=PF08569.3; Description=Mo25 protein family
  Pfam module annotation: Pfam domain module=HEAT::HEAT::Mo25; Domain location=203-239::247-284::1-332
MSFFFRMASRLRPSTPEEVVRSIKDSFLALHTRTHAKALEEVEKNVSSLRLLISGDGEVEPNQEQVLQITLEICKEDVISLFVQNLPSLGWTVRKDLVHCWCILLRQKVDESYCCFQYIENHLELLDFLVGCYKNVDIALNCGNMLRECIKYPTLAKYILESGSFELFFEYVELPNFDIASDALNTFKDLLTKHEIVVAEFLGSHYDQFFELYSRLLSSANYVTRRQAMKFLSEFLLEAPNSQIMKRYIVEVRFLNIMINLLKDSSKNIRICAFHVFKVFVANPNKPRPIIEALLENRRELLKLLHNLPTSKGDDELDEEKDLIIQQIQKLA

SEQ ID NO: 83527 - protein, 51 aa, Setaria italica
  Transcript Sequence Number=SeqID_17553
  Homolog annotation: Hit_ID=Q2QQT3; Match level="QueryCoverage=96%, HitCoverage=8%, E-value=1e-17, Identity=87%"; Hit description =Nodulin family protein, putative, expressed
MGCITNMFRPPALGEDYSIMQALVSVEMLVLFVISVFGIGGTLTAIDNMAQ

SEQ ID NO: 83528 - protein, 235 aa, Setaria italica
  Transcript Sequence Number=SeqID_17554
  Gene Ontology: Cellular component=plasma membrane
  Homolog annotation: Hit_ID=Q851R0; Match level="QueryCoverage=96%, HitCoverage=36%, E-value=2e-89, Identity=71%"; Hit description =Nodulin family protein, putative, expressed
  Subcellular localization annotation: CTP_CleavageSite=71; ConfidenceScore=5.28e-01
DAALLAAGPPPTITVAGAANDNIQMSTDTKKTEQQQPAPPTSTSSSCLGRFGGCVRTMFRPPARGEDYTILQALVSVDMLVLFVASICGVGGTLTAIDNMGQIGQSLGYPSKSINTFVSLISIWNYAGRVTAGYASEAVLARYRFPRPLPLTAVLLVSCIGHLLIAFGVPHALYAASVIIGFCFGAQWPLLFAIISEVFGLKYYSSLFNFGSAASPAGAYVLNVIVTGRMYDAEA

SEQ ID NO: 83529 - protein, 80 aa, Setaria italica
  Transcript Sequence Number=SeqID_17555
MEPKPPTPASGPLTPRFRLGKQSSLAPECGGEGGAGTGAGSAEGSAEANGVMSFQLMYLAHEGNAEGIRELLDGGADPNF

SEQ ID NO: 83530 - protein, 282 aa, Setaria italica
  Transcript Sequence Number=SeqID_17556
  Gene Ontology: Mol. function=sequence-specific DNA binding; Cellular component=endoplasmic reticulum membrane; Biological process=lipid biosynthetic process
  Homolog annotation: Hit_ID=B6TCE5; Match level="QueryCoverage=100%, HitCoverage=100%, E-value=1e-150, Identity=90%"; Hit description =ASC1-like protein
  Pfam annotation: Domain name=TRAM_LAG1_CLN8; Domain location=59-258; Score=206.3; E_value=8.3e-59; Accession=PF03798.8; Description=TLC domain
MVAIRGAEAVSVALLFSFAFICARFLLDRLVYKPLAVYLFNTKASKLMNDEARQAKIVKFSESIWKLTYYASVQAWVLMIMKQEPWSLDRMQYFDGWPNQPVARTLMLFYMCQCGFYIYSIGALVAWETRRKDFAVMMSHHVITSILIGVSFLTGFFRIGTIILALHDASDVFLETAKLCKYTEKELGASLFFGLFAISWLLLRLIYFPFWIIKSSSYHSIAFFMKLDEFPTALYYIFNTMLLTLLVFHVYWGKLICMMIMRQLNNKGQVTDDVRSDSEDDE

SEQ ID NO: 83531 - protein, 91 aa, Setaria italica
  Transcript Sequence Number=SeqID_17557
MGLEEAGRAAAATGKKLALASISFADVRVGAAGGAGYKDDLLVVGLPVPKDDGLDVVGDLAVRLPDVGAAVRTFLRNREVAEFVSGAMAGA

SEQ ID NO: 83532 - protein, 168 aa, Setaria italica
  Transcript Sequence Number=SeqID_17558
  Homolog annotation: Hit_ID=B6T7N8; Match level="QueryCoverage=100%, HitCoverage=64%, E-value=8e-69, Identity=75%"; Hit description=ATP10 protein
VEFPDLVVESPDGGALHLPLVAPAPEDDGGEAGVGVIPDASLVCLSFRASSQKMAESWSSPFLDAFGADKNIHVYEVSFIDSWLLSSSPVRQAFLKVMRKSNNPQRHIVYAFGDHYDFRKKLQIINLLTGYIYLIDRQGRIRWQGFGSATQEELSSLTASTSILLDDK

SEQ ID NO: 83533 - protein, 152 aa, Setaria italica
  Transcript Sequence Number=SeqID_17559
  Homolog annotation: Hit_ID=B6T7N8; Match level="QueryCoverage=67%, HitCoverage=39%, E-value=3e-36, Identity=74%"; Hit description=ATP10 protein
MVNKEAIEKEKARLKDEMSRGYFADISEIRKNQGKIATASKAIIPEADAVEFPDLVVESPDGGALHLPLVAPAPEDDGGEAGVGVIPDASLVCLSFRASSQGIMELVCEGLVSCFCLINPVVYISLVCNHGGVHYQTSLVSITFAKFYRYTS

SEQ ID NO: 83534 - protein, 492 aa, Setaria italica
  Transcript Sequence Number=SeqID_17560
  Gene Ontology: Mol. function=protein binding; Cellular component =nucleus; Biological process=regulation of transcription, DNA -dependent
  Homolog annotation: Hit_ID=B6SKC5; Match level="QueryCoverage=100%, HitCoverage=100%, E-value=0.0, Identity=81%"; Hit description =Protein binding protein
  Pfam annotation: Domain name=WW; Domain location=217-247; Score=49.4; E_value=1.4e-11; Accession=PF00397.18; Description=WW domain
  Pfam annotation: Domain name=WW; Domain location=262-292; Score=49.9; E_value=1e-11; Accession=PF00397.18; Description=WW domain
  Pfam module annotation: Pfam domain module=WW::WW; Domain location =217-247::262-292
  Subcellular localization annotation: CTP_CleavageSite=41; ConfidenceScore=5.21e-01
MDSSQNQPLPPGVGTWSQAPPNHPPQFNSDPQSYHSPFDTRHDTASGNNSDSAAGIESAVQEAVLHAQDVETQQVIQNQRYANTTSEPTAYGEDLLSNRRDPNALKEHLLKMTADHRAEMANKRGKPVHPNNGNVEIGNGYGVPGGGAYYAANLPSTQMNKPRDESDKAKCANDLPDFLKQRLRARGILKDETTNKNSMNTQNVDSQEIQNKSGQELPPGWVEAKDPTTGAPYFYNQSTGVSQWNRPGGAVNTMHHQVSPSLPENWEEAIDKSTGHRYYYNTRTQATQWEPPTPVNAIATPPAPTKTAVEPVAQTADIWNSQMQRCLGCGGWGVGLVQPWGYCNHCTRVQNLPFQQYPSYPNNTMHSGGNNAPKTQGNVGAKDRSSSKPPFGKQNRKDHRKRNRPEDDELDPMDPSSYSDAPRGGWVVGLKGVQPRAADTTAAGPLFQQRPYPSPGAVLRKNAEVATHGKKRGGMAPITKRGDGSDGLGEAD

SEQ ID NO: 83535 - protein, 264 aa, Setaria italica
  Transcript Sequence Number=SeqID_17561
  Homolog annotation: Hit_ID=B9SGC5; Match level="QueryCoverage=87%, HitCoverage=52%, E-value=3e-71, Identity=63%"; Hit description =Nuclear inhibitor of protein phosphatase-1, putative
VIDLGSVHGTFVANERLTKDNPVELEVGQSLRFAASTRTYILRKNTAALFPTPSLPSDVSLPSPPDPNDEDAVVAYNTILNRYGISKSDLSSSSKGSSGGSSGANDNNHTVERPLKRSKKLRVSFRDQVGGELIQVVGISDGADVETEPGPIGVKEGSLVGKYESLVQVTVIPKGKEQISPKESASPSGVTDKLQEVLKKVKSTTRSGIYDDLYGDSIPAKVGSSWAYKSDDQSDKDKAIEEKTHSLNLSMSSTDDSDDLFGDS

SEQ ID NO: 83536 - protein, 91 aa, Setaria italica
  misc_feature (30)..(30): Xaa can be any naturally occurring amino acid
  Transcript Sequence Number=SeqID_17562
  Gene Ontology: Mol. function=ATP-dependent helicase activity; Cellular component=intracellular
  Homolog annotation: Hit_ID=B9EZ83; Match level="QueryCoverage=87%, HitCoverage=5%, E-value=6e-12, Identity=60%"; Hit description =Fructose-bisphosphate aldolase
  Subcellular localization annotation: CTP_CleavageSite=70; ConfidenceScore=5.93e-01
PQLPPARPLTMPTPLFLSRNPNPSPGATNXPPPMDPRSAAMSTSGVYVPPMRRLRSVIASTNGSLAPPPSAAAQAQQAARTPEWRMDERSP

SEQ ID NO: 83537 - protein, 114 aa, Setaria italica
  Transcript Sequence Number=SeqID_17563
  Gene Ontology: Mol. function=serine-type endopeptidase activity
  Homolog annotation: Hit_ID=Q9LJ20; Match level="QueryCoverage=96%, HitCoverage=14%, E-value=2e-17, Identity=52%"; Hit description =Putative subtilisin-like protein
  Pfam annotation: Domain name=Inhibitor_I9; Domain location=32-114; Score=45.8; E_value=1.6e-10; Accession=PF05922.8; Description =Peptidase inhibitor I9
MVNTGRFVILVLAYRFLVPLLSAEPDHTTTRESYVVYMGSPSGGGGGGGLEVMQADHLQMLSSIVPGDEQGRVALTQSYHHAFEGFAAALTEEEAAALSGHERVVSVFKDPRAA

SEQ ID NO: 83538 - protein, 108 aa, Setaria italica
  Transcript Sequence Number=SeqID_17564
  Gene Ontology: Mol. function=DNA binding; Cellular component =chromosome; Biological process=nucleosome assembly
  Homolog annotation: Hit_ID=Q677E4; Match level="QueryCoverage=72%, HitCoverage=51%, E-value=5e-24, Identity=74%"; Hit description =Histone H2A
  Pfam annotation: Domain name=Histone; Domain location=4-53; Score =38.4; E_value=2.8e-08; Accession=PF00125.16; Description=Core histone H2AH2BH3H4
GYAQRVGTGAPVYLAAVLEYLAAEVLELAGNAARDNKKTRIIPRHVLLAIRNDEELGKLLAGVTIAHGGVLPNINPVLLPKKAAEKAASGGAKEAKSPKKAAKSPKKA

SEQ ID NO: 83539 - protein, 145 aa, Setaria italica
  Transcript Sequence Number=SeqID_17565
HERRTPGSGGIGVWRRRGIRGGGARGRRRPSFPAAARCALGLKRRWQGSSPPFDVAIPVHLFAGPLRSLRVTLPSAARGSEATSHPPPCSASMVRQLLLSSCSQCLSPSFPYSATLIARRRAQERSVGRGLWQIHPRSSTENVPR

SEQ ID NO: 83540 - protein, 89 aa, Setaria italica
  misc_feature (14)..(14): Xaa can be any naturally occurring amino acid
  Transcript Sequence Number=SeqID_17566
DRRTKVRNGGTGGXEEEGSESSGEDSGERRKRRRKEKERRRRRRSRSRSESSGSSSESESESSYSRSSAESESESDLDSEEERRRQRRK

SEQ ID NO: 83541 - protein, 521 aa, Setaria italica
  Transcript Sequence Number=SeqID_17567
  Gene Ontology: Mol. function=ATPase activity, coupled to transmembrane movement of substances; Cellular component=integral to membrane; Biological process=transport
  Homolog annotation: Hit_ID=Q8GU74; Match level="QueryCoverage=100%, HitCoverage=89%, E-value=0.0, Identity=62%"; Hit description=MDR -like ABC transporter
  Pfam annotation: Domain name=ABC_membrane; Domain location=1-225; Score=19.9; E_value=0.0003; Accession=PF00664.15; Description=ABC transporter transmembrane region
  Pfam annotation: Domain name=ABC_tran; Domain location=300-485; Score= 200.6; E_value=4.2e-57; Accession=PF00005.19; Description=ABC transporter
  Pfam module annotation: Pfam domain module=ABC_membrane::ABC_tran; Domain location=1-225::300-485
IITVLANFLQHFYFGIMGEKMTERVRRMMFSAILRNEVGWFDDEDNSADILSMRLANDATFVRAAFSNRLSIFIRRTSAIFVALLLGMLLQWRVALVALATLPILIISAVAQKMWLSGFSRGIQEMHRKASLVLEDAVRNIYTVVAFCAGNKIMELYRLQLGDILTKSFIHGMGIGFAFGFSQFLLFACNALLLWYTAAAVKDGHLSLVTALKEYIVFSFATFSLVEPFGLAPYILKRRKSLTSVFEIIDRVPKIDPDDASGLKPPNVYGSIEFKNVDFCYPTRPEMTVLSNFSLRVNGGQTVAVVGVSGSGKSTIVSLIERFYDPTAGQVLLDGRDLKLFNLRWLRSHMGLVPQDPVIFSTTIRENIIYARHNATESEMKEAARIANAHHFISSLPHGYDTHVGMRGVDLTPGQKQRIAIARVVLKNAPILLLDEASSAIESESSRVVQEALDTLIMGNKTTILIAHRAAMMKHVDNIVVLNGGRIVEQGSHDSLVQLNGLYVKLMQPHFSKGFRQRRLI

SEQ ID NO: 83542 - protein, 225 aa, Setaria italica
  Transcript Sequence Number=SeqID_17568
  Gene Ontology: Mol. function=phosphatidylinositol phosphate kinase activity; Biological process=phosphatidylinositol metabolic process
  Homolog annotation: Hit_ID=Q652R9; Match level="QueryCoverage=89%, HitCoverage=12%, E-value=3e-51, Identity=57%"; Hit description =Finger-containing phosphoinositide kinase-like
MVSGPLRFGTPRSVGYDDGEDSDRYFSPQSEFSQDTSDTDSVSTSISRMYTFRLGTSSPLDSPIKKLGVGDTSPPSRRGAHSPCYPWNSGRVSDDVDSSFLNSLPRDDEQNKDAVQPVDFESRHIWYPPPPQDEGDDLENGFLKYDDDDDDDDNDVCDGKVFEDVNHDCGDGSDDDLLGTKGKHNIAHKESLRNALHGHFRALVVPKLDYQRNNRKLEYLVGIGL

SEQ ID NO: 83543 - protein, 278 aa, Setaria italica
  misc_feature (260)..(260): Xaa can be any naturally occurring amino acid
  misc_feature (265)..(265): Xaa can be any naturally occurring amino acid
  Transcript Sequence Number=SeqID_17569
  Gene Ontology: Mol. function=phosphatidylinositol phosphate kinase activity; Biological process=phosphatidylinositol metabolic process
  Homolog annotation: Hit_ID=Q652R9; Match level="QueryCoverage=90%, HitCoverage=15%, E-value=1e-130, Identity=89%"; Hit description =Finger-containing phosphoinositide kinase-like
DGKVFEDVNHDCGDGSDDDLLGTKGKHNIAHKESLRNALHGHFRALVSQLLQGHGIDPVDGWSDIVASLAWQAATFVRPDTSKGGSMDPTDYVKVKCVASGNPNDSAFIKGVVCSKNVKHKRMVSKHENPRLLLLGGALEHQKVANKLASINSILEQEKEYLKNAVAKIEAQHPHVLLVEKSIPLDAQQLLSKDISLVLNVKRSLLERISRCTGAQIASSVENVTSTMVGHCQTFWIERVTECSSPRMSNKKHYKTLMFXDGCPXRLGCTILLRGLRL

SEQ ID NO: 83544 - protein, 43 aa, Setaria italica
  Transcript Sequence Number=SeqID_17570
RRSSKKEMVSMSLIRAHVKKKDTTLITAHVTKKCCKEKRYNIN

SEQ ID NO: 83545 - protein, 514 aa, Setaria italica
  Transcript Sequence Number=SeqID_17571
  Gene Ontology: Mol. function=transcription regulator activity; Cellular component=nucleus; Biological process=regulation of transcription
  Homolog annotation: Hit_ID=A7YL17; Match level="QueryCoverage=65%, HitCoverage=68%, E-value=1e-54, Identity=43%"; Hit description=PTF1
  Pfam annotation: Domain name=HLH; Domain location=317-366; Score =44.8; E_value=3.3e-10; Accession=PF00010.18; Description=Helix-loop -helix DNA-binding domain
MGGFVDPFVPAPAWPQDMVFTGTSWSGSASSLADSAGTYLAAAPDEDTEFHLQNRSKPVFLNGNAKEILSSVELHEQFLQAQLQDDVTQGLNFEMDGALMASTLGSVLSTPSAISLADSAPVVCSSNDSSGSEQSGLPQFLLGEQSVPSAAWPSTFMQIPSLVGEETSKSFGFGAVCNDDLLREACAADGKNYPQLGNMPSVPLQLHNDVEFNTGKMLSFAPGPGQQVNTNFEDLQISQKEFSSLHHLNLSSLVSGQLSSFNATGVAHNPKQSNEVSSGKNGLNAPPFMARSEVPNGSGIAANGAPKPRVRARRGQATDPHSIAERLRREKISDRMKNLQELVPNSNRTDKASMLDEIIDYVKFLQLQVKVLSMSRLGATEAVVPLLTESQTESSSGGLLLSPRSGRQQAGRSSLLGQSELRDGASFEQEVMQLMENNMTTAMQYLQSKGLCLMPIALASAISDQKGTSSEAVRPVNSGATDEEDGAGGENHDAKEMLRGLNAFGSAREMKSRA

SEQ ID NO: 83546 - protein, 214 aa, Setaria italica
  Transcript Sequence Number=SeqID_17572
  Subcellular localization annotation: CTP_CleavageSite=54; ConfidenceScore=5.37e-01
ARNPVTIASPPAPTSSPCKDFVLSSFWISDPVLGPRFDFACVKKYSSLLQSAVVAGREEGVCAEFVFPLFCSFLIRKRSSCSGYLPLNNRAWIAFSGSAPIQFVSLEEGFGGGRHCSVLPWIPRQSPAARLASLSVAKGGLPGCEKAGCQGAGQREDGVAGAHGGGAVQEEQLRRAGARVRAAGVDPHRAAPHQQRLLLPHLQVRRLLWPRAAL

SEQ ID NO: 83547 - protein, 132 aa, Setaria italica
  Transcript Sequence Number=SeqID_17573
  Gene Ontology: Mol. function=translation initiation factor activity
  Homolog annotation: Hit_ID=Q9AUJ7; Match level="QueryCoverage=53%, HitCoverage=19%, E-value=1e-10, Identity=42%"; Hit description =Eukaryotic translation initiation factor 4B
NPFGTARPREEVLAAKGEDWRKEEPIVEKLEIQPRTRSSNPFGAARPREEVLAEKGEDWRKIDEKLEAMKVWEAPLERRSFGRRGSPLAGEENDNTQLPEARAKSLEKPNAVEAAKESEEGSETTNGSALAN

SEQ ID NO: 83548 - protein, 88 aa, Setaria italica
  Transcript Sequence Number=SeqID_17574
TFVGCTYFFGQSLMEQKIQFSIADLKRPMGVRWQINPMQGHVSLAFCNLMVKRIHLLNILACLILLLVCGSSCNRVNFGSVILCSSSW

SEQ ID NO: 83549 - protein, 55 aa, Setaria italica
  Transcript Sequence Number=SeqID_17575
CCVHFDILKLSCSITAGAIYWPALIIATLAVVVASQATISATYSIIKQALALGLF

SEQ ID NO: 83550 - protein, 626 aa, Setaria italica
  Transcript Sequence Number=SeqID_17576
  Gene Ontology: Mol. function=potassium ion transmembrane transporter activity; Cellular component=integral to membrane; Biological process=potassium ion transport
  Homolog annotation: Hit_ID=Q8VXB1; Match level="QueryCoverage=100%, HitCoverage=79%, E-value=0.0, Identity=86%"; Hit description =Putative potassium transporter 12
  Pfam annotation: Domain name=K_trans; Domain location=1-626; Score =1058.8; E_value=0; Accession=PF02705.8; Description=K+ potassium transporter
KRWLEGHAYKRNCLLILVLIGTCTAIGDGILTPAISVLSASGGIRVQNQNMSTDVVVIVAVVILIGLFCMQHYGTDKVGWLFAPLVLLWFILIGSVGVVNIHKYNSSVLRAYNPVYIFRYFRRGKSEIWTSLGGVMLSITGTEALYADLCHFPVLAIQIAFTLVVFPCLLLAYTGQAAYIIDHKDHVADAFYRSIPGAIYWPALIIATLAAVVASQATISATYSIIKQALALGCFPRVNVVHTSKKFLGQIYIPDINWVLMILCIAVTAGFKNQSQIGNAYGTAVVIVMLVTTFLMVPVMLLVWKSHWILVVIFLVLSLTVELPYFTACINKVDQGGWVPLVIAITFFIIMYVWHFCTVKRYEFEMHSKVSMAWILGLGPSLGLVRVPGIGFVYTELASGVPLIFSHFITNLPAIHSVVVFVCVKYLPVYTVPVEERFIMKRIGPKNYHMFRCVARYGYKDIHKKDEDFEKMLLDRLFLFVRLESMMDGYSDSEDFTMMEQKPERSTRALLAEKAGSNTMSSIGDMSYSSHDSIMPAKSPLTGNSLTRYSSQTFGDEQEFLNRCKDAGVVHILGNTVVRARRDSGIVKKVAVNYVYAFLRKLCRENSVIFNVPHESLLNVGQIYYI

SEQ ID NO: 83551 - protein, 161 aa, Setaria italica
  Transcript Sequence Number=SeqID_17577
  Gene Ontology: Mol. function=catalytic activity; Cellular component =integral to membrane; Biological process=negative regulation of transcription
  Homolog annotation: Hit_ID=B6TCV9; Match level="QueryCoverage=100%, HitCoverage=40%, E-value=2e-76, Identity=86%"; Hit description=LanC -like protein 2
LPYARLSDRFLRAARRLKDKVVEETWVKAGRQVTDYTLYTGALGTALLLFKSFRVTGDRGDLALAADIVHACDDASRGLPFLTFICGRAGVCALGAVIAKHCDDQLRVTQYLSSFDEITITEKVPNELLYGRAGYLWACLFLNKHLSEKTIPLEHINSVAK

SEQ ID NO: 83552 - protein, 96 aa, Setaria italica
  Transcript Sequence Number=SeqID_17578
  Gene Ontology: Mol. function=DNA-directed RNA polymerase activity; Cellular component=chloroplast; Biological process=transcription, DNA-dependent
  Homolog annotation: Hit_ID=Q01923; Match level="QueryCoverage=100%, HitCoverage=6%, E-value=2e-41, Identity=86%"; Hit description=DNA -directed RNA polymerase subunit beta''
HGDLVELGEAVGIIAGQSIGEPGTQLTLRTFHTGGVFTGGTADLVRSPSNGKIQFNEDLVHPTRTRHGQPAFLCYIDLHVTIQSQDILHSVNIPLK

SEQ ID NO: 83553 - protein, 126 aa, Setaria italica
  Transcript Sequence Number=SeqID_17579
  Subcellular localization annotation: CTP_CleavageSite=39; ConfidenceScore=5.28e-01
QTAWLPGRVRRHFREFTVPRPVPAINPRRPLFGRNSSTRVDLDFSPPSGYIRSFVRPRISAGTATTTAAATCLFGRNRSQAARPWPSPFASPAPAASSGRGLSSSSSPAGTPSGAPPASQMTPRTS

SEQ ID NO: 83554 - protein, 350 aa, Setaria italica
  misc_feature (21)..(21): Xaa can be any naturally occurring amino acid
  Transcript Sequence Number=SeqID_17580
  Gene Ontology: Mol. function=DNA binding
  Homolog annotation: Hit_ID=B9S516; Match level="QueryCoverage=97%, HitCoverage=15%, E-value=7e-41, Identity=36%"; Hit description=DNA binding protein, putative
IEQSNKLEEKLSGVKAGKQRXEENLEQDKSRKSHQSPIHIYALRLLEDNSNASKCLSLAEAPPTPDRLNDFGILKVPDQLSEANLFYGVAPGAMQAYRESMERLFVYNKQMGNTVLKDDYEPSTYASVSDVPVENVYGDDEGDARTYLLPGAYDGGLASKSSHKKKHPVTQRMNGTRPYEIGSDMPYEPFLESKPGNQQFVSNGKRTTDFLSIPIKRIRTAARQRVASPFPAGVSGTPQFTSKTDASSGDTNSCQDDQSSLHGGSFSRKNADIESTVDFDRQLLYDASEVSTKSKKKKKPKHPGHKAPLSVAESCSLMAPGKGTYDPRPQVDLVTQYEQKDYVKKRPEIH

SEQ ID NO: 83555 - protein, 106 aa, Setaria italica
  Transcript Sequence Number=SeqID_17581
  Gene Ontology: Mol. function=transporter activity; Cellular component= membrane; Biological process=oligopeptide transport
  Homolog annotation: Hit_ID=Q9LQL2; Match level="QueryCoverage=97%, HitCoverage=16%, E-value=1e-29, Identity=57%"; Hit description =F5D14.23 protein
  Subcellular localization annotation: CTP_CleavageSite=34; ConfidenceScore=5.08e-01
VGQLEFFNGQAPDGVKSFGSALCMASISLGNYVSIMLVSVVTSLTAGERRPGWIPGNLNSGHLDRFYFLLAVLSLVDLAVYIPCAVWYKGIRLDGGDEVRKASAHV

SEQ ID NO: 83556 - protein, 243 aa, Setaria italica
  Transcript Sequence Number=SeqID_17582
  Gene Ontology: Mol. function=transcription regulator activity; Cellular component=nucleus; Biological process=regulation of transcription
  Homolog annotation: Hit_ID=B6SVP6; Match level="QueryCoverage=33%, HitCoverage=15%, E-value=3e-31, Identity=76%"; Hit description =Transcription factor BIM2
  Pfam annotation: Domain name=HLH; Domain location=163-213; Score =62.1; E_value=2.2e-15; Accession=PF00010.18; Description=Helix-loop -helix DNA-binding domain
MQLFQGEKPAHDFLSLHTGGGSSSPVQHSTQGYDLGVQSSLKPLKMGKRRGGGGGGDGAIGMAPLGLEADSEKHALPGGVGTFSIRQVPSTTQPRGQGVVRDAFAPVLHGSRTEGTPGAESGARAHSGPATMWQDSGIDQRSRATRGEGRSSGSSGDQGPSTPRSKHSATEQRRRTKINDRLEILRELLPHGDQKRDKASFLLEVIEYIRFLQEKVQKYESGHPQKNHEDSSMPWAKVYYRSC

SEQ ID NO: 83557 - protein, 99 aa, Setaria italica
  Transcript Sequence Number=SeqID_17583
MEFDKGSVFLTSISIMLFFRLEILRELLPHGDQKRDKASFLLEVSRASTLPRQSGDLIMPCCPNFGTISSLLLAQSYANNIVGTRTLCRMNYAIEGGKN

SEQ ID NO: 83558 - protein, 133 aa, Setaria italica
  misc_feature (123)..(123): Xaa can be any naturally occurring amino acid
  Transcript Sequence Number=SeqID_17584
  Gene Ontology: Mol. function=cysteine-type peptidase activity; Biological process=ubiquitin-dependent protein catabolic process
  Homolog annotation: Hit_ID=Q0J0M6; Match level="QueryCoverage=100%, HitCoverage=13%, E-value=1e-15, Identity=38%"; Hit description =Ubiquitin carboxyl-terminal hydrolase
MGKKVKAKPKNLRKAQERGPSASSSDVGPSDAASQDTSHAAEEATASASGREHCGHYSRDTAHLDRVLLEILSSKHAASCEHCREDAPRKKGGAGNKEKGGKKKKGGASKGAAAKAQAKAEKXEIWVCLDCGR

SEQ ID NO: 83559 - protein, 339 aa, Setaria italica
  misc_feature (17)..(17): Xaa can be any naturally occurring amino acid
  Transcript Sequence Number=SeqID_17585
  Gene Ontology: Mol. function=dolichyl pyrophosphate Glc1Man9GlcNAc2 alpha-1,3-glucosyltransferase activity; Cellular component =endoplasmic reticulum membrane; Biological process=protein amino acid glycosylation
  Homolog annotation: Hit_ID=B9S6A4; Match level="QueryCoverage=94%, HitCoverage=67%, E-value=1e-103, Identity=56%"; Hit description =Dolichyl glycosyltransferase, putative
  Pfam annotation: Domain name=Alg6_Alg8; Domain location=1-333; Score=- 4.3; E_value=2.8e-14; Accession=PF03155.7; Description=ALG6, ALG8 glycosyltransferase family
LAGGMVFASLLCSKHLXLVAAPVYFMYLFRHYCCGRGVVKGLGRLVLMGAGVAAVFAAAFAPFVYYGQIQQLFSRLFPFGRGLCHAYWAPNFWVFYIIFDKILAFLLRRLGFNIAIPEASFTGGLVGDSSPFAVLPKVTPITTFLMVILAMTPCLVKAFSNPQPKHIIRWVSYACTCGFMFGWHVHEKASLHFTIPLALIAMDNLHDARHYFFLSIVSCYSLFPLLFENQEYLIKVMLLLTYAALMWVGFTSHFAANSDQEGKKVNRSGSTVKKNSFIGWIGLSYLLGIAAIELWSQVFHHLVLGDRLPFLPLIMVSFYCGVGMMYSWLWQLVYIVRHT

SEQ ID NO: 83560 - protein, 59 aa, Setaria italica
  Transcript Sequence Number=SeqID_17586
QNDWYYCLLVPLTLPVIIVAVYLHWLSMKMFKTCMKQYFCGFYGTSMQLCSNFRNSGAR

SEQ ID NO: 83561 - protein, 79 aa, Setaria italica
  Transcript Sequence Number=SeqID_17587
MRFSKEDLVGSAFMAFGVTLFVGFFYAAVLSKLLPPYENRLLAAVQNDWYYCLLVPLTLPVIIVAVYLHWLSMKMFKHA

SEQ ID NO: 83562 - protein, 102 aa, Setaria italica
  Transcript Sequence Number=SeqID_17588
  Gene Ontology: Mol. function=electron carrier activity; Cellular component=integral to membrane; Biological process=oxidation reduction
  Homolog annotation: Hit_ID=C3SAE5; Match level="QueryCoverage=91%, HitCoverage=17%, E-value=2e-42, Identity=89%"; Hit description=P450
PSEFRPERFLPGREGEDVDLTGSKEIKMMPFGAGRRVCPGMALALMHLEYFVANLVREFEWREADGEEVDLAEKLEFTVVMKRPLKARAVPLRSPPPTVAAA

SEQ ID NO: 83563 - protein, 146 aa, Setaria italica
  Transcript Sequence Number=SeqID_17589
  Gene Ontology: Mol. function=ubiquitin thiolesterase activity; Cellular component=intracellular; Biological process=ubiquitin -dependent protein catabolic process
  Homolog annotation: Hit_ID=Q7XR82; Match level="QueryCoverage=92%, HitCoverage=56%, E-value=2e-49, Identity=71%"; Hit description =OSJNBa0043A12.3 protein
  Pfam annotation: Domain name=Peptidase_C12; Domain location=1-124; Score=32.3; E_value=2.6e-09; Accession=PF01088.13; Description =Ubiquitin carboxyl-terminal hydrolase, family 1
REIDACGTIALIHAVGNSSSGINLVENSCLDLFFKSTASMDPHERALFLEKDDAMARAHLLAASDGVTELCDVVEEHYICFVAVNGTLNELDGMKDGPIKHGSSSSKSLLQDAVSIVKGIMHNIPDSINFNLMVLSRKQNSAGTTS

SEQ ID NO: 83564 - protein, 135 aa, Setaria italica
  Transcript Sequence Number=SeqID_17590
  Gene Ontology: Mol. function=transcription regulator activity; Cellular component=nucleus
  Homolog annotation: Hit_ID=B6SWG9; Match level="QueryCoverage=85%, HitCoverage=27%, E-value=6e-35, Identity=70%"; Hit description=Helix- loop-helix DNA-binding domain containing protein
KNARLERYVPREGATAVAAHHRRAKVHISRAASGDRQVISLVVMVMVECDIVDLVLHVLECLRWMSGVSVLSVDADTYSPQAPLKARANIKLHITDGDCWNEALFHETMTKTVHDATSFPSSSSCAAPAPLVAAA

SEQ ID NO: 83565 - protein, 66 aa, Setaria italica
  Transcript Sequence Number=SeqID_17591
SVLLPLIWAVLSKYLISGDFGTGPGACGSPVFGVDGRVVGMSISGVQDMTYLLSLGWIWDTLQMYF

SEQ ID NO: 83566 - protein, 493 aa, Setaria italica
  misc_feature (26)..(26): Xaa can be any naturally occurring amino acid
  Transcript Sequence Number=SeqID_17592
  Gene Ontology: Mol. function=nucleotide binding; Biological process =defense response
  Homolog annotation: Hit_ID=Q9ZNV6; Match level="QueryCoverage=99%, HitCoverage=43%, E-value=3e-72, Identity=34%"; Hit description=Pib
  Pfam annotation: Domain name=NB-ARC; Domain location=164-442; Score= -75.9; E_value=0.00012; Accession=PF00931.14; Description=NB-ARC domain
SCKSALDIVIDHAKSMVADEDALQRXVQRDVAIIADEFEMMRYFLMTTGDQDQDRGWVKQVRDLAYDVEEVLKSFAAKVDQLEKPSRWRIPRILCERRRATLEVKALLARVADQAFASKRSLYSRLVKGSDADHATQAVAEQSGIFSAIAAIDQARRAAAAGADDSTVDLLRLINDGVKDLRVIVVWGTSFHLGNTSAVKEAYRDGGCEHGNAKFGCRAWVRLASASGQDEFLRNLVSQLSADVTGDQRDLAELKEMATEILSETRFLMVIDGLCSIADWEWIKAYFPDKKNGSRIIVSTRQVEIASLCAERHYQVSELTQLAPDQALYLFHHKAKPQDDSAKTISNSSPMVFADEFVSGRNEEIAKLLQLIRQGHNYPGCEVISVIGMGGVGKTTLVRSVYKDKELDSLFQNRAWITVQRPFSVLSSLRSIARQLYGPNAGREIETVGLEETIDEITRLLCAGKCLIVLDDLTSTADWDLFINYLEKTAVIV

SEQ ID NO: 83567 - protein, 277 aa, Setaria italica
  Transcript Sequence Number=SeqID_17593
  Homolog annotation: Hit_ID=B9REU9; Match level="QueryCoverage=95%, HitCoverage=77%, E-value=1e-113, Identity=74%"; Hit description=S -adenosylmethionine-dependent methyltransferase, putative
  Pfam annotation: Domain name=Methyltransf_11; Domain location=120 -226; Score=9.6; E_value=0.012; Accession=PF08241.4; Description =Methyltransferase domain
  Pfam annotation: Domain name=Methyltransf_12; Domain location=120 -224; Score=43.4; E_value=8.8e-10; Accession=PF08242.4; Description =Methyltransferase domain
  Pfam module annotation: Pfam domain module=Methyltransf _11::Methyltransf_12; Domain location=120-226::120-224
PTASPAPVTTSPADVAWLKAQLESNSLLAGGAAASHDAWHRLRKGINPRTREQQLFDINRHHGISHYPDEEASNHTALPCPGELLVEEHHSNYGEPWAGGRDVFEFLANASALTPTDQVLEIGCGTLRVGLHFIRYLDAARFHCLERDELSLMAALRYELPAQGLLYKRPMIVRGEDMDFSKFGDTVMYDLIYASAVFLHIPDKLVWTGLERLAGKLRPQRGRIFVSHNIKFCSRLGGDECTRQLAKLGLEYVGKHTHDSLLFNHYEIWFEFRRPKV

SEQ ID NO: 83568 - protein, 99 aa, Setaria italica
  Transcript Sequence Number=SeqID_17594
  Subcellular localization annotation: CTP_CleavageSite=51; ConfidenceScore=5.38e-01
LALQKRSHRRNTTDQIPLPPSLQGPRRHRRRRRRAEAMVPLPPTLHRQLPRAVRHRQLKVEAADALATATWRLSRAALPWRLPLPCQDMIQIEANSIYR

SEQ ID NO: 83569 - protein, 84 aa, Setaria italica
  Transcript Sequence Number=SeqID_17595
EYRVVFWSPPTIDEVTGAVTSIQEVFENPSGVYSDTTDRQTALLSTSGHSSGNSSGSDDWIEPAAYVLNSTALLSREHRNVLDA

SEQ ID NO: 83570 - protein, 107 aa, Setaria italica
  Transcript Sequence Number=SeqID_17596
  Gene Ontology: Mol. function=RNA-directed DNA polymerase activity; Biological process=RNA-dependent DNA replication
  Homolog annotation: Hit_ID=B9SPG6; Match level="QueryCoverage=99%, HitCoverage=14%, E-value=1e-32, Identity=63%"; Hit description=RNA binding protein, putative
YDLMRKVVATVETLEDAYDIIRLNSNVDLASAKDDACFVTLAEQLRSGEFDVRANAFSVVAKRRGEGCLVLPRLNLKVVQEAIRVVLEVVYRPQFSKISHGCRSGRG

SEQ ID NO: 83571 - protein, 305 aa, Setaria italica
  Transcript Sequence Number=SeqID_17597
  Subcellular localization annotation: CTP_CleavageSite=98; ConfidenceScore=5.48e-01
SAPRRAKPSSDVSKSMCLDLSVKDKSAKPPRRHSIQTKPGASPRPTPSGTVTPLSGIRSKRSDSQGRFDTPTSEVSMSTARRKFSTLSSISYWMTQIRLAEAASKHSVSLGFFKLALESECEPLDRMREELKSYVARHGLATELEDPVKDILQVYDIVEDFEKLKISAEPSQQPKKSDKAARTTTNVSPNGNLKPRSLNSEATESKEAGKKENIQKAKPDARVSGSYNRNPARNTTAKEVVAKTAGKKTKKQAKGQQEVSNGDSEALAVSPDQDTADVVMEITQEDKENMGDAEMPRDAGIPQEA

SEQ ID NO: 83572 - protein, 258 aa, Setaria italica
  Transcript Sequence Number=SeqID_17598
  Gene Ontology: Mol. function=phosphoric diester hydrolase activity; Cellular component=anchored to membrane; Biological process =intracellular signaling cascade
  Homolog annotation: Hit_ID=Q10JM3; Match level="QueryCoverage=96%, HitCoverage=65%, E-value=1e-136, Identity=91%"; Hit description =MAP3K-like protein kinase, putative, expressed
NQEDTVTDQLNNGVRALMLDTYDFKGDVWLCHSSGGKCNDFTAFEPALDTFQEIEAFLSANPSEIVTIILEDYVHAPNGLTNVFNTSGLLKYWFPVSKMPQNGQDWPLVSDMVASNQRLLVFTSISSKQSTEGIAYQWNFMVENNYGDDGMDAGKCSNRAESAPLSDKTKSLVLMNYFPSVPIKFTACLQHSQSLTDMVNTCYGAAGNRWANFIAVDYYKRSDGGGVFQSTDLLNGRLLCGCQDIRACLPGSGVVCSA

SEQ ID NO: 83573 - protein, 91 aa, Setaria italica
  Transcript Sequence Number=SeqID_17599
KDAILRGPYGQYLTSSERLVEMARPSLWLFQTRDASLRGRAGGGGRPPPGESAPCSAQGRYGETTGEAREPSPRPPASHQGRQVWRPFRHA

SEQ ID NO: 83574 - protein, 79 aa, Setaria italica
  Transcript Sequence Number=SeqID_17600
VWGRWNYNGSVNLRAGDWRGKASARQIGRETELGAREFLEEAGARSCAGGRARGCAENGDRHSWAGIWRARWPVAEGSR

SEQ ID NO: 83575 - protein, 66 aa, Setaria italica
  Transcript Sequence Number=SeqID_17601
SSIDILLKQILCGEFHVFTLDEYDQNERDSIFFSAKCLTSLLSKLDFSFLRTTQFCMHSLSFVWLP

SEQ ID NO: 83576 - protein, 68 aa, Setaria italica
  Transcript Sequence Number=SeqID_17602
RMCCLLPNMACNGFNPNTLDIMRNKCGSPFLYFVHLIALQLVRHVNEVETYDYNRVQLAFVQACHKFI

SEQ ID NO: 83577 - protein, 65 aa, Setaria italica
  Transcript Sequence Number=SeqID_17603
LVTSRNGLSCSKEKRTAPISSCKRYTVLPLYFRCITYQKQGTCRKLISGINWEVKTIGSPASQAY

SEQ ID NO: 83578 - protein, 188 aa, Setaria italica
  Transcript Sequence Number=SeqID_17604
  Gene Ontology: Mol. function=signal transducer activity; Cellular component=plasma membrane; Biological process=response to light stimulus
  Homolog annotation: Hit_ID=B6ST41; Match level="QueryCoverage=80%, HitCoverage=24%, E-value=3e-41, Identity=58%"; Hit description=RPT2 -like protein
  Subcellular localization annotation: CTP_CleavageSite=59; ConfidenceScore=5.55e-01
VSLRRLLPLSFSLPSRSSVSSAAHALTCSLFLSYKPPPSNSCCSRISASAMDRITQWVSSQEIPADLTIRIADSIFALHKAVMVPRCGYIRRAVAAATKDPSAAVELDLSALPGGADAFEKAARYCYGANFEITARNAAALRCAAAFLDMQHPADLARRVDEFLAQAGLRALPSAVTVLRSCEALLPA

SEQ ID NO: 83579 - protein, 117 aa, Setaria italica
  Transcript Sequence Number=SeqID_17605
  Gene Ontology: Mol. function=nucleotide binding; Biological process =defense response
  Homolog annotation: Hit_ID=Q8LJZ8; Match level="QueryCoverage=64%, HitCoverage=8%, E-value=3e-19, Identity=56%"; Hit description =Putative Mla1
NLRVLDTQGSCWFSTLPAWVNPSLLLDLTNLWIAVRELHQADLEILGRLPALRSLALEVYNKNLGILAGFVVGAEELPAMTVVSTWAWETCHRCRRSRLTCDVMVLARRRQSKPRLR

SEQ ID NO: 83580 - protein, 83 aa, Setaria italica
  Transcript Sequence Number=SeqID_17606
  Gene Ontology: Mol. function=nucleotide binding; Biological process =cell redox homeostasis
  Homolog annotation: Hit_ID=Q8LJY8; Match level="QueryCoverage=96%, HitCoverage=8%, E-value=9e-16, Identity=56%"; Hit description =Putative stripe rust resistance protein Yr10
  Subcellular localization annotation: CTP_CleavageSite=56; ConfidenceScore=5.13e-01
IREENFVTVLSNMDMEGTSPSNTIRRLSLQNGQESHVMAQATFSMKHARSVVVFPAAASLVPPLACCRVLRVLDLEECNLSQV

SEQ ID NO: 83581 - protein, 82 aa, Setaria italica
  Transcript Sequence Number=SeqID_17607
  Gene Ontology: Mol. function=nucleotide binding; Biological process =defense response
  Homolog annotation: Hit_ID=Q8LJZ8; Match level="QueryCoverage=93%, HitCoverage=8%, E-value=1e-19, Identity=59%"; Hit description =Putative Mla1
QFTEPNNKLVECLCKLQKMEELFIMDDHGPCNIGVLDAWVAPRHLRVFCTQGSYWFSTLPAWVNPSLLPDLTQLYIDVRELH

SEQ ID NO: 83582 - protein, 82 aa, Setaria italica
  misc_feature (19)..(19): Xaa can be any naturally occurring amino acid
  Transcript Sequence Number=SeqID_17608
  Gene Ontology: Mol. function=nucleotide binding; Biological process =defense response
  Homolog annotation: Hit_ID=Q8LJZ8; Match level="QueryCoverage=86%, HitCoverage=7%, E-value=9e-14, Identity=52%"; Hit description =Putative Mla1
LKMDNKNLGILAGFVVGAXAIPCLVTCYFCQFVWPVVFQQGAMPRVRELVIWRFYLREARGIACTDGSLDILQRRQVSHAQV

SEQ ID NO: 83583 - protein, 83 aa, Setaria italica
  misc_feature (72)..(72): Xaa can be any naturally occurring amino acid
  Transcript Sequence Number=SeqID_17609
  Gene Ontology: Mol. function=nucleotide binding; Biological process =defense response
  Homolog annotation: Hit_ID=Q8LJZ8; Match level="QueryCoverage=84%, HitCoverage=7%, E-value=4e-14, Identity=60%"; Hit description =Putative Mla1
LKYLLFFRQFVWPVVFQQGAMPRLRKLMFWTFYVGEARGIACTDGSLDLGLGNLPSLQYVTADLICDGSSKXEVEQAVDAKGC

SEQ ID NO: 83584 - protein, 82 aa, Setaria italica
  Transcript Sequence Number=SeqID_17610
SCNDGSLDLGLGNLPSLQDVKADLLRYGASKEEAEQAKAALTHEAEMHPNHPSHFIKIREDYIHILRRKMKRWLLTWRLEQN

SEQ ID NO: 83585 - protein, 94 aa, Setaria italica
  Transcript Sequence Number=SeqID_17611
  Gene Ontology: Mol. function=nucleotide binding; Biological process =defense response
  Homolog annotation: Hit_ID=Q8LJZ8; Match level="QueryCoverage=100%, HitCoverage=11%, E-value=7e-18, Identity=51%"; Hit description =Putative Mla1
PSNTIRRLSLQNGQESYVMAQATFSMQHTRSAVVFPAFASLEPPPLDCCRVLRVLDLEDCDLLQPNSMLKCLGNLHHLRYLGLRRTGISQVPEE

SEQ ID NO: 83586 - protein, 135 aa, Setaria italica
  Transcript Sequence Number=SeqID_17612
  Gene Ontology: Mol. function=nucleotide binding; Biological process =defense response
  Homolog annotation: Hit_ID=Q8LJZ9; Match level="QueryCoverage=97%, HitCoverage=15%, E-value=9e-37, Identity=62%"; Hit description =Putative stripe rust resistance protein Yr10
DVWYNKISRLPSSVVQLRKLMYLYIDGSTKVPNGIGNLTCLEHLSWLRIDDSTRNIIEELGQLTELRQLSIELDECNDKLLECLCKLQKMQELVMMVYPSQRSISGLDAWVAPRHLRVLNTLGSCWFSTLPAWVN

SEQ ID NO: 83587 - protein, 117 aa, Setaria italica
  Transcript Sequence Number=SeqID_17613
  Gene Ontology: Mol. function=nucleotide binding; Biological process =defense response
  Homolog annotation: Hit_ID=Q8LJZ8; Match level="QueryCoverage=81%, HitCoverage=10%, E-value=4e-11, Identity=42%"; Hit description =Putative Mla1
HNIIQRFVVGADAFSCLVSCYFRQFVWPVVFQQGAMPRLRALAFWTFYVRETRGITCNDGSLDLGLGNLPSLQHVQANLQCDGAGKEEAEQAKAALMHEAEMHPNHPRHDIHLYVSY

SEQ ID NO: 83588 - protein, 60 aa, Setaria italica
  Transcript Sequence Number=SeqID_17614
  Gene Ontology: Mol. function=nucleotide binding; Biological process =defense response
  Homolog annotation: Hit_ID=Q8LJZ8; Match level="QueryCoverage=100%, HitCoverage=6%, E-value=6e-20, Identity=77%"; Hit description =Putative Mla1
EIRKERLIWMWIGEGFIQCEKAGKSLFELGESYFNELINRSMIQPIHNRNDMISSCRVHD

SEQ ID NO: 83589 - protein, 84 aa, Setaria italica
  Transcript Sequence Number=SeqID_17615
  Gene Ontology: Mol. function=nucleotide binding; Biological process =cell redox homeostasis
  Homolog annotation: Hit_ID=Q8LJY8; Match level="QueryCoverage=92%, HitCoverage=8%, E-value=3e-17, Identity=57%"; Hit description =Putative stripe rust resistance protein Yr10
IQPIHDRFDDTISSCRVHDMVLDLIRSLSSEENFVTVLSDMGGTSPSNTIRRLSLHNDQESQEAALEKQQLERQQLTLHVASSM

SEQ ID NO: 83590 - protein, 148 aa, Setaria italica
  misc_feature (109)..(109): Xaa can be any naturally occurring amino acid
  Transcript Sequence Number=SeqID_17616
  Gene Ontology: Mol. function=nucleotide binding; Biological process =defense response
  Homolog annotation: Hit_ID=Q8LJX9; Match level="QueryCoverage=82%, HitCoverage=12%, E-value=4e-24, Identity=54%"; Hit description =Putative stripe rust resistance protein Yr10
GPSVEIKGGWVVDCRTLQNNSFRIHLVECLHKLQHIESLSISVFGECDLDALVAPRHLNRLELMGCWSSKLSYLINPFSLLGLSFLSIELNKLQQEDLESLGRLPALLXIVDVEVNHENLGIWRLIIGASSFPCLVQCVLRALLDLWH

SEQ ID NO: 83591 - protein, 223 aa, Setaria italica
  misc_feature (27)..(27): Xaa can be any naturally occurring amino acid
  misc_feature (144)..(144): Xaa can be any naturally occurring amino acid
  Transcript Sequence Number=SeqID_17617
  Gene Ontology: Mol. function=nucleotide binding; Biological process =defense response
  Homolog annotation: Hit_ID=Q8LJZ9; Match level="QueryCoverage=95%, HitCoverage=24%, E-value=8e-52, Identity=54%"; Hit description =Putative stripe rust resistance protein Yr10
QDKIWARKVREMSYDIEDNIDKFIHAXKGWKTTEQHSFKEAIARTLKWFRQPKIRRKIATEIRGIKSCVIEVHERRSRYEVSLGDGVDKRPCLFAPDMEVEELVGIDEARDELISKIMIEENEVPKNQGKIVSIVGFGGLGKTXLLRPNRQVVIVNIRARFDCCAFVSVSQTPDLKKLYKGLLYDLGKSINEETLDERRLIEALTEFLEDKRYESIPFANLYI

SEQ ID NO: 83592 - protein, 167 aa, Setaria italica
  misc_feature (120)..(120): Xaa can be any naturally occurring amino acid
  Transcript Sequence Number=SeqID_17618
  Gene Ontology: Mol. function=chlorophyllase activity; Biological process=chlorophyll catabolic process
  Homolog annotation: Hit_ID=Q8LJZ8; Match level="QueryCoverage=98%, HitCoverage=17%, E-value=1e-44, Identity=56%"; Hit description =Putative Mla1
RRLIEVLREFLEDKRYFVVVDDVWDISVWKRIRCALPDNDVGYTIITTTRISRVAEQAGGAYNMKPLSLNNSRKLLYRRIFGSGNKDNNEAEEKCHEELAEVSYKILKKCAGVPLAIITXAASLLACKARNKMEWYKVYNSISTGPQNNLDVENMRKILSFSYYELT

SEQ ID NO: 83593 - protein, 123 aa, Setaria italica
  Transcript Sequence Number=SeqID_17619
  Gene Ontology: Mol. function=nucleotide binding; Biological process =defense response
  Homolog annotation: Hit_ID=Q8LJX9; Match level="QueryCoverage=100%, HitCoverage=12%, E-value=6e-27, Identity=58%"; Hit description =Putative stripe rust resistance protein Yr10
TGISQVPEEIGNLRFLQILDVRRNKISRLHSSVVQLRKLMCLCIDMDTRVPNGIASLTSLEELSQIGIYDSTDIEIIYCLTELRVLGISCHVECMDSLEKSLVECLCKLQKIQNLNIIVTSGE

SEQ ID NO: 83594 - protein, 157 aa, Setaria italica
  Transcript Sequence Number=SeqID_17620
  Gene Ontology: Mol. function=nucleotide binding; Biological process =cell redox homeostasis
  Homolog annotation: Hit_ID=Q8LJY8; Match level="QueryCoverage=98%, HitCoverage=17%, E-value=1e-49, Identity=66%"; Hit description =Putative stripe rust resistance protein Yr10
DLRTCLLYLSMFPEDYEIDKDRLIKMWIGEGFIQCEKAGKSLFELGESYFNELINRSMIQPIHHGLDHMISSCRVHDMVLDLIHSLSSEENFVTVLSDMGGTSPSNTIRRLSLQNGQESHVMAQATWSLQHARSVVVFPVASLVPPLACCRVLRVLI

SEQ ID NO: 83595 - protein, 230 aa, Setaria italica
  misc_feature (142)..(142): Xaa can be any naturally occurring amino acid
  misc_feature (148)..(148): Xaa can be any naturally occurring amino acid
  Transcript Sequence Number=SeqID_17621
  Gene Ontology: Mol. function=nucleotide binding; Biological process =defense response
  Homolog annotation: Hit_ID=Q8LJZ8; Match level="QueryCoverage=96%, HitCoverage=25%, E-value=2e-67, Identity=61%"; Hit description =Putative Mla1
PEDYEIDKDRLIRMWIGEGFIHCEKAGKSLFELGENYFNELINRSMIQPIHDSLLDMISSCRVHDMVLDLIRSLSSEENFVTVLSDMGGTSPSNTIRRLSIQNGQESHVMAQATFSMKHARSVVATFRAASSLVPHLTCCRXVLRVLXLKDCDLSQASILKCLGNIHHLRYLGLCETGIDQLPEEIGNLQFLQILDVRGNKIFRWPSSVVQLKRLMCLCIDRPNKSDPKR

SEQ ID NO: 83596 - protein, 214 aa, Setaria italica
  misc_feature (56)..(56): Xaa can be any naturally occurring amino acid
  Transcript Sequence Number=SeqID_17622
  Gene Ontology: Mol. function=nucleotide binding; Biological process =defense response
  Homolog annotation: Hit_ID=Q8LJZ9; Match level="QueryCoverage=98%, HitCoverage=24%, E-value=2e-73, Identity=65%"; Hit description =Putative stripe rust resistance protein Yr10
QAELESMKGALEKVSNTPADQLDIQDKIWAKDLRELSYDIEDNIDTFMVRGEGNIXEQAKLRGIKQFIDRSVGLFRKAKVRHGIATEIRDIKSRVEEVAKRHDRYKLSNSNVAKHVAIDPRLLYQYEKVTDLVGIADARDEIIRILMEGNEVSSKQQDKIISIVGFGGLGKTTLANVVYKKLTAQFECAAFVSVSQTPDLEKLLKHMFYQLVWE

SEQ ID NO: 83597 - protein, 70 aa, Setaria italica
  Transcript Sequence Number=SeqID_17623
GCLVKLMAEQFNLCMRGETEGLCHPLCSSFHSRFRHILLYSSSSLSTSYNMDTMIGMIGMHFSFMRSSRL

SEQ ID NO: 83598 - protein, 207 aa, Setaria italica
  Transcript Sequence Number=SeqID_17624
  Gene Ontology: Mol. function=nucleotide binding; Biological process =defense response
  Homolog annotation: Hit_ID=Q8LJZ8; Match level="QueryCoverage=97%, HitCoverage=21%, E-value=3e-48, Identity=51%"; Hit description =Putative Mla1
NDKLSECLCKLQKMQELTIKVYRDQCSIGGLDAWVAPRHLRKLNTRSSCLFSTLPAWVNPSLLPNLTCLWIAVRELHQADLKILGRLPALRSLGLKVDNKNLGILVGFVVGAGTFPCLVYCVFYQFVWPVVFQQGAMPRLRTLVFFSFYVGEARGIACNDGSLDLGLGNLPSLHNVEAHLLRDGVGKEEAEQAKAALTHEAEMHPNH

SEQ ID NO: 83599 - protein, 205 aa, Setaria italica
  Transcript Sequence Number=SeqID_17625
  Gene Ontology: Mol. function=nucleotide binding; Biological process =defense response
  Homolog annotation: Hit_ID=Q8LJZ9; Match level="QueryCoverage=87%, HitCoverage=20%, E-value=6e-48, Identity=55%"; Hit description =Putative stripe rust resistance protein Yr10
WLHIDDSAINIIEELGQLTELRQLSIRLEEWNDKLSECLCKLQKMQNLIITVYPGQCSIGGLDAWIAPRNLRVLNILRSCWFSTLPAWVNPSLLLDLTKLFIAVRELHQADLEILGRLPALRLLFLEVDKKNLSILAGFVVGAGAFPCLVRCRFRQFVWPVVFQHGAMPRLKSLCSSGFICGRQLPAMTVVSTWAWEPASAADCR

SEQ ID NO: 83600 - protein, 62 aa, Setaria italica
  Transcript Sequence Number=SeqID_17626
MQDWAAAAVDEPAVRVETQVLAPSYRLSFSGCYWTALPSADYAAAAMSRGISAGTVMAKKKI

SEQ ID NO: 83601 - protein, 362 aa, Setaria italica
  misc_feature (88)..(88): Xaa can be any naturally occurring amino acid
  misc_feature (117)..(117): Xaa can be any naturally occurring amino acid
  Transcript Sequence Number=SeqID_17627
  Gene Ontology: Mol. function=nucleotide binding; Biological process =defense response
  Homolog annotation: Hit_ID=Q8LJZ8; Match level="QueryCoverage=98%, HitCoverage=40%, E-value=1e-121, Identity=62%"; Hit description =Putative Mla1
  Pfam annotation: Domain name=NB-ARC; Domain location=2-165; Score= -98.9; E_value=0.0031; Accession=PF00931.14; Description=NB-ARC domain
YIIITTTRILKVAKQVGGAYMMKPLCLESSRKLLYRRIFGNGNKDNNEDIVKCPDDELAEVSDKILKKCAGVPLAIITMASLLACKAXNKMEWYEVYNSVGTGLENNLDMENMRKIXLSFSYYELPSHLRACLIYLSMFPEDYEIDKDRLIRMWIGEGFILCEKAGKSLFEVGESYFNELVNRSMIQPIHDRTYMLLSCRVHDMVLDLIRSLSSEENFDTVLSNMGGTSPSNTIQMLSHQNSQKTHVMAKFKWISQYEWSFRIIRASVSLVPLLASFRVLCDLDLKDCNLSQANSILKCLANIHHLRYLGLRRTGITQLPEEIGSLQLLQTLDVRVNEISRLPSSVVQLSKLMCLYIDWTTI

SEQ ID NO: 83602 - protein, 481 aa, Setaria italica
  misc_feature (22)..(22): Xaa can be any naturally occurring amino acid
  Transcript Sequence Number=SeqID_17628
  Gene Ontology: Mol. function=nucleotide binding; Biological process =defense response
  Homolog annotation: Hit_ID=Q8LJZ8; Match level="QueryCoverage=93%, HitCoverage=50%, E-value=1e-126, Identity=55%"; Hit description =Putative Mla1
  Pfam annotation: Domain name=LRR_1; Domain location=137-158; Score =7.4; E_value=11; Accession=PF00560.25; Description=Leucine Rich Repeat
  Pfam annotation: Domain name=LRR_1; Domain location=163-184; Score =6.3; E_value=19; Accession=PF00560.25; Description=Leucine Rich Repeat
  Pfam annotation: Domain name=LRR_1; Domain location=186-207; Score =9.3; E_value=5.2; Accession=PF00560.25; Description=Leucine Rich Repeat
  Pfam module annotation: Pfam domain module=LRR_1::LRR_1::LRR_1; Domain location=137-158::163-184::186-207
KIEMDRLIRMWIGEGFIQCEKXGRSLFELGESYFNELINRSMIQPIHDSSDDMISSCRVHDMVLDLIRSLSSEENFVTLLSKMGGTSPSNTIRRLSLQNGQESHVMAQATFSMQHARSVVVFPAATSLVPSLACCRVLRVLDLEGCNLSQAKSILKCLGNIHHLMYVGLRRTGISQLPEEIENLQLLQTIDVRDNKISRLPSSIVQLKKLMCLYIDESTRAPNGIGNLTCLEQLSVLRIDDSTRNINVEELGQLTELRQLCIRLDEWNDKLLECLCKLQKMQELFIIISCQRSIGGLDAWVAPRHLREFSTQGCWFLKLPAWVNPALLLVLTKLSIDVRELHQADLEILGRLPALRLLSLEVDNKNLGILAGFVVAAGAFPCLVSCYFWHFVWPVVFQQGAMPRLRRLVFWRFYLRETRGIACTDGSLNLGLGNLPSLQHVVADLRCDGAGKEEAEQAEAAMTHEAKMHPNHPHDDIYLYD

SEQ ID NO: 83603 - protein, 173 aa, Setaria italica
  Transcript Sequence Number=SeqID_17629
  Gene Ontology: Mol. function=nucleotide binding; Biological process =defense response
  Homolog annotation: Hit_ID=Q8LJZ8; Match level="QueryCoverage=88%, HitCoverage=16%, E-value=1e-32, Identity=47%"; Hit description =Putative Mla1
RLVRFYKQLPAWVNPSLLLDLTKLHISVMELHQADLEILGRLPALRSLALEVYNKNLGILAGFVVGAGAFPCLVYCAFYQFVWPVVFKQGAMPRLRELIFFRFYLREARGIACNDGSLDLGLGNLPSLQKVEAYLRCDGTSKEEAEQAKAALTHEAEMHPNHPHHDINITVDG

SEQ ID NO: 83604 - protein, 736 aa, Setaria italica
  misc_feature (17)..(17): Xaa can be any naturally occurring amino acid
  misc_feature (48)..(48): Xaa can be any naturally occurring amino acid
  Transcript Sequence Number=SeqID_17630
  Gene Ontology: Mol. function=nucleotide binding; Biological process =defense response
  Homolog annotation: Hit_ID=Q8LJZ8; Match level="QueryCoverage=100%, HitCoverage=81%, E-value=0.0, Identity=59%"; Hit description =Putative Mla1
  Pfam annotation: Domain name=ABC_tran; Domain location=191-325; Score= -53.2; E_value=0.044; Accession=PF00005.19; Description=ABC transporter
  Pfam annotation: Domain name=LRR_1; Domain location=575-596; Score =7.2; E_value=13; Accession=PF00560.25; Description=Leucine Rich Repeat
  Pfam annotation: Domain name=LRR_1; Domain location=601-622; Score =8.8; E_value=6.4; Accession=PF00560.25; Description=Leucine Rich Repeat
  Pfam annotation: Domain name=LRR_1; Domain location=624-645; Score =8.3; E_value=7.9; Accession=PF00560.25; Description=Leucine Rich Repeat
  Pfam annotation: Domain name=NB-ARC; Domain location=168-460; Score =214.9; E_value=2e-61; Accession=PF00931.14; Description=NB-ARC domain
  Pfam module annotation: Pfam domain module=ABC_tran::LRR_1::LRR _1::LRR_1::NB-ARC; Domain location=191-325::575-596::601-622::624 -645::168-460
MEIVTGAIPSLLHKLGXLLVGEYNLQKEVKGGIIFLQAELESMQGALXKISRTPADKIDDQDKIWARKVREMSYDIEDNIDQYIVQCKGRKTVEQHSFKEAIDRTLKWFRQPKIRRKIAIEIREIKSRVIEVHERRRRYEVSLGVDKPVTVDPRLFAQYTEVKELVGIDEARDELLSKIMIQENEVPKKQGKIVSIVGFGGLGKTTLANAVYKKIRAQFDCYAFVSVSQTPDLKKLYNDLLYDLGKSINDEALGERRLIEVLREFLEDKRYFVVVDDIWDISVWNMIRCALPDNDVGYTIITTTRISHVAEQAGGAYNMKPLSLNNSQKLLYRRIFGNGNKDNNEEEEKCHEELAEVSDKILKKCAGVPLAIITMASLLASKARNKMEWYEVYNSIGTGLENNLDVENMRKILSFSYYELPCHLRTCLLYLSMFPEDYEIKKDRLIRMWIGEGFIQCEKAGKSLFELGESYFNELINRSMIQPIHRIIDDMISSCRVHDMVLDLIRSLSSEENFVTVLSDMEGTSSSNTIRRLSLQNSQESHAMAQATWSWQHARSVVVFPATASLVPPLDCYRVLRVLDLEGCDLSRANSSLKYLGNLHHLRYLGLNWTRIAWLPKELGNLQLLQTLDARDNKISRLPSSVVQLRKLVCLYIDSFTSAPDGIGNLACLEQLSVLLIDDPTRNIVEELGQLTELRQLSIDLDEWNDKLSECLCKLQKIQILHITCEPRRSIGGLDA

SEQ ID NO: 83605 - protein, 729 aa, Setaria italica
  misc_feature (284)..(284): Xaa can be any naturally occurring amino acid
  Transcript Sequence Number=SeqID_17631
  Gene Ontology: Mol. function=nucleotide binding; Biological process =defense response
  Homolog annotation: Hit_ID=Q8LJZ8; Match level="QueryCoverage=99%, HitCoverage=80%, E-value=0.0, Identity=58%"; Hit description =Putative Mla1
  Pfam annotation: Domain name=ABC_tran; Domain location=191-321; Score= -52.9; E_value=0.042; Accession=PF00005.19; Description=ABC transporter
  Pfam annotation: Domain name=LRR_1; Domain location=577-598; Score =8.8; E_value=6.2; Accession=PF00560.25; Description=Leucine Rich Repeat
  Pfam annotation: Domain name=LRR_1; Domain location=603-624; Score =7.7; E_value=10; Accession=PF00560.25; Description=Leucine Rich Repeat
  Pfam annotation: Domain name=LRR_1; Domain location=626-647; Score =11.2; E_value=2.2; Accession=PF00560.25; Description=Leucine Rich Repeat
  Pfam annotation: Domain name=NB-ARC; Domain location=172-462; Score =166.3; E_value=8.7e-47; Accession=PF00931.14; Description=NB-ARC domain
  Pfam module annotation: Pfam domain module=ABC_tran::LRR_1::LRR _1::LRR_1::NB-ARC; Domain location=191-321::577-598::603-624::626 -647::172-462
MEIVTGTIPSLLHKLGELLVGEYNLQKEVKGGIIFLQAELESMQGALEKISRTPADKIDDQDKIWARKVREMSYDLEDNIDKYIVQCKGRKTAEQHSFKEAIDRTLKWFKQPKIRRKIATEIREIKRRVIEVHERRRRYEVSLGVDKPVTVDPRLFAQYTEVKELVGIGEARDELISKIMTEENEVPKNQGKIVSIVGFGGLGKTTLANAVYEKIRARFNCCAFVSVSQTPDLTKLYKGLLYDLGYSINDETLDERRLINILREFLRNKRYFVVIDDIWDISVXKMIRCALPDNDDVGYTIITTTRISHVAEQAGGVYNMKPLSLNNSRKLLYRRIFGNGNKDNNEEEEKYPHEELAEVSHRILKKCAGVPLAIITMASLLARKARNKMEWYEVYNSVGTGLENNLDVENMRKILSFSYYELPCHLRACLLYLSMFPEDYEIDKDRLIRMWIGEGFILCEKAGKSLFEVGESYFNELINRSMIQPEYDLDDIMLLSCRVHDMVLDLIRSLSSEENFVTVLSDMGGTSPSNTIRRLSLQNGQESHVMVQATFSMKHARSVVVFPAAASLVPPLDCCRVLRVLDLEDCNLSQANSSLKYLGNLHHLRYLGLFKTGISQLPEEIVNLQFLQTLDVKHNKISRLPSSIVQLRKLMCLYINWTTIVPNGIGNLTCLEQLSRLRINDSTRNIIEELDQLTELRQLSIQLDKWNDKLLECLCKLQKMQELTITVYP

SEQ ID NO: 83606 - protein, 693 aa, Setaria italica
  misc_feature (63)..(63): Xaa can be any naturally occurring amino acid
  misc_feature (460)..(460): Xaa can be any naturally occurring amino acid
  Transcript Sequence Number=SeqID_17632
  Gene Ontology: Mol. function=nucleotide binding; Biological process =defense response
  Homolog annotation: Hit_ID=Q8LJZ8; Match level="QueryCoverage=91%, HitCoverage=70%, E-value=0.0, Identity=60%"; Hit description =Putative Mla1
  Pfam annotation: Domain name=LRR_1; Domain location=310-331; Score =8.8; E_value=6.2; Accession=PF00560.25; Description=Leucine Rich Repeat
  Pfam annotation: Domain name=LRR_1; Domain location=336-357; Score =7.7; E_value=10; Accession=PF00560.25; Description=Leucine Rich Repeat
  Pfam annotation: Domain name=LRR_1; Domain location=359-380; Score =11.3; E_value=2; Accession=PF00560.25; Description=Leucine Rich Repeat
  Pfam annotation: Domain name=LRR_1; Domain location=406-426; Score =2.3; E_value=1.1e+02; Accession=PF00560.25; Description=Leucine Rich Repeat
  Pfam annotation: Domain name=NB-ARC; Domain location=1-195; Score= -28.8; E_value=1.6e-07; Accession=PF00931.14; Description=NB-ARC domain
  Pfam module annotation: Pfam domain module=LRR_1::LRR_1::LRR_1::LRR _1::NB-ARC; Domain location=310-331::336-357::359-380::406-426::1-195
ENKRYFIVIDDIWNISDWKMIKRALPGDNVGNKIITTTRNFNIAEQVGRAYNLQPISLNNSRXLFFRRIFDSGNKDNNEEEEKCSDNELAEVSDRILEKCAGVPLAIITMASLLACKARDKMEWYEVCNSIGTGLENNLDVENMRKILSFSYYELPCHLRACLLYLSMFPEDYEIDKDRLIKMWIGEGFIQCEKAGKSLFELGESYFNELINRSMIQPIHNSLDDMISSCRVHDMVLDLIRSLSSEENFVTVLSDMGGTSPSNTIRRLSLQNGQESHVMAQATWSLQHARSVVVFPAAASLVPPLACCRVLRVLDLEDCNLSQANSSLKYLGILHHLRYLGLCKTVISQLPEEIGNLQFLQTLNVRGNKISRLPSSVVQLRKLMCLYIDHYTRVPNGIGNLTCLEQLSELCIDDSAINIIEELGQLTELRQLSIELADEWNDKLLECLCKLQKMQELDIXMVNGQRSIGGLDAWVAPRHLRVLRTERKCWFSTLPAWVNPSLLLDLTNLNIAVRELHQADLEILGRLPALRFLKLEVENKNLGILAGFVVGADAFPCLVSCLFFQFVWPVVFQQGAMPRLKVLHFWSWEVRGIACNDGSLNLGLGNLPSLQHVEADLRCDGAGKEEAEQAKAVFTHEAEMHPNHPDHYIQIIDDDDYKRISRKLEWKLEQIFRHACRDDDEYKSLRRKLEQSR

SEQ ID NO: 83607 - protein, 922 aa, Setaria italica
  misc_feature (606)..(606): Xaa can be any naturally occurring amino acid
  Transcript Sequence Number=SeqID_17633
  Gene Ontology: Mol. function=nucleotide binding; Biological process =defense response
  Homolog annotation: Hit_ID=Q8LJZ8; Match level="QueryCoverage=98%, HitCoverage=100%, E-value=0.0, Identity=60%"; Hit description =Putative Mla1
  Pfam annotation: Domain name=LRR_1; Domain location=573-594; Score =8.8; E_value=6.2; Accession=PF00560.25; Description=Leucine Rich Repeat
  Pfam annotation: Domain name=LRR_1; Domain location=599-620; Score =10.9; E_value=2.5; Accession=PF00560.25; Description=Leucine Rich Repeat
  Pfam annotation: Domain name=LRR_1; Domain location=622-643; Score =4.0; E_value=53; Accession=PF00560.25; Description=Leucine Rich Repeat
  Pfam annotation: Domain name=LRR_1; Domain location=669-689; Score =3.0; E_value=81; Accession=PF00560.25; Description=Leucine Rich Repeat
  Pfam annotation: Domain name=NACHT; Domain location=190-337; Score= -23.3; E_value=0.0051; Accession=PF05729.4; Description=NACHT domain
  Pfam annotation: Domain name=NB-ARC; Domain location=167-459; Score =189.0; E_value=1.3e-53; Accession=PF00931.14; Description=NB-ARC domain
  Pfam module annotation: Pfam domain module=LRR_1::LRR_1::LRR_1::LRR _1::NACHT::NB-ARC; Domain location=573-594::599-620::622-643::669 -689::190-337::167-459
MEIVVGALPSLVHKLGELLVGEYNLQKEVKGGIIFLQAELESMQGALEKISRTPADKIDDQDKIWARKVREMSYDIEDNIDKYIVQCKGRKTVEQHSFKEAIDRTLKWFRQPKIRRKIATEIREIKSRVIEVHERRERYKIDDVDKPAAVDPRLLAQYKKATELVGIDEARDEVINILVEGDGVSSQHGKVVSIVGFGGLGKTTLAKVVYEKIKEKFDCWAFVIVSQNPDMREFFKRLLYELGKNVNDQTLDERQLIDQTRKLLQTKRYCIVIDDIWSVSIWDTIRCALPDDVGGYIIITTTRVLKVAEQVGGAYTMKPLCLESSRKLLYGRIFGNGSKDNNEDIVKCPDDELAEVSDRILKKCAGVPLAIVTMASLLACKARNKMEWYEVYNSVGTGLENNLDVENMRKILSFSYYELPCHLRACLLYLSMFPEDYEIDKDRLIRMWIGEGFILCEKAGKSLFEVGESYFNELINRSMIQPIHDRAGMLLSCRVHDMVLDLIRSLSSEENFVTVLSNMGGTSPSNTIRRLSLQNGQESHVMAQATWSLQHARSVVVFPAAVSLVPPLACCRVLRVLDLEDCNLSQANSSLKYLGILHHLRYLGLXDTRISQVPEEIGNLQLLQTLDVRETKIFSLPSSVVLLRKLMCLWIDESTRVPNGIGNLTCLEQLSLLHIDDSAINIIEELGQLTELRQLSIDLDEWNDKLSECLCKLQKIQVLRIMVNPDQRSISGLDAWVAPRHLRVLSTPDSCWFSTLPAWVNPSLLLDLTKLSIAVRELHQADLEILGRLPALRFLSLQVDNKNLGILAGFVVGAGAFPSLVDCIFHRFVWPVVFQHGVMPRLKELMFDRFYLREARGIACNDGSLDLGLGNLPSLQDFNAYLRCDGTSKEEAKQAKAALTHEVEMHPNHPRYEIHIEDDDDE

SEQ ID NO: 83608 - protein, 927 aa, Setaria italica
  misc_feature (13)..(13): Xaa can be any naturally occurring amino acid
  misc_feature (813)..(813): Xaa can be any naturally occurring amino acid
  Transcript Sequence Number=SeqID_17634
  Gene Ontology: Mol. function=nucleotide binding; Biological process =defense response
  Homolog annotation: Hit_ID=Q8LJZ8; Match level="QueryCoverage=97%, HitCoverage=100%, E-value=0.0, Identity=61%"; Hit description =Putative Mla1
  Pfam annotation: Domain name=LRR_1; Domain location=572-593; Score =5.5; E_value=26; Accession=PF00560.25; Description=Leucine Rich Repeat
  Pfam annotation: Domain name=LRR_1; Domain location=598-619; Score =7.9; E_value=9.4; Accession=PF00560.25; Description=Leucine Rich Repeat
  Pfam annotation: Domain name=LRR_1; Domain location=621-642; Score =7.9; E_value=9.4; Accession=PF00560.25; Description=Leucine Rich Repeat
  Pfam annotation: Domain name=LRR_1; Domain location=668-688; Score =2.8; E_value=88; Accession=PF00560.25; Description=Leucine Rich Repeat
  Pfam annotation: Domain name=NACHT; Domain location=192-335; Score= -39.2; E_value=0.086; Accession=PF05729.4; Description=NACHT domain
  Pfam annotation: Domain name=NB-ARC; Domain location=169-458; Score =167.5; E_value=3.9e-47; Accession=PF00931.14; Description=NB-ARC domain
  Pfam module annotation: Pfam domain module=LRR_1::LRR_1::LRR_1::LRR _1::NACHT::NB-ARC; Domain location=572-593::598-619::621-642::668 -688::192-335::169-458
MEVMAGALPSVIXKLGELLIGEYNLQKGVKGEIRFLQSELESMKGALEKVSNTPIDTLDIQDKIWARNLRELSYDIEDSIDTFMVRGKCNVQANLHGIKKFIDRSVGLFRKAKIRHGIATEIRDIKLRVEEVAKRHDRYKFSNSNVAKPVTVDPRLFSQYEKVTELVGIEEAREEIIRILMEGDEVSKQQDKIVSIVGFGGLGKTTLADVVYKKLRAQFKCTAFVSVSQTPDLEKLLKHMFYQLVGTESNISSDVPSELREFLENKRYFIVIDDIWNISDWKMIKRALPGDNVGNKIITTTRILNIAEQVGGAYNLQPISLNNSRTLFFRRIFGYGKKDNNEDIVKCPDDELAEISDRILKKCAGVPLAIITMASLLVCKARNKMDWYEVYNSIGTGLENNLDMENMRKILSFSYYELPCHLRACLLYLSMFPEDYIIGKNRLIRMWIGEGFIQCEEARKSLFELGESYFNELINRSMIQPIHNGIDKISCCRVHDMVLDLIRSLSSEENFVTVLSNMGGTSPSNTIRRLSLQNGQESHVMAQATWSLQHARSVVVFSAAASLMLPLAYCRVLRVLDLASCDLSRANSSLKYLGNLHHLRYLGLCRTGIFQLPEEIGNLQLLQTLDVSGSKISRLPSSVVQLRKLMYLYIDESTRVPNGIGNLTCLEQLSYLRIDDSNRNIIEELCHLTELRQLSIELDKWNDKLLECLCKLQKMQELFIIIMGQCSIGGLDAWVAPRHLRVLNTKCSCWFSTLPAWVNPSLLLDLTNLKIAVIKLHQVDLEILGRLPALRYLELKVDNVNLDILAGFVVGAXAFPCLVTCYFWQFVWPVVFQQGAMPRLRNIFFREFVFLSFYLRETRGIACNDGSLDLGLGNLPSLQGFNAILRCDGADREEAKQAKAALTHEAEMHPNYPRHYIQIIDYDSDDE

SEQ ID NO: 83609 - protein, 936 aa, Setaria italica
  Transcript Sequence Number=SeqID_17635
  Gene Ontology: Mol. function=nucleotide binding; Biological process =defense response
  Homolog annotation: Hit_ID=Q8LJZ8; Match level="QueryCoverage=97%, HitCoverage=99%, E-value=0.0, Identity=57%"; Hit description =Putative Mla1
  Pfam annotation: Domain name=LRR_1; Domain location=580-601; Score =6.2; E_value=20; Accession=PF00560.25; Description=Leucine Rich Repeat
  Pfam annotation: Domain name=LRR_1; Domain location=606-627; Score =8.1; E_value=8.6; Accession=PF00560.25; Description=Leucine Rich Repeat
  Pfam annotation: Domain name=LRR_1; Domain location=629-650; Score =8.8; E_value=6.3; Accession=PF00560.25; Description=Leucine Rich Repeat
  Pfam annotation: Domain name=LRR_1; Domain location=677-697; Score =0.8; E_value=2.1e+02; Accession=PF00560.25; Description=Leucine Rich Repeat
  Pfam annotation: Domain name=NB-ARC; Domain location=172-465; Score =199.1; E_value=1.2e-56; Accession=PF00931.14; Description=NB-ARC domain
  Pfam module annotation: Pfam domain module=LRR_1::LRR_1::LRR_1::LRR _1::NB-ARC; Domain location=580-601::606-627::629-650::677-697::172 -465
MEIVTGAIPSLLDKLSELLDGEYNLQKEAKGGIKFLQTELESMQCALEKISRTPADKIDDQDKIWARKVREMSYDIEDNIDKYIVQCKGRKRKRKTDEQHSFKEAIDRFLEWLWQPMIRRKFATEIREIKSRVIEVHERRRRYEVSLGVDKPVTVDPRLFAQYTEVKELVGIDEARDELISKIMIEENEVPKKQGRIVSIVGFGGLGKTTLANVVYKKIRAQFDCYAFVSVSQTPDLKKLYKGLLYDLGKSINEETLDERRLIEALTEFLEDKRYFVVVDDVWDISVWKMIRYALPDNDVGYTIIITTRISHVAEQAGGAYNMKPLSLNNSRKLLYRRIFGNGNKDNNEEEEKCPHEELAEVSNRILNKCAGVPLAIITMASLLACKARDKMEWYEVCNSIGTGMENNLDVENMRKILSFSYYKLPCHLRACLLYLSIFPEDYEIEKDHLIRMWIGEGFIKYEKAGKSLFGLGESYFNELINRSMIQPIHDRFDDTISSCRVHDMVLDLIRSLSSEENFVTVLSDMGGTSPSNTIRRLSLHNDQESHVMAKATWSLQHARSVVVFPAAASLVPPLDCCRVLRVLDLKDCYLSEANSSLNYLENLHHLRYLGLRDTCISWLPEEIGNLQLLQTLDVSGTQISRLPSSVVQLRKLMCLCIGEYRTRVPNGIGHLTCLEQLSELHIDDSTRNIIEELGQLTELRKLSIELDEWNDKLLECLWKLQKMQELVITGKISQRSIGGLDAWVAPRHLRVLQTQSSCWFSTLPAWVNPSLLLDLTKLKIAVRELHQADLEILGRLPALRFLFLEVDNKNLGILAGFVVGAGAFPCLVRCYFLGLVWPVVFQHGAMPRLRWLMFFPFYVGETRGIACNDGSLDLGLGNLPSLQDVHAFLYAAGKEEGEQTKAALMHEAKMHPNHPSSRILNKQMTTAMRLSYTGR

SEQ ID NO: 83610 - protein, 906 aa, Setaria italica
  misc_feature (16)..(16): Xaa can be any naturally occurring amino acid
  Transcript Sequence Number=SeqID_17636
  Gene Ontology: Mol. function=nucleotide binding; Biological process =defense response
  Homolog annotation: Hit_ID=Q8LJZ8; Match level="QueryCoverage=98%, HitCoverage=99%, E-value=0.0, Identity=56%"; Hit description =Putative Mla1
  Pfam annotation: Domain name=LRR_1; Domain location=568-591; Score =8.4; E_value=7.4; Accession=PF00560.25; Description=Leucine Rich Repeat
  Pfam annotation: Domain name=LRR_1; Domain location=593-614; Score =7.2; E_value=13; Accession=PF00560.25; Description=Leucine Rich Repeat
  Pfam annotation: Domain name=LRR_1; Domain location=616-637; Score =7.2; E_value=13; Accession=PF00560.25; Description=Leucine Rich Repeat
  Pfam annotation: Domain name=LRR_1; Domain location=760-782; Score =3.7; E_value=61; Accession=PF00560.25; Description=Leucine Rich Repeat
  Pfam annotation: Domain name=NACHT; Domain location=187-331; Score= -32.9; E_value=0.028; Accession=PF05729.4; Description=NACHT domain
  Pfam annotation: Domain name=NB-ARC; Domain location=164-453; Score =197.5; E_value=3.8e-56; Accession=PF00931.14; Description=NB-ARC domain
  Pfam module annotation: Pfam domain module=LRR_1::LRR_1::LRR_1::LRR _1::NACHT::NB-ARC; Domain location=568-591::593-614::616-637::760 -782::187-331::164-453
MAVMAGALPSVIKKLXGELLIGEYNLQKEVKDEIRFLQSELESMQGALKDVSNKPIDRLEVQDKIWARNLRELSYDIEDSIDTFMVRGKCNEQANLHRSFGLFRKAKVRHGIIATEIRDIKRRVEEVAKRHDRYKLSNSNVAKPVTVDPRLLSQYEKETELVGIEEAREEIIRILMEGDEVSKQQDKIVSIVGFGGLGKTTLADVVYKKLRAQFECAAFVSVSQTPDPEELLKRMFCQLVGRESNKSSDVARELREFLEKKRYFVVVDDVWDISIWKIIRYALPDNDVGYNIITTTRISHVAEQAGGAYYMKPLSLNNSRKLLYRRIFGNGNKDSNEEEEKCPHEELAEVSDRILEKCAGVPLAIITMASLLACKARDEMEWYEVYNSVGTGLENNLDAENMRKILSLSYYELPCYLRTCLLYLSMFPEDCEIEKDVLIRMWIGEGFIQCEYPGGSLFELGERYFNELINRSMIQPLHESLDGMISRCRVHDMMLDLIRSLSSELNFVTILSNMGGTSTSNRIRRLSLQNGQESHVMAQATWSLQHARSVFVCSASVSLVPPLDCCRLLRVLDLQDCHLSQRYILKDLGNLIHMRYLGLRRTHIAQLPEEIGNLQLLQTLDVTGNGISMLPSTVVQLKHLMFLRIDSWTRVPNGIGSLTCLQELSTLCIHDSTDIIKELGHLWKLRVLGIDCRTLQNNSFRIHLVECLHKLQHIESLSISVFGECDLDALVAPRHLNRLELMGCWSSKLSYLINPFSLLGLSFLSIELNKLQQEDLESLGRLPALTYVDVEVNHENLGIWRLIIGASSFPCLVQCVLRGSIGPVAFQQGAMPRLKSLCFTFPVLKMREISNCDGNFDLGLGNLQSLRNVTVSFLSGGASEQEVDEAEAALRIEIAMHHNHPSLKIH

SEQ ID NO: 83611 - protein, 209 aa, Setaria italica
  Transcript Sequence Number=SeqID_17637
  Gene Ontology: Mol. function=hydrolase activity, hydrolyzing O -glycosyl compounds; Biological process=carbohydrate metabolic process
  Homolog annotation: Hit_ID=B9SGZ4; Match level="QueryCoverage=54%, HitCoverage=29%, E-value=1e-15, Identity=37%"; Hit description =Glucan endo-1,3-beta-glucosidase, putative
MEFLLLFLVSGSLLLPSLGLAVSGQEARQLVHLNGPSQTGVHVSVARKDLPMVASSVLGAESWLRTHVLAQYPSEHITAIVVGRGVTCNHGQELLRLRLLHAVKNLHHSLVRWGLVDDIKVTSASPVCARDRAVLQRRLYGRHHLPPSATFRPPQPPVASTYMPPPPGVALSFAPNYPPEVVPSVPPTAAVPPHSPAVPASPPPMVSAS

SEQ ID NO: 83612 - protein, 106 aa, Setaria italica
  Transcript Sequence Number=SeqID_17638
  Homolog annotation: Hit_ID=B6U4M1; Match level="QueryCoverage=61%, HitCoverage=33%, E-value=6e-20, Identity=83%"; Hit description =Wiscott-Aldrich syndrome, C-terminal
  Pfam annotation: Domain name=PBD; Domain location=64-104; Score=31.5; E_value=3.3e-06; Accession=PF00786.20; Description=P21-Rho-binding domain
RQEAHPQGIEFGVVPGGASARPPAAAAAGKGESLVARLLRGFKNLSQIFAVYDEDDEEEEREMVIGLPTDVKHVAHIGWDGSTSTTTSLRSWNRAAPPPPPASSSS

SEQ ID NO: 83613 - protein, 59 aa, Setaria italica
  Transcript Sequence Number=SeqID_17639
RQGHDLATMDGDSLQKSYLHFIVIRMRLQHEIPASTCCHMLTSSHYRLVILLIRAMLTK

SEQ ID NO: 83614 - protein, 139 aa, Setaria italica
  misc_feature (36)..(36): Xaa can be any naturally occurring amino acid
  Transcript Sequence Number=SeqID_17640
MAPGQMLLLQQREAHGGSQGEVPRDPERLFRKQTNXSLLVNLLHGAPGLPCYCSCAVLSDANKRFLYDVGVYDDEDDEDSLQGMGDFIGEMAQMMSQARPTRQESFEELQQLFVDMFQSDLDSGFCNGPSKGHHVYGQA

SEQ ID NO: 83615 - protein, 111 aa, Setaria italica
  Transcript Sequence Number=SeqID_17641
  Subcellular localization annotation: CTP_CleavageSite=43; ConfidenceScore=5.39e-01
WPCLAHCRILNQDQTGTCPRTAAAAPQSFPASSPSPPPPTKVMDAEVPSCNGFNKRGSSAMDSGKPPRPVDAGVGQSQAGFCFGVSAPVIINLLCLIMMPCGRNHSYLLCR

SEQ ID NO: 83616 - protein, 100 aa, Setaria italica
  Transcript Sequence Number=SeqID_17642
FCFIHPPRSTRKTQQNNTNEYTTKFVLDDSDTTNVTINSTTPNKYFQLVHHVLNTFQRHARRDTPCLALRLALVGLLERRRLRRCGAVGAAGRRGPERVR

SEQ ID NO: 83617 - protein, 289 aa, Setaria italica
  misc_feature (40)..(40): Xaa can be any naturally occurring amino acid
  misc_feature (275)..(275): Xaa can be any naturally occurring amino acid
  Transcript Sequence Number=SeqID_17643
  Homolog annotation: Hit_ID=Q6K7T6; Match level="QueryCoverage=83%, HitCoverage=47%, E-value=3e-61, Identity=54%"; Hit description =Putative tesmin/TSO1-like CXC domain-containing protein
KLNKAARVAINGTIGSSGYNHSPVRRKRSREDAVGIRINXEGSMPETQFQQGNHADTSLLAPYSTGFDGHSAANSQSKSYNPIYRSPLANTIHLSEVNDLVTQLVTVCRMAAATIADNKVDGTTVEKEFHVNGELSNGNCKQQQLSEASRMDILTRGCSDPPNSNEMDSHWSDTAKDSRPASPTTQALMCDEQDTTFGNDYRSSYPSVSCDQDISEINAAQENLVLTGLREYLRVIITRGKINEHKSSSEAAMELDGRHPHAMPAFAPREVRETXPSSNGIETPGINQN

SEQ ID NO: 83618 - protein, 203 aa, Setaria italica
  Transcript Sequence Number=SeqID_17644
  Gene Ontology: Mol. function=phosphomannomutase activity; Cellular component=cytoplasm; Biological process=mannose biosynthetic process
  Homolog annotation: Hit_ID=Q7XPW5; Match level="QueryCoverage=99%, HitCoverage=81%, E-value=1e-109, Identity=94%"; Hit description =Phosphomannomutase
  Pfam annotation: Domain name=PMM; Domain location=31-203; Score =361.5; E_value=1.6e-105; Accession=PF03332.5; Description=Eukaryotic phosphomannomutase
MAAAGRNAGVLALFDVDGTLTAPRKVVTPEMLEFMKQLRQHVTVGVVGGSDLVKITEQLGKTVLTDYDYVFSENGLVAHKNGELIGTQSLKSFLGEDELKEFINFTLRYIADLDIPIKRGTFIEFRSGMINVSPIGRNCSQEERDEFEKYDKVHNIRPKMVSVLREKFAHLNLTFSIGGQISFDVFPQGWDKTYCLRYLEEFQ

SEQ ID NO: 83619 - protein, 182 aa, Setaria italica
  Transcript Sequence Number=SeqID_17645
  Gene Ontology: Mol. function=phosphomannomutase activity; Cellular component=cytoplasm; Biological process=mannose biosynthetic process
  Homolog annotation: Hit_ID=Q7XPW5; Match level="QueryCoverage=96%, HitCoverage=72%, E-value=1e-96, Identity=93%"; Hit description =Phosphomannomutase
  Pfam annotation: Domain name=PMM; Domain location=1-181; Score=391.9; E_value=1.1e-114; Accession=PF03332.5; Description=Eukaryotic phosphomannomutase
FASLHYCGLVAHKNGELIGTQSLKSFLGEDELKEFINFTLRYIADLDIPIKRGTFIEFRSGMINVSPIGRNCSQEERDEFEKYDKVHNIRPKMVSVLREKFAHLNLTFSIGGQISFDVFPQGWDKTYCLRYLEEFQEIHFFGDKTYKGGNDYEIFESERTVGHTVTSPNDTAQQCRSLFMSN

SEQ ID NO: 83620 - protein, 163 aa, Setaria italica
  Transcript Sequence Number=SeqID_17646
  Gene Ontology: Mol. function=phosphatidylinositol binding; Cellular component=clathrin coat; Biological process=clathrin coat assembly
  Homolog annotation: Hit_ID=B9RP36; Match level="QueryCoverage=88%, HitCoverage=20%, E-value=3e-35, Identity=50%"; Hit description =Clathrin assembly protein, putative
  Pfam annotation: Domain name=ANTH; Domain location=1-125; Score= -74.0; E_value=0.0039; Accession=PF07651.8; Description=ANTH domain
DGLLIRARQLRQLLDRFLACRPAGAARTSRVVLAALYPLLGDSFQLYDEFSAVLAALLDRFFDMEYAECVKAFETYVGAAKQIETLLAFYAWCDDAGVARSSDFPDVKRVDEKLLETLEQFLRVRGRAGLGSPPPLPPQSVHQSAGRDQDEPAEYVDMNGVKA

SEQ ID NO: 83621 - protein, 145 aa, Setaria italica
  Transcript Sequence Number=SeqID_17647
  Gene Ontology: Mol. function=magnesium ion binding; Cellular component=integral to membrane; Biological process=photosynthesis, light harvesting
  Homolog annotation: Hit_ID=P27523; Match level="QueryCoverage=99%, HitCoverage=53%, E-value=3e-75, Identity=95%"; Hit description =Chlorophyll a-b binding protein of LHCII type III, chloroplastic
  Pfam annotation: Domain name=Chloroa_b-bind; Domain location=3-112; Score=81.6; E_value=2.7e-21; Accession=PF00504.13; Description =Chlorophyll A-B binding protein
CVDFKEPVWFKAGAQIFSEGGLDYLGNPNLVHAQSILAVLGFQVILMGLVEGFRINGLDGVGEGNNLYPGGQYFDPLGLADDPVTFAELKVKEIKNGRLAMFSMFGFFVQAIVTGKGPLENLLDHLDDPVANNAWVYATKFAPGS

SEQ ID NO: 83622 - protein, 79 aa, Setaria italica
  Transcript Sequence Number=SeqID_17648
MIYHVVLSAKERPSILKKNTLQRFLQTKRSELESRAATMNCFFSDPFMYGIFPNIGQCIGWRGSSTSQFCTLGSLFHSL

SEQ ID NO: 83623 - protein, 386 aa, Setaria italica
  Transcript Sequence Number=SeqID_17649
  Gene Ontology: Mol. function=protein serine/threonine kinase activity; Cellular component=plasma membrane; Biological process =protein amino acid phosphorylation
  Homolog annotation: Hit_ID=B6SXI8; Match level="QueryCoverage=100%, HitCoverage=70%, E-value=0.0, Identity=81%"; Hit description =Transposon protein
  Pfam annotation: Domain name=Pkinase; Domain location=1-222; Score =147.9; E_value=3.1e-41; Accession=PF00069.17; Description=Protein kinase domain
  Pfam annotation: Domain name=Pkinase_Tyr; Domain location=2-221; Score=-132.2; E_value=6.1e-05; Accession=PF07714.9; Description =Protein tyrosine kinase
  Pfam module annotation: Pfam domain module=Pkinase::Pkinase_Tyr; Domain location=1-222::2-221
DGLVTSRMSCSLYLVFDYMVHDLAGLAASPEIKFTLPQVKCYVHQLLSGLEHCHNRGVLHRDIKGSNLLLDNNGVLKIADFGLASFFDPNHKQPMTSRVVTLWYRPPELLLGATDYGVGVDLWSAGCILAELLAGKPIMPGRTEVEQLHKIFKLCGSPTEEYWKKSKLPHATIFKPQQPYKRRIADTFKDFPQSALRLIETLLAIDPADRLTATSALQSDFFTTEPHACEPSSLPQYPPSKEMDAKRRDEEARRLRAAGGRANGDGARKTRTRDRPRAVPAPEANAELQANIDKRRLITHANAKSKSEKFPPPHQDGALGYPLGCSNHMEPAFEPPDPSSFSTVFPYEKGAVPTWSGPLADSAAGNQKRKHKSGRSSKQPSTARAR

SEQ ID NO: 83624 - protein, 91 aa, Setaria italica
  Transcript Sequence Number=SeqID_17650
MRMLSRSWRSASLFPVIVFALLFSTSFAGRQCNFLTDQDALRHQGEAAGAEQKEAVVPLVHGRMLNVKTNDYGSYDPSPTTDKPHFKLIPN

SEQ ID NO: 83625 - protein, 139 aa, Setaria italica
  Transcript Sequence Number=SeqID_17651
GEAGGVRLFPLRGLMKSGKEKEGKKEGVGAAGRKSLQKKNGMMNGWVMPVRRGSHGGGGEGDDVSTRKLTTLRLKQSSGSYCPFLLTFQNDGHNSKGGMELLKSEKAVSIHPLSKNKFLVLDSYGVLHVFSLSTTEVGS

SEQ ID NO: 83626 - protein, 103 aa, Setaria italica
  Transcript Sequence Number=SeqID_17652
GGKKEGEKVGVGAAGRKSLQKKNGMMNGWVMPVRRGSHGGGGEGDDVSTRKLTTLRLKQSSGSYCPFLLTFQNDGHNSKGGMYVYFQNIAFWQLLSPLLLLKD

SEQ ID NO: 83627 - protein, 83 aa, Setaria italica
  Transcript Sequence Number=SeqID_17653
YTNINQGACIYHGCMAAKNMIVSWRRGVQKEATRTWRSWLGVFFHMYIFACCSLESKGVICSCTLQHPINDPIEYIRNYVKES

SEQ ID NO: 83628 - protein, 128 aa, Setaria italica
  misc_feature (114)..(114): Xaa can be any naturally occurring amino acid
  Transcript Sequence Number=SeqID_17654
  Gene Ontology: Mol. function=protein serine/threonine kinase activity; Cellular component=intracellular; Biological process =protein amino acid phosphorylation
  Homolog annotation: Hit_ID=A3FK65; Match level="QueryCoverage=100%, HitCoverage=24%, E-value=4e-59, Identity=85%"; Hit description =Mitogen-activated protein kinase kinase 3
MAGLEELKKKLQPLLFDDPDRGGVSTRVPLPEDTCNSYVVSDGGTVNLLSRSLGEYNINEHGFHKRSAGPDESDSDEKAYCCASHEMHIFGPIGNGASSVVERAIFIPVHRILXLKKINIFEKEKRQQ

SEQ ID NO: 83629 - protein, 66 aa, Setaria italica
  Transcript Sequence Number=SeqID_17655
IILKSSSEYDGINQYHFIAFFSDVEIPGTPGALATTFLTFVLNLVASAPGVPVELVLFLSPPLSMT

SEQ ID NO: 83630 - protein, 317 aa, Setaria italica
  Transcript Sequence Number=SeqID_17656
  Gene Ontology: Mol. function=metal ion binding; Cellular component =integral to membrane
  Homolog annotation: Hit_ID=B4FNS6; Match level="QueryCoverage=100%, HitCoverage=100%, E-value=1e-118, Identity=66%"; Hit description =Palmitoyltransferase ZDHHC20
  Pfam annotation: Domain name=zf-DHHC; Domain location=126-190; Score =129.0; E_value=1.6e-35; Accession=PF01529.12; Description=DHHC zinc finger domain
MHRSGTAMAWNVFKFCTALRGLGSVMILLVLGIVGVTYYALVLCNYGPVLLAATGALDALVALVVLVLFHFLLAMLLWSYFSVVFTDPGGVPPNWRPDVDEESGETAPLSTAEFSDLMNSQQSMALSDTGSPRIRYCRKCNQLKPPRCHHCSVCGRCVLKMDHHCVWVVNCVGALNYKFFLLFLLYTFLETALVTLSLLPHFIAFFSDVEIPGTPGALATTFLTFVLNLAFTLSVLGFMIMHVSLVSGNTTTIEAYEKKTTPFWKYDLGRKRNFAQVFGNNKWYWFIPSYSEEDLRIIPALQGLDYPVRSDFDGQGL

SEQ ID NO: 83631 - protein, 215 aa, Setaria italica
  Transcript Sequence Number=SeqID_17657
  Gene Ontology: Mol. function=protein dimerization activity
  Homolog annotation: Hit_ID=B9SDY5; Match level="QueryCoverage=70%, HitCoverage=20%, E-value=1e-36, Identity=50%"; Hit description=DNA binding protein, putative
  Pfam annotation: Domain name=DUF659; Domain location=108-215; Score =102.7; E_value=1.3e-27; Accession=PF04937.7; Description=Protein of unknown function (DUF 659)
  Subcellular localization annotation: CTP_CleavageSite=48; ConfidenceScore=5.50e-01
MRGSVSSKKKRKMLSNASTPPLTPPTLQQHVPSTPQTNPLHQVVMAVDAVTPSSGHFGHAGLDKEQVSVAVGRFLYDVGVPLEAVNSVYFQPMLEAIASAGGRPEALSYHDFRGHILKKSLDDATSRLEFFKGSWTRTGCSVLADEWITDKGRTLINFSVYCPEGTMFLKSVDATSIVASSDALYELLKSVVEEVGEKKVVQVITNNSEIHAAAG

SEQ ID NO: 83632 - protein, 644 aa, Setaria italica
  Transcript Sequence Number=SeqID_17658
  Gene Ontology: Mol. function=methyltransferase activity; Cellular component=integral to membrane; Biological process=vesicle-mediated transport
  Homolog annotation: Hit_ID=B9SQN1; Match level="QueryCoverage=98%, HitCoverage=58%, E-value=4e-79, Identity=40%"; Hit description =Nucleotide binding protein, putative
  Pfam annotation: Domain name=WD40; Domain location=130-167; Score =9.9; E_value=2.7; Accession=PF00400.24; Description=WD domain, G -beta repeat
  Pfam annotation: Domain name=WD40; Domain location=62-100; Score =10.9; E_value=2.1; Accession=PF00400.24; Description=WD domain, G -beta repeat
  Pfam annotation: Domain name=WD40; Domain location=8-47; Score=6.8; E_ value=6.2; Accession=PF00400.24; Description=WD domain, G-beta repeat
  Pfam module annotation: Pfam domain module=WD40::WD40::WD40; Domain location=130-167::62-100::8-47
NAGPFISGNMKWPLTGGVPSEMSLNEDHGVGRLYIAGYQDGSVRIWDATFPVLMPMFVLDGKVADINLDGANASVSSLAFCSLNMTLAVGTTSGLVRIYKLREHTGGSSFHFVSDSKQEVHVVHQGKGFHCHVAFLASHSPVRSLLFTASGEVLAAGYQNGQVAMLDLSQLSILFTVDCASGTNSPVVSLGIYSVAPSAAKADESKKESPQNAMLLRDILLSLTKDGRVTVLDCTTGVMINSHILDLKQSSAISMYVIDGASDEKQTQLSEDTIGSQGQTGKEGNDLDKKQAPGVGKHLKNASHLSQNGGSDSLLLVCCEDVLLLLSLAPLVQGNNKHLHKTKLAKPCCWSAVFKNMDGKICGLILAYQTGTIELRSVPDLAIVAESSLMSLLRWSYKAGMDKSMSSSNGQITLVNGSEFGIISLMALENDFRIPESLPCLHDKVLAAAAEAAISFSTDQRRKQNRAAGILGGIIKGMKGKAEENAKMRESFTVQTPSEHLESIFLKDSFVEPSIPNLDDPIEELSIDDIEIDDEVPVAQASASSSTFHGNKRTAEEEREKLFEGSSDIGKPRMRTPQEILTKYKFGGDAAAAAAHAKDKLMQRQEKLERISQQTAELQNGAENFASLAQELAKTMENKKWWKL

SEQ ID NO: 83633 - protein, 56 aa, Setaria italica
  Transcript Sequence Number=SeqID_17659
SGGICHFRYTEIHRNQNLRCKPKSAQADHMENLFQVIWLFKKKVCTSNSSTSRLIQ

SEQ ID NO: 83634 - protein, 103 aa, Setaria italica
  Transcript Sequence Number=SeqID_17660
  Gene Ontology: Mol. function=triacylglycerol lipase activity; Biological process=lipid metabolic process
  Homolog annotation: Hit_ID=B4F9H3; Match level="QueryCoverage=100%, HitCoverage=22%, E-value=4e-40, Identity=74%"; Hit description =Calmodulin-binding heat-shock protein
  Pfam annotation: Domain name=Lipase3_N; Domain location=6-74; Score =66.1; E_value=1.3e-16; Accession=PF03893.8; Description=Lipase 3 N -terminal region
MSVSCGLEWVVCLGCTRWAWKRLTYIGAYDSETWPAAAPAEFEPVPRLCRVVLANYDPDLSNPKFAPPGRGYADVDPKGIVKRATYDDVGNRCPPYLIYVDEA

SEQ ID NO: 83635 - protein, 71 aa, Setaria italica
  Transcript Sequence Number=SeqID_17661
  Homolog annotation: Hit_ID=A8JCU9; Match level="QueryCoverage=95%, HitCoverage=98%, E-value=1e-10, Identity=48%"; Hit description =Cytochrome c oxidase assembly protein
  Pfam annotation: Domain name=Pet191_N; Domain location=1-68; Score =132.8; E_value=1.1e-36; Accession=PF10203.1; Description=Cytochrome c oxidase assembly protein
MAKSCKGLAMELVKCLSETDCVKVQKRPYKECAGEKVPNITSECVGLRETYFNCKRGQVDMRARIRGNKGY

SEQ ID NO: 83636 - protein, 380 aa, Setaria italica
  Transcript Sequence Number=SeqID_17662
  Gene Ontology: Mol. function=hydrolase activity
  Homolog annotation: Hit_ID=B6SRX1; Match level="QueryCoverage=95%, HitCoverage=95%, E-value=0.0, Identity=92%"; Hit description =Hydrolase-like protein
  Pfam annotation: Domain name=Abhydrolase_1; Domain location=152-377; Score=40.3; E_value=7.7e-09; Accession=PF00561.12; Description =alphabeta hydrolase fold
MAPPLAVVGPALAAPSFRTALPFRLRPRKIPSWRRAALPNDEDYYLIDAEESIGDGFSFSGGKYGEGPSKSDEWFAQGKMIDAYPVYGDKGKAKDPFFGLTMGSGSQPSDDVFRWFCVEAGNSSNPKVLLIHGLPSQAYSYRNVLPVLSDKYHAVAFDWLGFGFSDKPQPKYGFDYTLDEYTASLESLVNAVAPDKLSIVVQGYFAPVAVKYASEYQDKLNHLVLVNPPITDKHVSLPSPLASFSNFLLGEIFSQDPLRASDKVLTSCGPYMMKEEDAMVYRRPYLVSGSSGFALNAISKAMKKDLKAYIESMRSILGSDSWKTKTTICWGMRDRWLSYDGVEEFFGGLNQKIVELPMAGHHVQEDRGEELGNIIKSILR

SEQ ID NO: 83637 - protein, 166 aa, Setaria italica
  Transcript Sequence Number=SeqID_17663
  Gene Ontology: Cellular component=chloroplast
  Subcellular localization annotation: CTP_CleavageSite=43; ConfidenceScore=5.62e-01
METLAATPRPLFPGASPAALMATAARRTTPPARRRCAGAAPVRAASAAAAGEEKPAAAPKAAAAAGDGAAPKKLLKKKPVYSMKKGQIVRVDKEKYLNSINYLSVGHPPFYKGLDYIYEDRGEVLDIKIFETGEYALIAWVGIPTPPAWLPTYMLIKSDKLDYERI

SEQ ID NO: 83638 - protein, 75 aa, Setaria italica
  Transcript Sequence Number=SeqID_17664
  Gene Ontology: Cellular component=extracellular region; Biological process=plant-type cell wall organization and biogenesis
  Homolog annotation: Hit_ID=Q9XHX0; Match level="QueryCoverage=44%, HitCoverage=13%, E-value=3e-12, Identity=96%"; Hit description =Expansin-A8
  Pfam annotation: Domain name=DPBB_1; Domain location=8-66; Score=7.1; E_value=0.0012; Accession=PF03330.10; Description=Rare lipoprotein A (RlpA)-like double
HAGEDARAPAGPVRLLPPRRVGGGGSVDARLRHVLRRQRRLRHFDMSQPAWETIAVYRAGIVPVNYRRVPCRRSG

SEQ ID NO: 83639 - protein, 141 aa, Setaria italica
  misc_feature (50)..(50): Xaa can be any naturally occurring amino acid
  Transcript Sequence Number=SeqID_17665
  Gene Ontology: Cellular component=extracellular region; Biological process=plant-type cell wall organization and biogenesis
  Homolog annotation: Hit_ID=Q4PR39; Match level="QueryCoverage=70%, HitCoverage=37%, E-value=1e-41, Identity=80%"; Hit description =Expansin-A29
  Pfam annotation: Domain name=DPBB_1; Domain location=61-130; Score =67.7; E_value=4.2e-17; Accession=PF03330.10; Description=Rare lipoprotein A (RlpA)-like double
MEMPRPLAVFLAVAALLAAPAVVAAWSKGTATFYGGSDASGTMGGACGYXNLYSTGYGTATTALSQALFSGGASCGQCFQIMCDSQTDGRWCRAGASVTVTATNLCPPNYAVPSDNGGWCNPPRARPLRFILKKRRSSALC

SEQ ID NO: 83640 - protein, 110 aa, Setaria italica
  Transcript Sequence Number=SeqID_17666
  Gene Ontology: Cellular component=extracellular region; Biological process=plant-type cell wall organization and biogenesis
  Homolog annotation: Hit_ID=Q4PNY1; Match level="QueryCoverage=100%, HitCoverage=44%, E-value=2e-45, Identity=80%"; Hit description =Expansin-A11
  Pfam annotation: Domain name=Pollen_allerg_1; Domain location=19-96; Score=161.2; E_value=3e-45; Accession=PF01357.13; Description=Pollen allergen
AGVVPVQYRRVACGRQGGIRFTISGHSYFVLVLITNVGGAGDVMAVSLKGSQTGWQSMSHNWGANWQSNALLDRQALSFQVTASDGRTVTCPNAAPSGWSYGQTFSGNQF

SEQ ID NO: 83641 - protein, 101 aa, Setaria italica
  Transcript Sequence Number=SeqID_17667
  Gene Ontology: Cellular component=extracellular region; Biological process=plant-type cell wall organization and biogenesis
  Homolog annotation: Hit_ID=Q9XHX0; Match level="QueryCoverage=78%, HitCoverage=31%, E-value=3e-31, Identity=84%"; Hit description =Expansin-A8
MQAKMLALQLALCAFFLLEGSAAAVQWTPAFATFYGGSDASGTMGGACGYDNLYSAGYGTRTAALSTALFNNGAMCGACFTIACDARKSRYCKPGTSITVT

SEQ ID NO: 83642 - protein, 108 aa, Setaria italica
  Transcript Sequence Number=SeqID_17668
  Gene Ontology: Cellular component=extracellular region; Biological process=plant-type cell wall organization and biogenesis
  Homolog annotation: Hit_ID=Q0DHB7; Match level="QueryCoverage=80%, HitCoverage=35%, E-value=2e-31, Identity=80%"; Hit description =Expansin-A4
  Pfam annotation: Domain name=DPBB_1; Domain location=61-107; Score =32.7; E_value=1.5e-06; Accession=PF03330.10; Description=Rare lipoprotein A (RlpA)-like double
MAVAGALFLLFSLLAREAAAGGYGGWQSAHATFYGGGDASGTMGGACGYGNLYSSGYGTNTAALSTALFNDGAACGSCYELRCQNAGGSCLPGSITVTATNFCPPNYG

SEQ ID NO: 83643 - protein, 110 aa, Setaria italica
  Transcript Sequence Number=SeqID_17669
  Gene Ontology: Cellular component=extracellular region; Biological process=plant-type cell wall organization and biogenesis
  Homolog annotation: Hit_ID=B6TP92; Match level="QueryCoverage=93%, HitCoverage=35%, E-value=7e-50, Identity=93%"; Hit description=Alpha- expansin 15
  Pfam annotation: Domain name=Pollen_allerg_1; Domain location=17-95; Score=172.6; E_value=1.1e-48; Accession=PF01357.13; Description =Pollen allergen
FLFATCCRVACNKKGGIRFTINGHSYFNLVLVTNVGGAGDVHSVAVKGDRSAGWQAMSRNWGQNWQSNTLLDGQALSFRVTTSDGRSVVSNNAAPRGWSFGQTFSGAQFN

SEQ ID NO: 83644 - protein, 252 aa, Setaria italica
  misc_feature (53)..(53): Xaa can be any naturally occurring amino acid
  Transcript Sequence Number=SeqID_17670
  Gene Ontology: Cellular component=extracellular region; Biological process=plant-type cell wall organization and biogenesis
  Homolog annotation: Hit_ID=B6TP92; Match level="QueryCoverage=90%, HitCoverage=78%, E-value=1e-112, Identity=87%"; Hit description =Alpha-expansin 15
  Pfam annotation: Domain name=DPBB_1; Domain location=62-150; Score =166.8; E_value=6.4e-47; Accession=PF03330.10; Description=Rare lipoprotein A (RlpA)-like double
  Pfam annotation: Domain name=Pollen_allerg_1; Domain location=161 -238; Score=171.5; E_value=2.5e-48; Accession=PF01357.13; Description= Pollen allergen
  Pfam module annotation: Pfam domain module=DPBB_1::Pollen_allerg_1; Domain location=62-150::161-238
MAVAGALFLLFSLLAREAAAGGYGGWQSAHATFYGGGDASGTIGACTGNGNLXYSQGYGTNTAALSTALFNNGLSCGACFEVRCDAAGGGGHSCLPGSVVVTATNFCPPNNALPSDDGGWCNPPRAHFDMSQPVFQRIALYRAGIVPVSYRRVACNKKGGIRFTINGHSYFNLVLVTNVAGAGDVQSVSIKGSSTGWQAMSRNWGQNWQSNSLLDGQALSFKVTASDGRCVTSNNAAPAGWSFGQTFEGSQF

SEQ ID NO: 83645 - protein, 275 aa, Setaria italica
  Transcript Sequence Number=SeqID_17671
  Gene Ontology: Cellular component=extracellular region; Biological process=plant-type cell wall organization and biogenesis
  Homolog annotation: Hit_ID=Q0DHB7; Match level="QueryCoverage=90%, HitCoverage=100%, E-value=1e-115, Identity=82%"; Hit description =Expansin-A4
  Pfam annotation: Domain name=DPBB_1; Domain location=88-173; Score =169.7; E_value=8.7e-48; Accession=PF03330.10; Description=Rare lipoprotein A (RlpA)-like double
  Pfam annotation: Domain name=Pollen_allerg_1; Domain location=184 -261; Score=174.8; E_value=2.5e-49; Accession=PF01357.13; Description= Pollen allergen
  Pfam module annotation: Pfam domain module=DPBB_1::Pollen_allerg_1; Domain location=88-173::184-261
  Subcellular localization annotation: CTP_CleavageSite=23; ConfidenceScore=5.04e-01
QLSILISSLALARSLASSRGSVCAAMATANVLLLLCSAVCFLARRAAGDYGGWQSAHATFYGGGDASGTMGGACGYGNLYSTGYGTNTAALSTALFNDGASCGQCFELRCDNAGASCLPGTITVTATNFCPPNYGLPSDDGGWCNPPRPHFDMAQPAFLHIAQYRAGIVPVAYRRVPCVKKGGIRFTINGHSYFNLVLVTNVAGAGDVRSVSIRGSRTGWQPMSRNWGQNWQSNAFLDRQALSFQVTASDGRTVTSTNAAPAGWQFGQTFEGRQF

SEQ ID NO: 83646 - protein, 91 aa, Setaria italica
  Transcript Sequence Number=SeqID_17672
  Subcellular localization annotation: CTP_CleavageSite=55; ConfidenceScore=5.35e-01
AHVHVMCPAAPPRTWPHVGCCSTRTRDPARPRPTPNHAAPALSAYACGLPAAAVPLMTDPSRRRQGQGAAPANDESLRIRVPTGAWISRSW

SEQ ID NO: 83647 - protein, 312 aa, Setaria italica
  misc_feature (104)..(104): Xaa can be any naturally occurring amino acid
  Transcript Sequence Number=SeqID_17673
  Homolog annotation: Hit_ID=A0S6X5; Match level="QueryCoverage=90%, HitCoverage=84%, E-value=4e-39, Identity=39%"; Hit description =Microtubule-associated protein
MHDRSHNPQPAEAGAGNGGAAGEGGGGGKGDRVLFKNLVEMVPLVESLMDRRVNPSYSRRASLVYTPAPAKKASDLKSVKSPQSVSAKKRRDPGDAAKKSTPDXNGENGSVSPLSLSGAENKPKDEIAVLREQIDDLQKKLLEKEEALRYAENSVNEMNVAYATIDELRRQVAEQEALIRSTNSQLHDAKIMLADKQASLEKLEWEVKTSNKKVEDLQGDMSNMEFEISSLMALFEKVSENVSGDCYDGSIPSSYELEALQSTSEIDKIEVEKIEQERITYAEALAAARENPNEERLNLAAEARSRLQVLVL

SEQ ID NO: 83648 - protein, 146 aa, Setaria italica
  Transcript Sequence Number=SeqID_17674
  Gene Ontology: Mol. function=helicase activity; Cellular component =mitochondrion
  Homolog annotation: Hit_ID=Q338A4; Match level="QueryCoverage=99%, HitCoverage=73%, E-value=4e-67, Identity=37%"; Hit description =Pentatricopeptide, putative, expressed
  Pfam annotation: Domain name=PPR; Domain location=19-53; Score=13.4; E_value=0.23; Accession=PF01535.12; Description=PPR repeat
  Pfam annotation: Domain name=PPR; Domain location=54-88; Score=48.7; E_value=2.3e-11; Accession=PF01535.12; Description=PPR repeat
  Pfam annotation: Domain name=PPR; Domain location=89-123; Score=37.3; E_value=6.2e-08; Accession=PF01535.12; Description=PPR repeat
  Pfam module annotation: Pfam domain module=PPR::PPR::PPR; Domain location=19-53::54-88::89-123
DAKDVFWKMKASDQKPDRVTYITLLDKCGDSGDPQSVIEIWNAMETDGYNDNIVAYTAVVDALCQVGRVDEAFAVFEEMKQKGISPEQYSYNSLISGFLKADMFDRALELLNHMNVHGPSPNGYTHVLFINYYGKSGQSLKAITKI

SEQ ID NO: 83649 - protein, 51 aa, Setaria italica
  Transcript Sequence Number=SeqID_17675
  Gene Ontology: Mol. function=ubiquitin thiolesterase activity; Biological process=ubiquitin-dependent protein catabolic process
NAHEFLRYAIDTMQSASVKEAKKNGVHKLAEESTLVQLIFGGYLQSKVFFM

SEQ ID NO: 83650 - protein, 65 aa, Setaria italica
  Transcript Sequence Number=SeqID_17676
GPAITCQQVGSMGSIDLSDEDRIGCSYLVSVEGWLLPTLFQNPSANLKPVIVLLRKLTSLIHVMA

SEQ ID NO: 83651 - protein, 66 aa, Setaria italica
  Transcript Sequence Number=SeqID_17677
GLSRRQVIEKLPYVCHSNYSQSDLHPTDLLSPCSRLVGKLLLDLMYASPICWLDRMYASVDFSGLI

SEQ ID NO: 83652 - protein, 773 aa, Setaria italica
  misc_feature (177)..(177): Xaa can be any naturally occurring amino acid
  Transcript Sequence Number=SeqID_17678
  Gene Ontology: Mol. function=ubiquitin thiolesterase activity; Cellular component=integral to membrane; Biological process =ubiquitin-dependent protein catabolic process
  Homolog annotation: Hit_ID=Q9FKP5; Match level="QueryCoverage=67%, HitCoverage=79%, E-value=1e-104, Identity=55%"; Hit description =Ubiquitin carboxyl-terminal hydrolase 17
  Pfam annotation: Domain name=UCH; Domain location=228-533; Score =204.4; E_value=3.1e-58; Accession=PF00443.21; Description=Ubiquitin carboxyl-terminal hydrolase
  Pfam annotation: Domain name=zf-MYND; Domain location=15-52; Score =36.7; E_value=9.5e-08; Accession=PF01753.10; Description=MYND finger
  Pfam module annotation: Pfam domain module=UCH::zf-MYND; Domain location=228-533::15-52
EVAVAASTPPGKGVCAMCARPTTLRCKRCKSVKYCTFKCQIDHWRKGHKDECHPRNLGARQDGAPENVVTRVEVKDMPPDKPSNTAEVPAEYSQFTGKAESVDCSRLTTSSNAAKVHDTAVCEKIYLTTPDQHIELESELEQSNKQALGADNHESSRNSPCMSAVDKVSSAHSSAYXSSGVMPNNPSTEKKYARQQTAIKVVRHYATELALFPYKHFIELYNFEKLELHPFGLCNLGNSCYANAVLQCLAFTRPLTAYLLEGYHSRNCSKMEWCFMCELEKVMTEGKCGKAPVSPTGILSHLNEIGTSFGQGREEDAHEFLRYAIDTMQSASVKEAKKNGVHKLAEESTLVQLIFGGYLQSKIICTKCQVSSAQSERILDLTVEIDGDINTLEGALRRFTSSEVLDGDNRYHCSRCMSYERAKKKLMISEAPNILTIALKRYQSGVYGKISKDVKFPEHLNLSQFMCETDDYSPVYSLYAVVVHHDVMNTTISGHYVCYVKDPQGKWHEMDDSKVKPVSLKKVLSKCAYMLLYARCSPRVPDSVRKAMINQGASHAKKPKKMADSESTPLGGGNYVSMHQGGNLCKDRAVHHLTYTSEASDGWSYPIPGFSRSDSSSLFSNSDAGSSSTLSSDSTNSTRNLASMEYDYIFGASDHMHPVSPAVIPEEDELSYLRQRSSFNPCSSGHYMDQGGEFAQQYYHRLQVGGGVLEEGGEKPSFYTDQGKQNSSSNRNRSFSRSCKITEQRRYTCTGAAFFLEGRGLSKHFTGRGGLGL

SEQ ID NO: 83653 - protein, 402 aa, Setaria italica
  Transcript Sequence Number=SeqID_17679
  Gene Ontology: Mol. function=nucleic acid binding; Cellular component= INO80 complex; Biological process=regulation of transcription, DNA -dependent
  Homolog annotation: Hit_ID=Q10LF6; Match level="QueryCoverage=99%, HitCoverage=27%, E-value=1e-163, Identity=72%"; Hit description =Transcriptional activator, putative, expressed
  Pfam annotation: Domain name=Helicase_C; Domain location=114-192; Score=94.1; E_value=4.9e-25; Accession=PF00271.23; Description =Helicase conserved C-terminal domain
AYKFTDEMHDPWAKKLFLGFARTSEFNGPRQPAGLHPLIQELHTDLPILEPMLQLPYRIFGSSPPMSNFDPAKMLTDSGKLHTLDMLLRRLRAEGHRVLLFAQMTKMLDILEDYMNFRKFKYFRLDGSSAISDRRDMVRDFQNRNDVFVFLLSTRAGGLGINLTAADTVIFYEIDWNPTQDQQAMDRTHRLGQTKEVTVYRLICKDTIEEKILQRAKQKNAVQELVMKGKHVQDDHLMRQEDVVSLLLDDTQIAHKLKEISMQAKDRQKKRRAKGIKVDKEGDLTLEDLDDATAEAVDQDNATNKKKKSSHKKHSRTHDNDNVDKNGEAPTGGDLTGSGHAENEQIAEPRPKRSKRLMKGMSDDKEPAAAADHEKPADEVENHTGHEYDDTEEVQDGVKSTE

SEQ ID NO: 83654 - protein, 555 aa, Setaria italica
  misc_feature (523)..(523): Xaa can be any naturally occurring amino acid
  misc_feature (543)..(543): Xaa can be any naturally occurring amino acid
  Transcript Sequence Number=SeqID_17680
  Gene Ontology: Mol. function=nucleic acid binding; Cellular component= nucleus; Biological process=regulation of transcription, DNA-dependent
  Homolog annotation: Hit_ID=Q10LF6; Match level="QueryCoverage=96%, HitCoverage=36%, E-value=0.0, Identity=84%"; Hit description =Transcriptional activator, putative, expressed
  Pfam annotation: Domain name=SNF2_N; Domain location=1-209; Score =87.3; E_value=5.5e-23; Accession=PF00176.15; Description=SNF2 family N-terminal domain
STPKRLYRRDASFHILITNYQILVNEEKLLRRVKWQYMVLDEAQAIKSSSSQRWKTLLSFNCRNRLLLTGTPIQNNMAELWALLHFIMPTLFDSHEQFNEWFSKGIEGHAEHGGALNEHQLSRLHAILKPFMLRRVKIDVIAEMTKKKEEIVPCKLSSRQQVFYQAIKNKISLNELLDGSRGNLNDKKLLSLMNIVMQLRKVCNHPELFERNEGSSYFYFADIPNSLLSPPFGELQDVYYAGKRNPITFEIPKLVYEGIIRNMEISGNGCGFRSGYLNRLFNIFLPSNIHCSAIPEASSSDVSVLSSGVFGFTRLSNISPVEASFLATSSLFERLAFLAMQLNRNYTDEIMDAFIDSEGPDVFSQNDSTSIRAVARLLSSTKTKPSFLRTKIGTGPGDCPYEALVLSHHDRLASNIRLLRSAYAFIPPARAPPINVWCADRNFAYKFTDEMHDPWAKKLFLGFARTSEFNGPRQPAGLHPLIQELHTDLPILEPMLQLPYRIFGSSPPMSNFDPAKMLTDSGXLHTLDMLLRRLRAEGHRVLXFAQMTKMLDILE

SEQ ID NO: 83655 - protein, 45 aa, Setaria italica
  Transcript Sequence Number=SeqID_17681
VRGCIVSQDLSVINLVIVKKLRAFFDKRISQEVSGDALGEEFKGY

SEQ ID NO: 83656 - protein, 92 aa, Setaria italica
  Transcript Sequence Number=SeqID_17682
  Gene Ontology: Mol. function=structural constituent of ribosome; Cellular component=ribonucleoprotein complex; Biological process =translation
  Homolog annotation: Hit_ID=O48549; Match level="QueryCoverage=72%, HitCoverage=26%, E-value=2e-17, Identity=67%"; Hit description=40S ribosomal protein S6-1
  Pfam annotation: Domain name=Ribosomal_S6e; Domain location=2-78; Score=34.7; E_value=3e-08; Accession=PF01092.11; Description =Ribosomal protein S6e
RASPLTSWEILLSKRHAASGRVRLLLHRGTPCFRGYGRRDGERRRKSVRGCIVSQDLSVINLVIVKKGENDLPGLTDTEKPDLGGPLGSPHS

SEQ ID NO: 83657 - protein, 58 aa, Setaria italica
  Transcript Sequence Number=SeqID_17683
SRIAEKKKRIAKKQADAAEYQKLLAQRLKEQRERRSESLAKRRSKLSTAAKASAATSA

SEQ ID NO: 83658 - protein, 199 aa, Setaria italica
  Transcript Sequence Number=SeqID_17684
  Gene Ontology: Mol. function=structural constituent of ribosome; Cellular component=ribonucleoprotein complex; Biological process =translation
  Homolog annotation: Hit_ID=Q9M3V8; Match level="QueryCoverage=73%, HitCoverage=58%, E-value=4e-60, Identity=78%"; Hit description=40S ribosomal protein S6
  Pfam annotation: Domain name=Ribosomal_S6e; Domain location=13-141; Score=254.6; E_value=2.4e-73; Accession=PF01092.11; Description =Ribosomal protein S6e
ILADNATTDRLPPAFNIANPTTGCQKKLEIDDDQKLRAFFDKRISQEVSGDALGEEFKGYVFKIMGGCDKQGFPMKQGVLTSGRVRLLLHRGTPCFRGYGRRDGERRRKSVRGCIVSQDLSVINLVIVKKGENDLPGLTDTEKPRMRGHQTLDLRSLAHLLAVLGSECPAIGVHILADIIILGKVEQLPDLGGPLGSPH

SEQ ID NO: 83659 - protein, 80 aa, Setaria italica
  Transcript Sequence Number=SeqID_17685
IALEFLAKSITKNLLGDPFVKEGTPIVDKKALANKQVMLHTVYNYIITVGRNIICKIFTTRRTKLSQFTRYTRNVITLFQ

SEQ ID NO: 83660 - protein, 123 aa, Setaria italica
  misc_feature (17)..(17): Xaa can be any naturally occurring amino acid
  Transcript Sequence Number=SeqID_17686
  Gene Ontology: Mol. function=structural constituent of ribosome; Cellular component=ribonucleoprotein complex; Biological process =translation
  Homolog annotation: Hit_ID=Q9M3V8; Match level="QueryCoverage=79%, HitCoverage=37%, E-value=8e-27, Identity=67%"; Hit description=40S ribosomal protein S6
  Subcellular localization annotation: CTP_CleavageSite=65; ConfidenceScore=5.10e-01
PRMRGPKRASKIQGKTXLQTFPKDDDVRKYVNTYRRTFTTKNGKKVSKAPKIQRLVTPLTLQRKRARIADKKKRIAKKQSEAAEYQKLLAQRLKEQRDRRSESLAKRRSKLSSAAKASAATSA

SEQ ID NO: 83661 - protein, 252 aa, Setaria italica
  misc_feature (136)..(136): Xaa can be any naturally occurring amino acid
  Transcript Sequence Number=SeqID_17687
  Gene Ontology: Mol. function=structural constituent of ribosome; Cellular component=ribonucleoprotein complex; Biological process =translation
  Homolog annotation: Hit_ID=Q2HTS1; Match level="QueryCoverage=92%, HitCoverage=93%, E-value=2e-94, Identity=75%"; Hit description =Ribosomal protein S6e
  Pfam annotation: Domain name=Ribosomal_S6e; Domain location=1-129; Score=261.9; E_value=1.5e-75; Accession=PF01092.11; Description =Ribosomal protein S6e
MKFNIANPTTGCQKKLEIDDDQKLRAFFDKRISQEVLGDALGEEFKGYVFKIMGGCDKQGFPMKQGVLTSGRVRLLLHRGTPCFRGYGRRDGERRRKSVRGCIVSQDLSVINLVIVKKGENDLPGLTDTEKPRMRXGPKRASKIRKLFNLTKDDDVRKYVNTYRRTFTTKNGKKVSKAPKIQRLVTPQVIQRKRARIAEKKKRIAKKQADAAEYQKLLAQRLKEQRERRSESLAKRRSKLSTAAKASAATSA

SEQ ID NO: 83662 - protein, 153 aa, Setaria italica
  misc_feature (134)..(134): Xaa can be any naturally occurring amino acid
  Transcript Sequence Number=SeqID_17688
  Gene Ontology: Mol. function=DNA binding; Cellular component=nucleus; Biological process=regulation of transcription, DNA-dependent
  Homolog annotation: Hit_ID=Q9FUY2; Match level="QueryCoverage=55%, HitCoverage=9%, E-value=1e-42, Identity=91%"; Hit description =Transcriptional corepressor LEUNIG
  Pfam annotation: Domain name=LisH; Domain location=24-50; Score=38.7; E_value=2.3e-08; Accession=PF08513.3; Description=LisH
MSQSQSQSQSQSQSQSQTNWEADKMLDVYIYDYFVKRNLQATAKAFQAEGKVSSDPVAIDAPGGFLFEWWSVFWDIFIARTNEKHSDVAASYIETQLIKAREQQHQQPPQQQQQQQQIQMQQMLLQRAAQQQQXQQQQQQQQRRDGSLLNGAA

SEQ ID NO: 83663 - protein, 66 aa, Setaria italica
  Transcript Sequence Number=SeqID_17689
GDISCCCNISESQDLSNELEEDYIHSKSSLDCAAIGFCDGLVNMIHCISVGCDLSANISISFVLIL

SEQ ID NO: 83664 - protein, 118 aa, Setaria italica
  Transcript Sequence Number=SeqID_17690
  Subcellular localization annotation: CTP_CleavageSite=43; ConfidenceScore=5.18e-01
LGTGTHIHSPAAYFTLYSARAMATCRSLLMVPVTLCFFLLVLPAQSKENLAVVIFYGTARCKSNPSKIISNATLHVTINGTTLATGKMTSMGRFLMAARVTSKDQLSSLVSKKAVITA

SEQ ID NO: 83665 - protein, 191 aa, Setaria italica
  Transcript Sequence Number=SeqID_17691
  Gene Ontology: Mol. function=ubiquitin-protein ligase activity; Cellular component=ubiquitin ligase complex; Biological process =ubiquitin-dependent protein catabolic process
  Homolog annotation: Hit_ID=B9T5H9; Match level="QueryCoverage=99%, HitCoverage=70%, E-value=2e-64, Identity=61%"; Hit description=Heat shock protein 70 (HSP70)-interacting protein, putative
  Pfam annotation: Domain name=U-box; Domain location=113-187; Score =116.4; E_value=9.3e-32; Accession=PF04564.7; Description=U-box domain
KGHYMLGLALVNSQRLSEGIKALEKSLELGRGAHPASYMVEEIWQELSKAKYIEWEGLSRERAFQLQKLKVECKQALRNYNSLGNPAADEPEEQLNELEEVFKKAAKADTPAEVPDHLCCKITLDTFRDPVITPSGVTYERAVLLDHLQTVGKFDPLTREALEPHQLVPNLAIKEAVHAFLSEHGWAYKIR

SEQ ID NO: 83666 - protein, 119 aa, Setaria italica
  Transcript Sequence Number=SeqID_17692
  Subcellular localization annotation: CTP_CleavageSite=24; ConfidenceScore=5.05e-01
HLGPSLSSAGAVAFRRAQSMPSVKALAAAGALRRWWEWGLGWVMARRPPFAGGLEMSDDEAAALGGCHCRGTWRHVFYKVRAGARRLMGRDGRPLKAAAPQDFRYDSVSYAHNFDDGEA

SEQ ID NO: 83667 - protein, 118 aa, Setaria italica
  Transcript Sequence Number=SeqID_17693
  Homolog annotation: Hit_ID=B9RI62; Match level="QueryCoverage=97%, HitCoverage=51%, E-value=1e-41, Identity=68%"; Hit description =Catalytic, putative
GILLVGSSAGAPIAGSAVDKVDEVIGYVSIGYPFGLLASVLFGRHHDAILKSQKPKLFIMGTKDGFTSVKQLQNKLKSAAGRVDTHLIEGAGHFQMEGPAFDAQMVDLIVKFIGSLPK

SEQ ID NO: 83668 - protein, 421 aa, Setaria italica
  Transcript Sequence Number=SeqID_17694
  Gene Ontology: Mol. function=voltage-gated chloride channel activity; Cellular component=integral to membrane; Biological process=chloride transport
  Homolog annotation: Hit_ID=Q2L3B0; Match level="QueryCoverage=98%, HitCoverage=88%, E-value=1e-163, Identity=73%"; Hit description =Chloride channel-f protein (Fragment)
  Pfam annotation: Domain name=Voltage_CLC; Domain location=40-395; Score=242.6; E_value=9.6e-70; Accession=PF00654.12; Description =Voltage gated chloride channel
NRGVHVIHEWAWAGTPTEGAAWLRLQRLADTWHRILLIPVTGGVVVGMMHGLLEIFEQIKQSLSSQREGIDFMAAIFPTIKAIQAAITLGTGCSLGPEGPSVDIGKSCANGCAAMMENNRERSIALVAAGSAAGIASGFNAAVAGCFFAIETVLRPLQAENSPPFTTAMIILASVISSTVSNVLLGEKAAFIVPTVASCLYLILGMLCGVVSVAFRQLVVWFTKTFDLIRKKFGLPAVVCPALGGLGAGLIALRYPGILYWGFTNVDEILHTGKSASAPGIWLLAQLAAAKVVATALCKGSGLVGGLYAPSLMIGAAVGAVFGGSAAELINSAIPGNTAVAHPQAYALVGMAATLASVCSVPLTSVLLLFELTKDYRILLPLMGAVGLAIWVPSVVNQSGSKDTFKATSPRHGYSSLLTSY

SEQ ID NO: 83669 - protein, 501 aa, Setaria italica
  Transcript Sequence Number=SeqID_17695
  Gene Ontology: Mol. function=protein phosphatase type 2A regulator activity; Cellular component=protein phosphatase type 2A complex; Biological process=signal transduction
  Homolog annotation: Hit_ID=B9RMK6; Match level="QueryCoverage=99%, HitCoverage=96%, E-value=0.0, Identity=71%"; Hit description=Protein phosphatase 2a, regulatory subunit, putative
  Pfam annotation: Domain name=B56; Domain location=83-496; Score =900.6; E_value=8.2e-268; Accession=PF01603.12; Description=Protein phosphatase 2A regulatory B subunit (B56 family)
  Subcellular localization annotation: CTP_CleavageSite=91; ConfidenceScore=5.22e-01
MIKQILGRLPKKPAKSGEKELAGAGTSLPSPTADARTTTDLTMSSRLVNPNSYASTVTNPGQNYAARNAGVSNGFTASAGYEALPSFRDVPASEKPTLFLRKLAMCCVQFDFTDPTKDVKEKEIKRQTLLELVDYITSATGKFPEPVVQEVIKMVSANLFRGPTPAPRENKALESFDLEEEEPVMDPAWPHLQIVYELFLRFIQSPETDAKLAKRYIDHGFIIRLLDLFDSEDPREREYLKTILHRIYGKFMVHRPFIRKAINNIFYRFIFETEKHNGIAELLEILGSIINGFALPLKEEHKLFLVRALIPLHKPKCVAMYHQQLSYCVTQFVEKDCKLADTVIRGLLKYWPITNSSKEVMFLGELEEVLEATQPAEFQRCMVPLFRQIARCLCSSHFQVAERALFLWNNDHIEGLIKQNSKVILPIIFPALERNTKGHWNQAVQSLSLNVRKIFMDHDPTLFEECRKKFEEEEAQEASVRSKREAIWKRLEEIALSKSAQ

SEQ ID NO: 83670 - protein, 137 aa, Setaria italica
  Transcript Sequence Number=SeqID_17696
  Gene Ontology: Mol. function=nucleic acid binding
  Homolog annotation: Hit_ID=Q9LTV5; Match level="QueryCoverage=100%, HitCoverage=6%, E-value=2e-42, Identity=58%"; Hit description =Helicase-like protein
NIFEDIQKALQDERIKESKERAASIAWWNRLRCEKRPVYGTNMREVLTVKHPVSDILEKRNNPLCHMDYSSSLADLVLPSVERFQKLLDIVESFTFAIPAARAPPPVCWCSKGKSPVFIDPAYREKCTNEFSPILSP

SEQ ID NO: 83671 - protein, 396 aa, Setaria italica
  Transcript Sequence Number=SeqID_17697
  Gene Ontology: Mol. function=protein kinase activity; Cellular component=plasma membrane; Biological process=protein amino acid phosphorylation
  Homolog annotation: Hit_ID=B6SV61; Match level="QueryCoverage=100%, HitCoverage=49%, E-value=1e-154, Identity=71%"; Hit description =Brassinosteroid LRR receptor kinase
  Pfam annotation: Domain name=Pkinase; Domain location=140-386; Score =104.1; E_value=4.8e-28; Accession=PF00069.17; Description=Protein kinase domain
  Pfam annotation: Domain name=Pkinase_Tyr; Domain location=139-386; Score=58.6; E_value=1.3e-17; Accession=PF07714.9; Description =Protein tyrosine kinase
  Pfam module annotation: Pfam domain module=Pkinase::Pkinase_Tyr; Domain location=140-386::139-386
  Subcellular localization annotation: CTP_CleavageSite=35; ConfidenceScore=5.09e-01
ANKFGEPAFIGNILLCGYSASTPCPASPSPAPSSTAEEARGRRKFSTKELVLIIAGIVVGVLILLLLCCLLLCFLTRKRSSSTSTSAARSGKQAPKDAAAAGRSEKPGSGAAEVESGGDVGGKLVHFDGPLAFTADDLLCATAEILGKSTYGTVYKATLEDGSLVAVKRLREKITKGHKEFEAEAAVLGRIRHPNLLALMAYYLGPKGEKLLVFDYMPKGNLSTFLHARAPNTTVDWATRMTIAKGTARGLAYLHDDMNIVHGNLTASNVVLDEQCNPKISDFGLSRLMTTAANSNVLAAAGALGYRAPELSKLKKANAKTDVYSLGVIILELLTGKNPAESTNGMDLPQWVASIVKEEWTSEVFDLELMRDAAAGPVGDELMDTLKLALHCVDPA

SEQ ID NO: 83672 - protein, 89 aa, Setaria italica
  Transcript Sequence Number=SeqID_17698
  Gene Ontology: Mol. function=protein serine/threonine kinase activity; Biological process=protein amino acid phosphorylation
QRRGGPLHDAVDGGIRDRAVHVRDAVAVFLLGVMCTGEDAASRPTMKQVLQQLIQYDRTASVAGACRDARDDDDDNAARAQLGQGGRRA

SEQ ID NO: 83673 - protein, 46 aa, Setaria italica
  Transcript Sequence Number=SeqID_17699
SSRIWKYALLPNEQLPNPITRYKMIFSGHQRGLAEIKDYNNKFMNL

SEQ ID NO: 83674 - protein, 263 aa, Setaria italica
  misc_feature (211)..(211): Xaa can be any naturally occurring amino acid
  Transcript Sequence Number=SeqID_17700
  Gene Ontology: Mol. function=DNA topoisomerase (ATP-hydrolyzing) activity; Cellular component=chromosome; Biological process=DNA topological change
  Homolog annotation: Hit_ID=A3AAF2; Match level="QueryCoverage=95%, HitCoverage=16%, E-value=1e-120, Identity=82%"; Hit description=DNA topoisomerase 2
  Pfam annotation: Domain name=DNA_gyraseB; Domain location=1-144; Score=107.7; E_value=3.9e-29; Accession=PF00204.17; Description=DNA gyrase B
PKLRVFDQVNDRWEVCVIPSEGQFQQVSFVNRIATIRGGTHVDYVTNQVANHVMTVVNKKNKNANMKLHNVRNHLWVFVNALIDNPAFDSQTKETLTTRQGSFGSKCELSNEFLKGVEKSSIVSNVLSWADFKLSKELKKTDGSKKSRISGIPKLEDANEAGGKDSNKCTLILTEGDSAKALAMAGIAVVGRDHYGVFPLRGKLLNVREAXHKQILDNTEIQNIKQILGLQHGKQYDSTKGLRYGHLMIMTDQGTNRIGYPTN

SEQ ID NO: 83675 - protein, 91 aa, Setaria italica
  Transcript Sequence Number=SeqID_17701
  Gene Ontology: Mol. function=cytochrome-c oxidase activity; Cellular component=mitochondrion
  Homolog annotation: Hit_ID=Q8L808; Match level="QueryCoverage=73%, HitCoverage=36%, E-value=8e-09, Identity=55%"; Hit description =Putative cytochrome c oxidase subunit
MAAEGKAPSLAEEYSLPSQEVQLQNPSEEKSAVSTVAEVVPEKSVETAPANEATVAVEETSQTPEVKEPSDEPEAEESSAAEESGRLLKKQ

SEQ ID NO: 83676 - protein, 117 aa, Setaria italica
  Transcript Sequence Number=SeqID_17702
  Homolog annotation: Hit_ID=B6SH61; Match level="QueryCoverage=96%, HitCoverage=20%, E-value=3e-35, Identity=69%"; Hit description=CDT1a protein
MSEGNTTQLDLEEGSPQMSADNDSSSPATIHKINADTQDSGSKIESPTPEKLESRSKGVVVSSLARNLLAERYKDRFANLLGEDEDDTDDEGYNDSVSPDVCRSLISGSIELLVVNY

SEQ ID NO: 83677 - protein, 83 aa, Setaria italica
  Transcript Sequence Number=SeqID_17703
  Gene Ontology: Mol. function=solute:hydrogen antiporter activity; Cellular component=integral to membrane; Biological process =regulation of pH
  Homolog annotation: Hit_ID=Q75L14; Match level="QueryCoverage=100%, HitCoverage=12%, E-value=2e-22, Identity=68%"; Hit description =Putative Na+/H+ antiporter
GLHTDVDTVRGAAAWGMLALVVAVAFLGKFGGTFAVAAWTGMARREAAALGVAMSAKGLVELIVLNIGKERKVLDDTTFAIFV

SEQ ID NO: 83678 - protein, 407 aa, Setaria italica
  misc_feature (69)..(69): Xaa can be any naturally occurring amino acid
  misc_feature (235)..(235): Xaa can be any naturally occurring amino acid
  misc_feature (267)..(267): Xaa can be any naturally occurring amino acid
  Transcript Sequence Number=SeqID_17704
  Gene Ontology: Mol. function=molecular_function; Biological process =biological_process
  Homolog annotation: Hit_ID=Q54YB8; Match level="QueryCoverage=67%, HitCoverage=48%, E-value=3e-27, Identity=29%"; Hit description =DUF647 family protein
  Pfam annotation: Domain name=DUF647; Domain location=3-398; Score =419.3; E_value=6.3e-123; Accession=PF04884.6; Description=Protein of unknown function, DUF647
PVNAVEDENADSLIPQVIRDFVLPAGFPGSVTVDYLEYMLLQFPTNVTGWICNVLVTSSLLKAVGVGQXSAAASAAAIRWVSKDGIGAFGRLLIGGRFGTLFDDDPKKWRMYADFIGSAGSIFELMTPLYPGYFLPLASLGNLAKAVARGFKDPSFRVIQNHFAQSGNLGEVAAKEEVWEVGAQLLGLSIGVLIMDTAGVKSSYLTLTSTWLIIRLLHLWLRYQSLSVLKFRTVXINLKRGRILVRSHVAQHTVPGYVVCNEEENIXLTWERFLHPQIFLVVPMERMLGGKGSSDKVNRLLKLYKNEKYVLFVEQFGSKEPTFLVAFKEAANSMSVLRSLWQAHWLQKNRKNQDEIFSWLEDSILALEHGFTDFLEQMERAGWDQNQIILKVPKEPVLVLQHLDQEV

SEQ ID NO: 83679 - protein, 83 aa, Setaria italica
  Transcript Sequence Number=SeqID_17705
SDPILGGVAVSSDDTESSDDDDDVGGCSTRTNSPRESTPEVDENEVDKKAEEFIARFREQIRRQRIESIKKSAGPRGVKRHGK

SEQ ID NO: 83680 - protein, 45 aa, Setaria italica
  Transcript Sequence Number=SeqID_17706
FPNIYRHNVNVVCNIQHSLMSPYFNIYILTTRLFKHMLLLLSSQN

SEQ ID NO: 83681 - protein, 131 aa, Setaria italica
  misc_feature (129)..(129): Xaa can be any naturally occurring amino acid
  Transcript Sequence Number=SeqID_17707
  Gene Ontology: Mol. function=endonuclease activity
  Subcellular localization annotation: CTP_CleavageSite=51; ConfidenceScore=5.71e-01
MASASPCACGAPSPSLRCPLALSLPFVSFPPAVRLATPPLLPRRLAVSRPRAASALEALVLESDDEDGDDADEEAEVEEEAGAGLFQGVAWAAGADERDAVKSPELQVFELEELPEQWRRSRIAWLCKXLP

SEQ ID NO: 83682 - protein, 95 aa, Setaria italica
  Transcript Sequence Number=SeqID_17708
NLQDKSSVANIKLICYWVWSKVQIQASTADLKREMKNNLDQNKLKKLSTCLNNEQMKTNDLIRKQPNLLTHASKFFFGKKRILQGTAEHAVQVIA

SEQ ID NO: 83683 - protein, 320 aa, Setaria italica
  Transcript Sequence Number=SeqID_17709
  Gene Ontology: Mol. function=serine-type endopeptidase activity; Cellular component=chloroplast; Biological process=response to stress
  Homolog annotation: Hit_ID=Q9LU10; Match level="QueryCoverage=99%, HitCoverage=70%, E-value=1e-147, Identity=79%"; Hit description =Protease Do-like 8, chloroplastic
  Pfam annotation: Domain name=Trypsin; Domain location=16-205; Score =45.5; E_value=2.1e-10; Accession=PF00089.18; Description=Trypsin
SVVNIFDATLRPQLNVTGIVEIPEGNGSGVVWDDSGHVVTNYHVVGSALSKNPKPGEVVARVNILAAEGIQKSFDGKLVGADRAKDIAVLKVDAPTDLLKPINVGQSSALRVGQQCLAIGNPFGFDHTLTVGVISGLNRDIFSQAGVTIGGGVQTDAAINPGNSGGPLLDSKGHMIGINTAIFTQTGTSAGVGFAIPSSTVLKIAPQLIQFGKVRRAGLNLDFAPDPIAYQLNVRNGALILQVPGGSAAAKAGLAPTSRGFAGNIVLGDIIIAVDGKPVKGKSDLLRVLDDYGVGDQVTLTVRRGAETLEVTLPLEEANI

SEQ ID NO: 83684 - protein, 260 aa, Setaria italica
  Transcript Sequence Number=SeqID_17710
  Gene Ontology: Mol. function=serine-type endopeptidase activity; Cellular component=chloroplast; Biological process=proteolysis
  Homolog annotation: Hit_ID=Q9LU10; Match level="QueryCoverage=82%, HitCoverage=48%, E-value=4e-80, Identity=66%"; Hit description =Protease Do-like 8, chloroplastic
  Subcellular localization annotation: CTP_CleavageSite=34; ConfidenceScore=5.12e-01
MRCLPCAASTTAPSARAAVSSISRRRVVVEGAASATHDGEEAPPRSLRATCDLGEMSSKTLLLVSKRKLIALSAFCFSLHSSRYLSALALGEPSVKIEDVTPKIFPSGPLFPTEKRIAELFETNTYSVVNIFDATLRPQLNVTGIVEIPEGNGSGVVWDDSGHVVTNYHVVGSALSKNPKPGEVVARVNILAAEGIQKSFDGKLVGADRAKDIAVLKVDAPTDLLKPINVGQSSALRVGQQCLAIGNPFGFDHNYTKLVR

SEQ ID NO: 83685 - protein, 163 aa, Setaria italica
  Transcript Sequence Number=SeqID_17711
  Gene Ontology: Mol. function=oxidoreductase activity; Cellular component=chloroplast; Biological process=oxidation reduction
  Homolog annotation: Hit_ID=B9SHB0; Match level="QueryCoverage=63%, HitCoverage=26%, E-value=9e-24, Identity=56%"; Hit description =Alcohol dehydrogenase, putative
  Pfam annotation: Domain name=ADH_N; Domain location=91-159; Score =24.1; E_value=9.5e-06; Accession=PF08240.4; Description=Alcohol dehydrogenase GroES-like doma
  Subcellular localization annotation: CTP_CleavageSite=43; ConfidenceScore=5.62e-01
YSRSSFLPQPPQAPARLALPSSGPRAAAAVVARRAAAEAGRCVAASASSSPATAAAATEVPGTMKAWAYDTYGDASVLKIDEAAAVPAVGEDQVLVKVVAAALNPVDAKRRAGKFQATDSPLPTVPGYDVAGVVVKVGGQVKGFKEGDKVYGMISEKPLEGPK

SEQ ID NO: 83686 - protein, 257 aa, Setaria italica
  Transcript Sequence Number=SeqID_17712
  Gene Ontology: Mol. function=oxidoreductase activity; Cellular component=chloroplast; Biological process=oxidation reduction
  Homolog annotation: Hit_ID=B9SHB0; Match level="QueryCoverage=87%, HitCoverage=57%, E-value=5e-70, Identity=60%"; Hit description =Alcohol dehydrogenase, putative
  Pfam annotation: Domain name=ADH_N; Domain location=3-67; Score=-5.1; E_value=0.0039; Accession=PF08240.4; Description=Alcohol dehydrogenase GroES-like doma
  Pfam annotation: Domain name=ADH_zinc_N; Domain location=97-217; Score=53.3; E_value=9.4e-13; Accession=PF00107.18; Description=Zinc -binding dehydrogenase
  Pfam annotation: Domain name=DapB_N; Domain location=99-197; Score= -37.8; E_value=0.079; Accession=PF01113.12; Description =Dihydrodipicolinate reductase, N-terminus
  Pfam annotation: Domain name=Shikimate_DH; Domain location=79-200; Score=-25.1; E_value=0.037; Accession=PF01488.12; Description =Shikimate  quinate 5-dehydrogenase
  Pfam module annotation: Pfam domain module=ADH_N::ADH_zinc_N::DapB _N::Shikimate_DH; Domain location=3-67::97-217::99-197::79-200
PCWCTYAQTVPGYDVAGVVVKVGGQVKGFKEGDKVYGMISEKPLEGPKQSGSLAEYTAVEEKLLARKPKSIDFAQAAGLPVAILTANEGLEKAGLCAGKSVLVLGGAGGVGSLAIQLAKQVYGASKVAATASTKKIELLKSLGTDVAIDYTKENFEDLPDKYDVVFDAVGQGEKAVKVVKEGGSVVVLTGAVTPPGFRFVVTSNGSTLEKLNPYLESGKVKPVVDPQGPFPFSKVVEAFSYLETGRATGKVVISPVP

SEQ ID NO: 83687 - protein, 160 aa, Setaria italica
  Transcript Sequence Number=SeqID_17713
  Gene Ontology: Mol. function=ATP-dependent helicase activity
WKLEELNRSSSVQNQKSNDASLEADKILRKQGAEGSGTSNHDTSTSDTCCTAYAGNLKPLRANGTENATVPISSTLAADTASVNRGPLTHNVMPLAKKTDTNMLEHTAQKIRAQSHDSSAPKHLQVEDREGQVHKLESISRVSTTVSGTADANKGPLIHN

SEQ ID NO: 83688 - protein, 200 aa, Setaria italica
  misc_feature (66)..(66): Xaa can be any naturally occurring amino acid
  misc_feature (181)..(181): Xaa can be any naturally occurring amino acid
  Transcript Sequence Number=SeqID_17714
  Gene Ontology: Mol. function=hydrolase activity, hydrolyzing O -glycosyl compounds; Biological process=carbohydrate metabolic process
  Homolog annotation: Hit_ID=Q7X9A9; Match level="QueryCoverage=99%, HitCoverage=39%, E-value=1e-69, Identity=61%"; Hit description=Beta -primeverosidase
  Pfam annotation: Domain name=Glyco_hydro_1; Domain location=1-200; Score=-186.6; E_value=2.8e-09; Accession=PF00232.10; Description =Glycosyl hydrolase family 1
PWSFSIAGYASGILAPGRCSSWENSGCSMGDSGREPYTVSHNQLLAHAAAVQVYRDKYQVKQKGKXGITLVSNWMVPYSNSKQDKDAAKRALEFMYGWFMDPLTKGDYPPSMRTLVGNRLPRFTKEQSKAINGSFDFIGLNYYTARYTQNTKYSNNGNKSYNTDSLTNQTVERHGTAIGPXAGSPWLYIYPKGIEELLTK

SEQ ID NO: 83689 - protein, 48 aa, Setaria italica
  misc_feature (2)..(2): Xaa can be any naturally occurring amino acid
  Transcript Sequence Number=SeqID_17715
TXVLVINEYFCSFPSIPTKKSISVINVFPFESIKHLLLLTDEIGLGYP

SEQ ID NO: 83690 - protein, 223 aa, Setaria italica
  Transcript Sequence Number=SeqID_17716
  Gene Ontology: Mol. function=histone-lysine N-methyltransferase activity; Cellular component=nucleus; Biological process=chromatin modification
  Homolog annotation: Hit_ID=Q8LPU2; Match level="QueryCoverage=100%, HitCoverage=32%, E-value=3e-90, Identity=78%"; Hit description=SET domain protein 105
  Subcellular localization annotation: CTP_CleavageSite=100; ConfidenceScore=5.17e-01
MYRASNFIPDPNQELLDVKPLRSLAPMFPAPMGVNVNQSSTPPLVCVTPVGQFPTGFGAGNLPSFGSFATFSASANGVSYTGTSANGPIDATPISAYKTRSSMLVDGDDEPYSGNQTVASERKARRGRPPGSGASGADGSNGKLKRPKPTYKNFVAGKELAFLPSASDPREIVEAVHMTFEALRRRHLQMDETQDASRRADLKAGAIMMASNIRANSGKRVGT

SEQ ID NO: 83691 - protein, 218 aa, Setaria italica
  misc_feature (142)..(142): Xaa can be any naturally occurring amino acid
  Transcript Sequence Number=SeqID_17717
  Gene Ontology: Cellular component=chloroplast; Biological process =protein transport
  Homolog annotation: Hit_ID=Q7F441; Match level="QueryCoverage=54%, HitCoverage=31%, E-value=3e-47, Identity=81%"; Hit description =P0696G06.13 protein
MASAATLPKFQSRPRCRSYFQVIDQVRAHIRICGASKCRIPAQGFLRSGSGVGTSLRHTFQPVSAVGSGRDSSITEADRKSDLSLENVKTSVASRDGDKINVRVQLPGKATQKVFDEALTILSRDAPPVPGFRKSKGESPWXGKTSNIPSSILLQMLGKSRVTKFVLQEILSITIEEFVKKENIKVNPEIKTTQTESEMESAFTPGSAFGFNVILQLE

SEQ ID NO: 83692 - protein, 131 aa, Setaria italica
  Transcript Sequence Number=SeqID_17718
  Gene Ontology: Mol. function=hydrolase activity; Biological process =metabolic process
  Homolog annotation: Hit_ID=B6T7L7; Match level="QueryCoverage=91%, HitCoverage=35%, E-value=1e-26, Identity=45%"; Hit description =Gibberellin receptor GID1L2
FSTNYLNCLSGKEPVDGESRETREMTEKLWSLISPQNTEDLDDPRLNPMAGGAPSLQNLACRKLLVCSAEKDQDARARAAAYYQAVKESGWRGSVEWLESVVEEHVFFLHKTECEESLALMDRLVTFLGED

SEQ ID NO: 83693 - protein, 79 aa, Setaria italica
  Transcript Sequence Number=SeqID_17719
  Gene Ontology: Mol. function=heat shock protein binding; Biological process=protein folding
  Homolog annotation: Hit_ID=B9SQL7; Match level="QueryCoverage=97%, HitCoverage=80%, E-value=2e-12, Identity=48%"; Hit description =Chaperone protein dnaJ 11, chloroplast, putative
  Pfam annotation: Domain name=DnaJ; Domain location=1-51; Score=44.3; E_value=4.8e-10; Accession=PF00226.23; Description=DnaJ domain
PVEIKAAYRAMAKRLHPDASRASGAAAPAAFLEIRRAYETLSDPDARARYDRSLGMPHHRPVLAAGGVRVRRWETDQCW

SEQ ID NO: 83694 - protein, 71 aa, Setaria italica
  Transcript Sequence Number=SeqID_17720
MSERRYTEQEEALEIKSLRRILAAYANYQDAAERDVKRYERSFKMLPPAHKELLFHLGLKYQRLRWCISMN

SEQ ID NO: 83695 - protein, 94 aa, Setaria italica
  misc_feature (29)..(29): Xaa can be any naturally occurring amino acid
  Transcript Sequence Number=SeqID_17721
  Gene Ontology: Mol. function=protein tyrosine/serine/threonine phosphatase activity; Biological process=protein amino acid dephosphorylation
  Homolog annotation: Hit_ID=Q10SY1; Match level="QueryCoverage=92%, HitCoverage=23%, E-value=3e-35, Identity=80%"; Hit description =Protein tyrosine phosphatase, putative, expressed
LICASSLQRIPLTYDKEKGAWFLEKELPXGRYEYKYIVDGNWLCNEHENITKPNADGHVNNFVQVSRDGTSDEEKELRERLTGPNPDLTDEERL

SEQ ID NO: 83696 - protein, 107 aa, Setaria italica
  Transcript Sequence Number=SeqID_17722
  Gene Ontology: Mol. function=protein tyrosine/serine/threonine phosphatase activity; Biological process=protein amino acid dephosphorylation
  Homolog annotation: Hit_ID=Q10SY1; Match level="QueryCoverage=95%, HitCoverage=27%, E-value=2e-44, Identity=81%"; Hit description =Protein tyrosine phosphatase, putative, expressed
YTLKWEDDTSSSVEISGLDIGWGQRIPLTYDKEKGAWFLEKELPEGRYEYKYIVDGNWLCNEHENITKPNADGHVNNFVQVSRDGTSDEEKELRERLTGPNPDHQPF

SEQ ID NO: 83697 - protein, 101 aa, Setaria italica
  Transcript Sequence Number=SeqID_17723
  Gene Ontology: Mol. function=protein tyrosine/serine/threonine phosphatase activity; Biological process=protein amino acid dephosphorylation
  Homolog annotation: Hit_ID=Q10SY1; Match level="QueryCoverage=78%, HitCoverage=21%, E-value=1e-32, Identity=84%"; Hit description =Protein tyrosine phosphatase, putative, expressed
QLALHFPYGCISQLLGLCFLKEGRYEYKYIVDGNWLCNEHENITKPNADGHVNNFVQVSRDGTSDEEKELRERLTGPNPDLTDEERLMIREYLEQYVEAEQ

SEQ ID NO: 83698 - protein, 131 aa, Setaria italica
  misc_feature (53)..(53): Xaa can be any naturally occurring amino acid
  Transcript Sequence Number=SeqID_17724
  Gene Ontology: Mol. function=protein tyrosine/serine/threonine phosphatase activity; Biological process=protein amino acid dephosphorylation
  Homolog annotation: Hit_ID=Q10SY1; Match level="QueryCoverage=97%, HitCoverage=35%, E-value=2e-56, Identity=82%"; Hit description =Protein tyrosine phosphatase, putative, expressed
  Pfam annotation: Domain name=CBM_48; Domain location=1-78; Score= -2.0; E_value=0.074; Accession=PF02922.10; Description=Carbohydrate -binding module 48 (Isoam
LTGLSKNTITLKWEDDTSSSVEISGLDIGWGQRIPLTYDKEKGAWFLEKELPXRYEYKYIVDGNWLCNEHENITKPNADGHVNNFVQVSRDGTSDEEKELRERLTGPNPDLTDEERLMIREYLEQYVEAEQ

SEQ ID NO: 83699 - protein, 80 aa, Setaria italica
  Transcript Sequence Number=SeqID_17725
  Gene Ontology: Mol. function=protein tyrosine/serine/threonine phosphatase activity; Biological process=protein amino acid dephosphorylation
  Homolog annotation: Hit_ID=Q10SY1; Match level="QueryCoverage=78%, HitCoverage=17%, E-value=4e-27, Identity=92%"; Hit description =Protein tyrosine phosphatase, putative, expressed
ALVKFQLAYMFWILGYSLNEGHQLLQSKRASFPKLEAIKLATADILTGLSKNTITLKWEDDTSSSVEISGLVLFGLGVLS

SEQ ID NO: 83700 - protein, 123 aa, Setaria italica
  Transcript Sequence Number=SeqID_17726
  Gene Ontology: Mol. function=protein tyrosine/serine/threonine phosphatase activity; Biological process=protein amino acid dephosphorylation
  Homolog annotation: Hit_ID=Q10SY1; Match level="QueryCoverage=93%, HitCoverage=31%, E-value=2e-48, Identity=82%"; Hit description =Protein tyrosine phosphatase, putative, expressed
EVLQSHKLVNCNGGVTYIHCTAGLGRAPAVALAYMFWILGYSLNEGHQLLQSKRASFPKLEAIKLATADILTGLSKNTITLKWEDDTSSSVEISGLDIGWGQVCFPFTYLIRCWVLKEFPFDS

SEQ ID NO: 83701 - protein, 166 aa, Setaria italica
  Transcript Sequence Number=SeqID_17727
  Gene Ontology: Mol. function=protein tyrosine/serine/threonine phosphatase activity; Cellular component=chloroplast; Biological process=protein amino acid dephosphorylation
  Homolog annotation: Hit_ID=Q10SY1; Match level="QueryCoverage=73%, HitCoverage=30%, E-value=1e-52, Identity=83%"; Hit description =Protein tyrosine phosphatase, putative, expressed
  Pfam annotation: Domain name=DSPc; Domain location=12-120; Score= -25.3; E_value=0.018; Accession=PF00782.12; Description=Dual specificity phosphatase, catalytic domain
MLPFREYIFFPLPTNLFRYFGVNIRAIQDYCLQFKDIEHCRAEIRDFDAFDLRLRLPAVVSKLHKLVNCNGGVTYIHCTAGLGRAPAVALAYMFWILGYSLNEGHQLLQPLNFFLGSSKRASFPKLEAIKLATADIVSECCTVLSVVVMMGRLMCPHIVASHRFFS

SEQ ID NO: 83702 - protein, 81 aa, Setaria italica
  Transcript Sequence Number=SeqID_17728
  Gene Ontology: Mol. function=protein tyrosine/serine/threonine phosphatase activity; Biological process=protein amino acid dephosphorylation
  Homolog annotation: Hit_ID=Q10SY1; Match level="QueryCoverage=96%, HitCoverage=21%, E-value=7e-33, Identity=85%"; Hit description =Protein tyrosine phosphatase, putative, expressed
PEGRYEYKYIVDGNWLCNEHENITKPNADGHVNNFVQVSRDGTSDEEKELRERLTGPNPDLTDEERLMIREYLEQYVEAEQ

SEQ ID NO: 83703 - protein, 217 aa, Setaria italica
  Transcript Sequence Number=SeqID_17729
  Gene Ontology: Mol. function=protein tyrosine/serine/threonine phosphatase activity; Cellular component=chloroplast; Biological process=protein amino acid dephosphorylation
  Homolog annotation: Hit_ID=Q10SY1; Match level="QueryCoverage=98%, HitCoverage=57%, E-value=1e-109, Identity=88%"; Hit description =Protein tyrosine phosphatase, putative, expressed
  Pfam annotation: Domain name=CBM_48; Domain location=86-164; Score =2.3; E_value=0.028; Accession=PF02922.10; Description=Carbohydrate -binding module 48 (Isoam
YRDFDAFDLRLRLPAVVSKLHKLVNCNGGVTYIHCTAGLGRAPAVALAYMFWILGYSLNEGHQLLQSKRASFPKLEAIKLATADILTGLSKNTITLKWEDDTSSSVEISGLDIGWGQRIPLTYDKEKGAWFLEKELPEGRYEYKYIVDGNWLCNEHENITKPNADGHVNNFVQVSRDGTSDEEKELRERLTGPNPDLTDEERLMIREYLEQYVEAEQ

SEQ ID NO: 83704 - protein, 65 aa, Setaria italica
  Transcript Sequence Number=SeqID_17730
  Gene Ontology: Mol. function=protein tyrosine/serine/threonine phosphatase activity; Biological process=protein amino acid dephosphorylation
  Homolog annotation: Hit_ID=Q10SY1; Match level="QueryCoverage=95%, HitCoverage=16%, E-value=2e-23, Identity=85%"; Hit description =Protein tyrosine phosphatase, putative, expressed
CNEHENITKPNADGHVNNFVQVSRDGTSDEEKELRERLTGPNPDLTDEERLMIREYLEQYVEAEQ

SEQ ID NO: 83705 - protein, 165 aa, Setaria italica
  Transcript Sequence Number=SeqID_17731
  Gene Ontology: Mol. function=nucleic acid binding
  Homolog annotation: Hit_ID=B9T1E0; Match level="QueryCoverage=31%, HitCoverage=8%, E-value=3e-17, Identity=76%"; Hit description =Calmodulin binding protein, putative
LQMSPDENDEEFWSRLKSIPSDCRASADKPEEDEIVATQDTNPCQAPLVIEATTPEEVSVPEHEETRTNPKPIATVARQDSSEDAAENAETSTTSDRASSEEENHNGDGDNAAVPREKILQRISSKKETKSYQLGKQVSFKWTTGAGPRIVCVRDYPSELQLRAL

SEQ ID NO: 83706 - protein, 82 aa, Setaria italica
  Transcript Sequence Number=SeqID_17732
  Gene Ontology: Mol. function=binding; Cellular component =intracellular; Biological process=nuclear mRNA splicing, via spliceosome
  Homolog annotation: Hit_ID=Q8W3F7; Match level="QueryCoverage=68%, HitCoverage=5%, E-value=5e-23, Identity=83%"; Hit description =Putative pre-mRNA splicing factor
PVKPNPSFGDFWALYYKFELQHGNAETQKDVLKRCVAAEPKHGEKWQAISKAVENSHQPVEALLKKAVVALDADETLNAGGA

SEQ ID NO: 83707 - protein, 855 aa, Setaria italica
  Transcript Sequence Number=SeqID_17733
  Gene Ontology: Mol. function=binding; Cellular component =intracellular; Biological process=nuclear mRNA splicing, via spliceosome
  Homolog annotation: Hit_ID=Q8W3F7; Match level="QueryCoverage=97%, HitCoverage=80%, E-value=0.0, Identity=88%"; Hit description =Putative pre-mRNA splicing factor
  Pfam annotation: Domain name=HAT; Domain location=260-292; Score=3.7; E_value=7.3; Accession=PF02184.8; Description=HAT (Half-A-TPR) repeat
  Pfam annotation: Domain name=HAT; Domain location=321-353; Score=4.2; E_value=6; Accession=PF02184.8; Description=HAT (Half-A-TPR) repeat
  Pfam annotation: Domain name=HAT; Domain location=461-493; Score =10.9; E_value=0.38; Accession=PF02184.8; Description=HAT (Half-A -TPR) repeat
  Pfam annotation: Domain name=HAT; Domain location=630-662; Score=0.3; E_value=29; Accession=PF02184.8; Description=HAT (Half-A-TPR) repeat
  Pfam annotation: Domain name=HAT; Domain location=762-794; Score=6.2; E_value=2.7; Accession=PF02184.8; Description=HAT (Half-A-TPR) repeat
  Pfam annotation: Domain name=PMC2NT; Domain location=51-131; Score= -12.4; E_value=0.054; Accession=PF08066.4; Description=PMC2NT (NUC016) domain
  Pfam annotation: Domain name=PRP1_N; Domain location=1-95; Score =136.3; E_value=9.8e-38; Accession=PF06424.4; Description=PRP1 splicing factor, N-terminal
  Pfam annotation: Domain name=TPR_1; Domain location=216-249; Score =3.2; E_value=2.5; Accession=PF00515.20; Description=Tetratricopeptide repeat
  Pfam annotation: Domain name=TPR_1; Domain location=616-649; Score =12.0; E_value=0.21; Accession=PF00515.20; Description=Tetratricopepti de repeat
  Pfam annotation: Domain name=TPR_2; Domain location=216-249; Score =15.2; E_value=0.28; Accession=PF07719.9; Description=Tetratricopeptid e repeat
  Pfam annotation: Domain name=TPR_2; Domain location=337-370; Score =4.1; E_value=11; Accession=PF07719.9; Description=Tetratricopeptide repeat
  Pfam annotation: Domain name=TPR_2; Domain location=515-548; Score =5.7; E_value=6.6; Accession=PF07719.9; Description=Tetratricopeptide repeat
  Pfam annotation: Domain name=TPR_2; Domain location=582-615; Score =5.8; E_value=6.4; Accession=PF07719.9; Description=Tetratricopeptide repeat
  Pfam annotation: Domain name=TPR_2; Domain location=616-649; Score =16.9; E_value=0.087; Accession=PF07719.9; Description=Tetratricopepti de repeat
  Pfam annotation: Domain name=TPR_2; Domain location=684-717; Score =5.7; E_value=6.7; Accession=PF07719.9; Description=Tetratricopeptide repeat
  Pfam annotation: Domain name=TPR_2; Domain location=748-781; Score =11.0; E_value=1.4; Accession=PF07719.9; Description=Tetratricopeptide repeat
  Pfam module annotation: Pfam domain module=HAT::HAT::HAT::HAT::HAT::PM C2NT::PRP1_N::TPR_1::TPR_1::TPR_2::TPR_2::TPR_2::TPR_2::TPR_2::TPR _2::TPR_2; Domain location=260-292::321-353::461-493::630-662::762 -794::51-131::...
  Pfam module annotation: Domain location=1-95::216-249::616-649::216 -249::337-370::515-548::582-615::616-649::684-717::748-781
NQKFDEFEGNDAGLFSNADYDDDDREADAVWESIDQRMDSRRKDRREARLKQEIEKYRASNPKITEQFADLKRKLADLSAQEWESIPEIGDYSLRNKKKRFESFVPVPDTLLEKARQEQEHVTALDPKSRAAGGTETPWAQTPVTDLTAVGEGRGTVLSLKLDRLSDSVSGLTVVDPKGYLTDLKSMKITSDAEISDIKKARLLLKSVTQTNPKHPPGWIAAARLEEIAGKLQAARQLIQRGCEECPKNEDVWLEACRLASPDEAKAVIARGVMSIPNSVKLWMQAAKLETSDLNKSRVLRKGLEHIPDSVRLWKAVVELANEEDARLLLHRAVECCPLHVELWLALARLETYDQARKVLNKAREKLPKEPAIWITAAKLEEANGNTQSVSKVIERGIRSLQREGMDIDREAWLKEAEAAERAGSVLTCQAIVKNTIGIGVDDEDRKRTWVADAEECKKRGSIETARAIYAHALTVFLTKKSIWLKAAQLEKSHGTRDSLDALLKKAVNYNPRAEVLWLMAAKEKWLAGDVPAARAILQEAYAAIPNSEEIWLAAFKLEFENNEPERATMLLAKARERGGTERVWMKSAIVERELGNVGEERRLLEEGLKLFPSFFKLWLMLGQMEDRLGHGAKAKEVYENGLKNCPSCIPLWLSLASLEEKISGLSKSRAILTMARKKNPAQPELWLAAIRAELRHANKKEADALLAKALQECPTSGILWAAAIEMAPRPQRKGKSTDAIKRCDHDPHVIATVSKLFWLDRKVDKARIWFNRAVTLAPDIGDFWALYYKFELQHGNAETQKDVLKRCVAAEPKHGEKWQAISKAVENSHQPVEALLKKAVVALDADETLNAGGA

SEQ ID NO: 83708 - protein, 388 aa, Setaria italica
  misc_feature (16)..(16): Xaa can be any naturally occurring amino acid
  Transcript Sequence Number=SeqID_17734
  Gene Ontology: Mol. function=ribonuclease activity; Cellular component=exosome (RNase complex); Biological process=cellular response to stress
  Homolog annotation: Hit_ID=B9RJ60; Match level="QueryCoverage=78%, HitCoverage=27%, E-value=4e-90, Identity=52%"; Hit description=RNA binding protein, putative
  Pfam annotation: Domain name=RNB; Domain location=271-388; Score= -8.3; E_value=3.8e-08; Accession=PF00773.11; Description=RNB-like protein
KGPNVACNPAIGGDSXVREIGETNGYHSRKKGQADAGCRFENCSNGVPGLDRMHLHHKNSGFSQAVKCENGNATVLESNERDLNGGKSEDARALQRICAMIQTHPGRRPTGKVLSVMKKSPRRDAIVGFLASFPEFPGGEQQKNQMGVRMMNNRAQSVVTGLIHLLPTDPKFPQMVVKVSTLPDSVRQNLREGDAAIEKELVAARLDEWDEESLYPYAHVVRFLGKGGHVKTHMDAILFENAISDAEFSPESLACLPDNCWQIPQKELEARKDLRKVLTFTIDPPTASDLDDAISIEILSGGTVRIGVHIADVSYFVHPETALDAEAQSRSTSVYTLRRKVSMLPSRLSEELVSLNPGVDRLAFSIIWDIDPHGNIVSRWIGRSIIFS

SEQ ID NO: 83709 - protein, 352 aa, Setaria italica
  Transcript Sequence Number=SeqID_17735
  Gene Ontology: Cellular component=vacuole
  Homolog annotation: Hit_ID=Q7XXC5; Match level="QueryCoverage=94%, HitCoverage=23%, E-value=1e-157, Identity=83%"; Hit description =OSJNBa0027O01.13 protein
  Subcellular localization annotation: CTP_CleavageSite=51; ConfidenceScore=5.34e-01
FGCAQNAGGAGTIYDSSLQTLKVSNGNFTTHTETPLLGFPMTRLWSNVLVECNARVLVPLLWSRVQVTGQIRLLTKGSICFGLSENPISEFELVAEELLMSDSVIKVYGAFRMYVKVLLMWDSKIQIDGGTKDVVLASMLEARNLVVLRHGSVISSNADLMVYGQGLLNLSGPGDGIKARRLFLSLFYNIEVGPGSLVQAPHDETVQSSLDALSRCESKTCPSELITPPDDCHVNRSLSFTLQICRVEDITVSGIVRGSIIHIHRARTVTIAKDGTISASELGCKEGIGKGTFLKYGAGGGAGHGGRGGTGIYNGMKSDGGLAYGNADLPCELGSGSGGSAVSADSTAGGVG

SEQ ID NO: 83710 - protein, 226 aa, Setaria italica
  Transcript Sequence Number=SeqID_17736
  Homolog annotation: Hit_ID=B6SVJ3; Match level="QueryCoverage=100%, HitCoverage=45%, E-value=1e-107, Identity=86%"; Hit description=BSD domain containing protein
  Pfam annotation: Domain name=BSD; Domain location=20-80; Score=68.4; E_value=2.7e-17; Accession=PF03909.9; Description=BSD domain
RHPETWLDFPLLPDDDESDGPFSYFDMSDAQQEHALAIEHLAPRLAALRIELCPIHMSEECFWKIYFVLLHPRLNKHDAELLSTPQIVEARAMLMQRLQYQSKLETEQLGHHRDDLGVQLREDALKDGTEAFPFVRQETASVMPITEIEIEKHPIHVTEVAVVDKSVIKEELPKDHTETSNVLQEAFDDDIDDWFDEEADLAGHPTIHIGDEEDVSFSDLEEDDLK

SEQ ID NO: 83711 - protein, 116 aa, Setaria italica
  Transcript Sequence Number=SeqID_17737
  Subcellular localization annotation: CTP_CleavageSite=13; ConfidenceScore=5.16e-01
TATLRAVRSQCVSRQHGSKTKPLGFHCTPYSFHGQLSPLYFLVHQRGPVSNTGSFDGSTTQVKGSRINHFKSSSSKSLKDTSSSSPMWIVGCPARSASSSNQSSMSSSKASCLLCS

SEQ ID NO: 83712 - protein, 170 aa, Setaria italica
  Transcript Sequence Number=SeqID_17738
  Gene Ontology: Mol. function=protein binding; Biological process =retrograde transport, endosome to Golgi
  Homolog annotation: Hit_ID=Q7XN31; Match level="QueryCoverage=98%, HitCoverage=17%, E-value=3e-82, Identity=84%"; Hit description =OSJNBa0083I11.13 protein
NTLTRSTSKIPFVQAKANDLSIINSIKNVRADVLRENTEAVFAACDAAHGRWAKLLGVRAALHPRLRLQEFLIIYNITEEFIAATEKVGGRLGYNIRGILQQQSKQFVDYQHSVRMTKIKAVLDQETWVAVDVPEEFQAIVLSLSSTYSSVNGMDMPGAEDNSKFSDPTS

SEQ ID NO: 83713 - protein, 150 aa, Setaria italica
  misc_feature (6)..(6): Xaa can be any naturally occurring amino acid
  misc_feature (129)..(129): Xaa can be any naturally occurring amino acid
  Transcript Sequence Number=SeqID_17739
  Gene Ontology: Mol. function=protein binding; Biological process=two -component signal transduction system (phosphorelay)
  Homolog annotation: Hit_ID=B9SLV8; Match level="QueryCoverage=98%, HitCoverage=14%, E-value=2e-57, Identity=70%"; Hit description =Vacuolar protein sorting, putative
DYKVHXDEIHSKLVQIMRERLLANLRKLPQIVEGWNGPEDNDLQPSQFAKAVTKEVNYLHRILSQTLLEVDVQTIFRQVVQIFHSHITEAFRKLEVSTPQAKNRLCRDVQHILTCIRKLPAENFSAETXPNYGLLDEFLAENFGTKVGSD

SEQ ID NO: 83714 - protein, 98 aa, Setaria italica
  Transcript Sequence Number=SeqID_17740
WAAISRPIQYNGPNCMKLGRGAKTLRFPLYQHLTDISLPKRESNYFGKKKQIWPDMVKLWTQKFNLWEGRENQQLCHLGALPSLSCTAIPAWLLMPVC

SEQ ID NO: 83715 - protein, 555 aa, Setaria italica
  misc_feature (337)..(337): Xaa can be any naturally occurring amino acid
  misc_feature (353)..(353): Xaa can be any naturally occurring amino acid
  misc_feature (363)..(363): Xaa can be any naturally occurring amino acid
  Transcript Sequence Number=SeqID_17741
  Gene Ontology: Mol. function=protein binding; Cellular component =intracellular; Biological process=retrograde transport, endosome to Golgi
  Homolog annotation: Hit_ID=Q7XN31; Match level="QueryCoverage=98%, HitCoverage=57%, E-value=0.0, Identity=71%"; Hit description =OSJNBa0083I11.13 protein
  Pfam annotation: Domain name=DUF2450; Domain location=127-397; Score=- 107.7; E_value=0.04; Accession=PF10475.1; Description=Protein of unknown function N-terminal
  Subcellular localization annotation: CTP_CleavageSite=45; ConfidenceScore=5.70e-01
MASRPPLRTTSVASVSSSTDSPTFAGPPGGVPQSITALLNNPLPSAAASSYSWLPWPPPTIALPEAAPTPPSHPCEVTRADFAPYLAAVSDPYARFADIRLHATAELAASSDAEGAPAASSGLAACLREVPALFFKEDFALEDGPTFQAACPLDDDGLQERLGQHLDVVEAHLVREIALRSESFYEAQGRLRGLDGEIVTAVGRIRELREVVRVLTGDLVGSARQVQELNATRGNLVALQQKLTVILYVSQALAALKLLVAAADCAGALDVIDDLQNLLDTDELAGLYCFRHIRDQLGTSLDSVNSILSAEFVHAAVPDGKAVDAMISSNVKRKASXPLNGTEHEGNIDEEEXFILRDRLLPXIICLLRTDKLPAVLRIYRDTLITVMKASIKATVAELLPVLTARPIDSDSVTGDRAADADAGGQSLANKLRSLSSEGFVQLLSAIFRIVQVHLQQAAEVKRIVEWIMGNLDGTLSIDASNPTVQHGGSVVSDISQENDYSVSSRVSNTLTRSTSKIPFVQAKANDLSIINSIKNVRALDRVNTQFSTKDKKTK

SEQ ID NO: 83716 - protein, 262 aa, Setaria italica
  Transcript Sequence Number=SeqID_17742
  Gene Ontology: Mol. function=protein binding; Cellular component =Golgi apparatus; Biological process=two-component signal transduction system (phosphorelay)
  Homolog annotation: Hit_ID=Q7XN31; Match level="QueryCoverage=96%, HitCoverage=25%, E-value=1e-116, Identity=82%"; Hit description =OSJNBa0083I11.13 protein
  Pfam annotation: Domain name=Vps54; Domain location=138-262; Score =179.4; E_value=1e-50; Accession=PF07928.4; Description=Vps54-like protein
VTLGLSCLYCGLTIRGILQQQSKQFVDYQHSVRMTKIKAVLDQETWVAVDVPEEFQAIVLSLSSTYSSVNGMDMPGAEDNSKFSDPTSQEPTYSGENNADNGKLTSAIGESKVESTSPQTENNATGNQRSTLQTIVHGGVGYHMVNCGLILLKMLSEYVDISKCLPSLSFEVVQRVVEILKLFNNRTCQLVLGAGAMQVSGLKSITSKHLALASQIISFIHSLIPDIRRVLFLKIPEARKQLLMSELDRVTQDYKVHRDEIH

SEQ ID NO: 83717 - protein, 242 aa, Setaria italica
  Transcript Sequence Number=SeqID_17743
  Gene Ontology: Mol. function=protein binding; Biological process=two -component signal transduction system (phosphorelay)
  Homolog annotation: Hit_ID=B9SLV8; Match level="QueryCoverage=97%, HitCoverage=22%, E-value=1e-98, Identity=72%"; Hit description =Vacuolar protein sorting, putative
  Pfam annotation: Domain name=Vps54; Domain location=6-114; Score =143.0; E_value=9e-40; Accession=PF07928.4; Description=Vps54-like protein
LFFRFNFLVAFEVVQRVVEILKLFNNRTCQLVLGAGAMQVSGLKSITSKHLALASQIISFIHSLIPDIRRVLFLKIPEARKQLLMSELDRVTQDYKVHRDEIHSKLVQIMRERLLANLRKLPQIVEGWNGPEDNDLQPSQFAKAVTKEVNYLHRILSQTLLEVDVQTIFRQVVQIFHSHITEAFRKLEVSTPQAKNRLCRDVQHILTCIRKLPAENFSAETTPNYGLLDEFLAENFGTKVGE

SEQ ID NO: 83718 - protein, 360 aa, Setaria italica
  Transcript Sequence Number=SeqID_17744
  Gene Ontology: Mol. function=potassium ion transmembrane transporter activity; Cellular component=integral to membrane; Biological process=potassium ion transport
  Homolog annotation: Hit_ID=Q9AYN4; Match level="QueryCoverage=100%, HitCoverage=46%, E-value=0.0, Identity=93%"; Hit description=High -affinity potassium transporter
  Pfam annotation: Domain name=K_trans; Domain location=1-360; Score =315.5; E_value=1.1e-91; Accession=PF02705.8; Description=K+ potassium transporter
RFGTDKVGYTFAPVISVWFLLIAGIGLYNLVVHDIGVLRAFNPWYIVQYFKRNGKDGWVSLGGVILCVTGTEGMFADLGHFNIRAVQISFSGILFPSVTLCYIGQAAYLRKFPENVGDTFYRSIPGPLFWPTFVVAILAAIIASQAMLSGAFAILSKALSLGCLPRVQVIHTSKKYEGQVYIPEVNFMMGLASIIVTIAFRTTTSIGNAYGICVVTTFSITTHLVTVVMLLIWKKHIIFVLLFYVVFTCTELIYLSSILSKFIQGGYLPFCFALVLMTLMATWHYVHVKRYWYELDHIVPTNQMTTLLEKNDVQRIPGVGLLYTELVQGIPPVFPRLIKKIPSVHSIFLFMSIKHLPISH

SEQ ID NO: 83719 - protein, 135 aa, Setaria italica
  Transcript Sequence Number=SeqID_17745
  Gene Ontology: Mol. function=transferase activity, transferring nitrogenous groups; Biological process=cellular amino acid and derivative metabolic process
  Homolog annotation: Hit_ID=B9MYF0; Match level="QueryCoverage=71%, HitCoverage=23%, E-value=6e-35, Identity=68%"; Hit description =Aminotransferase family protein
NSSVSSKSIESYINITNDPATFIQGAVPKIIANTKEDYFNKILNLLRNSADLCYGKIKEIRGITCPHKPEGSMFVMVKLDLCYLDGILDDLDFCCRLAKEESVIVLPGTFNFRTYAAFGCFWFHSILFICNINLV

SEQ ID NO: 83720 - protein, 428 aa, Setaria italica
  Transcript Sequence Number=SeqID_17746
  Gene Ontology: Mol. function=transferase activity, transferring nitrogenous groups; Cellular component=apoplast; Biological process =cellular amino acid and derivative metabolic process
  Homolog annotation: Hit_ID=B9MYE9; Match level="QueryCoverage=94%, HitCoverage=97%, E-value=1e-157, Identity=62%"; Hit description =Aminotransferase family protein
  Pfam annotation: Domain name=Aminotran_1_2; Domain location=49-415; Score=174.3; E_value=3.5e-49; Accession=PF00155.13; Description =Aminotransferase class I and II
  Subcellular localization annotation: CTP_CleavageSite=76; ConfidenceScore=5.21e-01
MEGNGGASATTWRISRPPGRGAPWLDAGSMSIRVVLARVFSSVDASGPRPVLTLGSGDPTACASFRPPPEAEDAIVDALRSGKHNGYSPTVGVLPARRAIAEYLSQDLPYQLSPDDIYLTAGCWQAIDVMISILAQPGSNILLPKPGFPLYESRTMFRNLETRHFNLIPDRGWEADLESVEALADENTVAMVIINPGNPCGSVYSHDHLAKIAETARKLGIIIIADEVYYHLAFGNKPFIPMGVFADIVPVITLGSLSKRWLVPGWRLGWIATCDPNGILKEAKVNISIESYINITNDPATFIQGAVPKIIANTKEDYFNKILNLLRNSADLCYGKIKEIRGITCPHKPEGSMFVMVKLDLCYLDGILDDLDFCCRLAKEESVIVLPGSALGMKDWIRITFACDIPTLENALERIKSFCQRHANKLEA

SEQ ID NO: 83721 - protein, 64 aa, Setaria italica
  Transcript Sequence Number=SeqID_17747
KICNHTLPVNSSCHYMCWNKCVFLELPKKGQVPQPSRKLSKAIYSSNSTLESIRLLSANHWLEP

SEQ ID NO: 83722 - protein, 57 aa, Setaria italica
  Transcript Sequence Number=SeqID_17748
  Subcellular localization annotation: CTP_CleavageSite=36; ConfidenceScore=5.24e-01
MGLRALRLLAMAMAVVALASPAPVSGQVVAGPLQCTASLISSFTPCLNFIINSTASP

SEQ ID NO: 83723 - protein, 94 aa, Setaria italica
  Transcript Sequence Number=SeqID_17749
LEFTFPMAVTVRSGRTSGYFGQPRGGGCYLPGVGSRSDAWLPKRHRWQNRDSGWDRAPPLAYRWRSIADVIGGPHDAVATDPCRSSDGSGLTAL

SEQ ID NO: 83724 - protein, 142 aa, Setaria italica
  misc_feature (33)..(33): Xaa can be any naturally occurring amino acid
  Transcript Sequence Number=SeqID_17750
  Homolog annotation: Hit_ID=Q7FAS5; Match level="QueryCoverage=44%, HitCoverage=33%, E-value=1e-11, Identity=60%"; Hit description =OSJNBa0019K04.27 protein
MKASIKFRDDDRPLMRAKVPIGVLGLPFQSGLXAGGDPRELRFDLSTAFASGPSLRLSYRPNDPGLPFALTVRAGLGPLGSPARAPFALAAEFNLLSPDLSTPAFFLRLKPRFGDFSLSHTLRSPAPPPPRRPVRSGSGSRR

SEQ ID NO: 83725 - protein, 87 aa, Setaria italica
  Transcript Sequence Number=SeqID_17751
  Gene Ontology: Mol. function=heat shock protein binding; Cellular component=nucleus; Biological process=protein folding
  Homolog annotation: Hit_ID=A2Q3D3; Match level="QueryCoverage=57%, HitCoverage=18%, E-value=1e-19, Identity=92%"; Hit description=Heat shock protein DnaJ
  Pfam annotation: Domain name=DnaJ; Domain location=39-86; Score=69.8; E_value=1e-17; Accession=PF00226.23; Description=DnaJ domain
MGRKGRRARVSRDADADADGSDEERGAAAAAPAATGSKTLYEILGVEKTASQQEIKKAYYKLALRLHPDKNPGDEEAKEKFQQLQKV

SEQ ID NO: 83726 - protein, 291 aa, Setaria italica
  Transcript Sequence Number=SeqID_17752
  Gene Ontology: Mol. function=heat shock protein binding; Cellular component=nucleus; Biological process=protein folding
  Homolog annotation: Hit_ID=B6TT74; Match level="QueryCoverage=86%, HitCoverage=89%, E-value=1e-110, Identity=78%"; Hit description =Chaperone protein dnaJ 6
  Pfam annotation: Domain name=DnaJ; Domain location=41-103; Score =126.3; E_value=1e-34; Accession=PF00226.23; Description=DnaJ domain
MGDWGTGKKGGGDWGFYTGEGGAATAAAVARAAPAATGSKTLYEILGVEKTASQQEIKKAYYKLALRLHPDKNPGDEEAKEKFQQLQKVISILGDAEKRALYDETGIADDDALVGAAADNLQEYFRTMYKKVTEADIEEFEAKYRGSDSEKKDLKDLYTKYKGNMNRLFCSMICSEPKLDSHRFKDIVDEAIAEGELKSTKAYEKWAKKISEMEPPTNPLERRVKKKRKSEENDLILAISQRRAERKNQFDSILSSIMSKCDPNASSSEPTEEEFEQARQRLEGKRAKKRK

SEQ ID NO: 83727 - protein, 112 aa, Setaria italica
  misc_feature (104)..(104): Xaa can be any naturally occurring amino acid
  Transcript Sequence Number=SeqID_17753
  Gene Ontology: Mol. function=metal ion binding
  Homolog annotation: Hit_ID=Q53PX0; Match level="QueryCoverage=90%, HitCoverage=5%, E-value=1e-33, Identity=73%"; Hit description=PHD -finger family protein, expressed
KENKGTKKGGGRVVNQGPATPADGLQVKEEVGECLVGRYIGRSAPGHARILIGKVASYDSTTGAYSVVFEDGHGEDLGLPQLLEFLMSYENGALGMKVSCRKRXLDLLVSSR

SEQ ID NO: 83728 - protein, 371 aa, Setaria italica
  Transcript Sequence Number=SeqID_17754
  Gene Ontology: Mol. function=GDP-mannose 3,5-epimerase activity; Biological process=cellular metabolic process
  Homolog annotation: Hit_ID=A3C4S4; Match level="QueryCoverage=98%, HitCoverage=96%, E-value=0.0, Identity=93%"; Hit description=GDP -mannose 3,5-epimerase 1
  Pfam annotation: Domain name=3Beta_HSD; Domain location=26-269; Score= -123.2; E_value=0.014; Accession=PF01073.11; Description=3-beta hydroxysteroid dehydrogenaseisomerase family
  Pfam annotation: Domain name=Epimerase; Domain location=25-264; Score= 161.4; E_value=2.7e-45; Accession=PF01370.13; Description=NAD dependent epimerasedehydratase family
  Pfam annotation: Domain name=NAD_binding_4; Domain location=27-249; Score=-79.6; E_value=0.00075; Accession=PF07993.4; Description=Male sterility protein
  Pfam module annotation: Pfam domain module=3Beta_HSD::Epimerase::NAD _binding_4; Domain location=26-269::25-264::27-249
MALNKEYTYAELEKEPYWPFEKLRISITGAGGFIASHIARRLMSEGHYIIASDWKKNEHMTEEMFCHEFHLIDLRVMDNCLKVTTGVDHVFNLAADMGGMGFIQSNHSVIMYNNTMISFNMLEAARINGVKRFFYASSACIYPEFKQLETVVSLKESDAWPAEPQDAYGLEKLATEELCKHYTKDFGIECRIGRFHNIYGPFGTWKGGREKAPAAFCRKALTSTGRFEMWGDGLQTRSFTFIDECVEGVLRLTKSDFREPVNIGSDEMVSMNEMAEIVLSFENKQLPIHHIPGPEGVRGRNSDNTLIKEKLGWAPTMKLKDGLRITYFWIKEQLEKEKAEGMDLSVYGSSKVVQTQAPVQLGSLRAADGKE

SEQ ID NO: 83729 - protein, 75 aa, Setaria italica
  Transcript Sequence Number=SeqID_17755
TNLSDILWFHCQYTCAVTVLTVFLLALRLGCEQYNSKNILLFLFHTQRQQFFCMLERKFCKQFGMTSQKVRNKGH

SEQ ID NO: 83730 - protein, 105 aa, Setaria italica
  Transcript Sequence Number=SeqID_17756
  Subcellular localization annotation: CTP_CleavageSite=72; ConfidenceScore=5.86e-01
RRTLDARGPAPSPPGRDGPPSSARSAPARSATATPRSSAPRRTSPAARIVHPPRPRVRSTVLTRQHLQQRPRLARLRPSTRRLRSRQVHGGRAALLRLRRCTDDS

SEQ ID NO: 83731 - protein, 148 aa, Setaria italica
  Transcript Sequence Number=SeqID_17757
  Gene Ontology: Mol. function=protein binding; Cellular component =integral to membrane; Biological process=vesicle-mediated transport
  Homolog annotation: Hit_ID=B9ST66; Match level="QueryCoverage=71%, HitCoverage=45%, E-value=2e-53, Identity=92%"; Hit description=Snare protein sec22, putative
MCGCLSSVSISTLMCGFHLVVNYITNDVHYCCCTLIQQNSYIIEGRVCYLTLCDRSYPKKLAFQYLEDLKNEFEKVNGSQIETAARPYAFIKFDAFIQKTKKLYLDTRTQRNLAKLNDELYEVHQIMTRNVQEVLGVGEKTDQVSENV

SEQ ID NO: 83732 - protein, 98 aa, Setaria italica
  Transcript Sequence Number=SeqID_17758
  Gene Ontology: Mol. function=protein binding; Cellular component =integral to membrane; Biological process=vesicle-mediated transport
  Homolog annotation: Hit_ID=Q69N52; Match level="QueryCoverage=64%, HitCoverage=40%, E-value=2e-26, Identity=92%"; Hit description =Vesicle transport protein-like
FASCYISKMVKLTMIARVTDGLPLSEGLDDGRDLKDADFYKQQAKQLFKNLSKGQHEASRMSIETGPYLFQYPFIIFLIRNIFCSIAPCLERGHSSGS

SEQ ID NO: 83733 - protein, 58 aa, Setaria italica
  Transcript Sequence Number=SeqID_17759
  Gene Ontology: Cellular component=endoplasmic reticulum membrane
  Homolog annotation: Hit_ID=Q94AU2; Match level="QueryCoverage=82%, HitCoverage=22%, E-value=4e-15, Identity=79%"; Hit description=25.3 kDa vesicle transport protein
QLFNVRFLFAEVSEMSSRLTSDTRIYAEKAKDLNRQALIRKYAPVAIVIGIVLIVFWV

SEQ ID NO: 83734 - protein, 242 aa, Setaria italica
  Transcript Sequence Number=SeqID_17760
  Gene Ontology: Mol. function=protein binding; Cellular component =integral to membrane; Biological process=vesicle-mediated transport
  Homolog annotation: Hit_ID=Q94AU2; Match level="QueryCoverage=85%, HitCoverage=94%, E-value=1e-105, Identity=86%"; Hit description=25.3 kDa vesicle transport protein
  Pfam annotation: Domain name=Synaptobrevin; Domain location=145-231; Score=63.0; E_value=1.1e-15; Accession=PF00957.13; Description =Synaptobrevin
ITYASLPLAIFPKMVKLTMIARVTDGLPLSEGLDDGRDLKDADFYKQQAKQLFKNLSKGQHEASRMSIETGPYLFHYIIEGRVCYLTLCDRSYPKKLAFQYLEDLKNEFEKVNGSQIETAARPYAFIKFDAFIQKTKKLYLDTRTQRNLAKLNDELYEVHQIMTRNVQEVLGVGEKLDQVSEMSSRLTSDTRIYAEKAKDLNRQALIRKYAPVAIVIRTVTQSQIAHTAFNDVVEKVWSSLD

SEQ ID NO: 83735 - protein, 156 aa, Setaria italica
  Transcript Sequence Number=SeqID_17761
  Gene Ontology: Mol. function=protein binding; Cellular component =endoplasmic reticulum membrane; Biological process=vesicle-mediated transport
  Homolog annotation: Hit_ID=Q94AU2; Match level="QueryCoverage=96%, HitCoverage=72%, E-value=1e-74, Identity=85%"; Hit description=25.3 kDa vesicle transport protein
  Pfam annotation: Domain name=Synaptobrevin; Domain location=70-156; Score=83.6; E_value=6.8e-22; Accession=PF00957.13; Description =Synaptobrevin
FLDIWFHWCYLTLCDRSYPKKLAFQYLEDLKNEFEKVNGSQIETAARPYAFIKFDAFIQKTKKLYLDTRTQRNLAKLNDELYEVHQIMTRNVQEVLGVGEKLDQVSEMSSRLTSDTRIYAEKAKDLNRQALIRKYAPVAIVIGIVLMLFWVKNKIW

SEQ ID NO: 83736 - protein, 141 aa, Setaria italica
  Transcript Sequence Number=SeqID_17762
IRAGNRRIQAVRRWRPAPLACGVLRRREGRRPDADLCSADAYPCESTPNRTCARHHQVPLPQPPSSLSSNAAFGHTDVVLYAAGSVQRDEETARCRLSRSLNVEAEPGPGHRSVGVLVGCGILRVVLPCLTSSVSSASWQL

SEQ ID NO: 83737 - protein, 170 aa, Setaria italica
  misc_feature (109)..(109): Xaa can be any naturally occurring amino acid
  Transcript Sequence Number=SeqID_17763
  Gene Ontology: Mol. function=nucleic acid binding; Cellular component= intracellular; Biological process=biological_process
  Homolog annotation: Hit_ID=B9T403; Match level="QueryCoverage=97%, HitCoverage=19%, E-value=3e-68, Identity=67%"; Hit description=RNA -binding protein, putative
  Pfam annotation: Domain name=RRM_1; Domain location=1-54; Score=7.8; E_value=0.037; Accession=PF00076.14; Description=RNA recognition motif. (a.k.a. RRM, RBD, o
  Pfam annotation: Domain name=zf-RanBP; Domain location=84-113; Score =21.0; E_value=0.0028; Accession=PF00641.10; Description=Zn-finger in Ran binding protein and others
  Pfam module annotation: Pfam domain module=RRM_1::zf-RanBP; Domain location=1-54::84-113
AQWGPLRSVRVIKERNSGMSRGFAFIDFPTVEAARRMMEGTAENGLEIDGRNVFFEYSSKPTGGPSLGQENFSRPTYGHRTVAAPCDWICTICGCMNFARRTSCFQCNXPRTEDALPADATGPTHVLVVRGLDENADEEMLRYEFAKHAPIKDIRLVRDKFTHVSRYLRK

SEQ ID NO: 83738 - protein, 167 aa, Setaria italica
  Transcript Sequence Number=SeqID_17764
  Gene Ontology: Mol. function=nucleic acid binding; Cellular component= intracellular
  Homolog annotation: Hit_ID=B9T403; Match level="QueryCoverage=96%, HitCoverage=17%, E-value=8e-28, Identity=48%"; Hit description=RNA -binding protein, putative
  Subcellular localization annotation: CTP_CleavageSite=76; ConfidenceScore=5.22e-01
KSDTTFHALSDTGSAEPHTTATTSTKGLMTTPEALATPAPYKTDISALVSNTSSGVSGSGKRRFSEAPGQSQYRDRAAERRNLYGSSLGNDSVGLDSTGDYPSRKGSSEIGSMPFPPGVGERSSGEISNTENYEVITADRAIDESNVGNRILRNMGWQEGLVSSSPA

SEQ ID NO: 83739 - protein, 300 aa, Setaria italica
  Transcript Sequence Number=SeqID_17765
  Gene Ontology: Mol. function=nucleic acid binding; Cellular component= intracellular
  Homolog annotation: Hit_ID=B9T403; Match level="QueryCoverage=14%, HitCoverage=4%, E-value=4e-13, Identity=83%"; Hit description=RNA -binding protein, putative
MGSGVINEPEYRAGGSYNGRRPVDEGFSRDSYGKGAFYQDVHDRNMYPPPASVGAMWSQPRRNHDEEYATARDHRRHGTDYHNDGKHHEFDSYRGVDKLRNNYHAADNYYESGSRRDFGVDRSKRIGSRERAEFHGEFEDRYRSSHQSRENSYERDHEYGRHSYDSDYERGRRDSNWRRHDEGERERRDLSRERDESPYMRHSRSRSRGHDDRSRSRSRSRSPRARSRGRNQRDGFYDDNRFDRRREYDWDERRRGDSVAPSATVVVKGLSLKTNDDDLYQILAQWGPLRSVRVIKERNS

SEQ ID NO: 83740 - protein, 507 aa, Setaria italica
  Transcript Sequence Number=SeqID_17766
  Gene Ontology: Mol. function=nucleic acid binding; Cellular component= intracellular; Biological process=biological_process
  Homolog annotation: Hit_ID=B9T403; Match level="QueryCoverage=95%, HitCoverage=51%, E-value=1e-167, Identity=61%"; Hit description=RNA -binding protein, putative
  Pfam annotation: Domain name=RRM_1; Domain location=161-233; Score =80.5; E_value=6.1e-21; Accession=PF00076.14; Description=RNA recognition motif. (a.k.a. RRM, RBD, o
  Pfam annotation: Domain name=RRM_1; Domain location=4-75; Score=55.9; E_value=1.5e-13; Accession=PF00076.14; Description=RNA recognition motif. (a.k.a. RRM, RBD, o
  Pfam annotation: Domain name=zf-RanBP; Domain location=105-134; Score= 19.4; E_value=0.0045; Accession=PF00641.10; Description=Zn-finger in Ran binding protein and others
  Pfam module annotation: Pfam domain module=RRM_1::RRM_1::zf-RanBP; Domain location=161-233::4-75::105-134
MLQFVKGLSLKTNDDDLYQILAQWGPLRSVRVIKERNSGMSRGFAFIDFPTVEAARRMMEGTAENGLEIDGRNVFFEYSSKPTGGPSLGQENFSRPTYGHRTVAAPCDWICTICGCMNFARRTSCFQCNEPRTEDALPADATGTTPQFGRRGSELGPTHVLVVRGLDENADEEMLRYEFAKHAPIKDIRLVRDKFTHVSRGFAFVHFHSVEDATKALEATNGITLEKNGEVLRVAYAKSTHGPVSGGSQSNSLAAAAIEAASFAQQYDAIGWAPKEYNPDEKQNSNSESQRDGSAAQSGFVWDEKSGYYYDSASGFYYDGNTGLYYDSNSGVWYSYDQQTQQYVPCNDQNNTKAAGVVANENTTTSDSNTGKKVVISAPAATIKQSEKTSLPDAVQAAANAALAAEKREKEKAKEIKLASKTSLIANKKKMNNVLAMWKQRNQEGQAARIVLGDKEPSRSDDKSNHSHSGTGFSLKSKPSSDSGNVKDMNSSASYNSFWPGNFLFVP

SEQ ID NO: 83741 - protein, 371 aa, Setaria italica
  misc_feature (13)..(13): Xaa can be any naturally occurring amino acid
  Transcript Sequence Number=SeqID_17767
  Gene Ontology: Mol. function=nucleic acid binding; Cellular component= intracellular; Biological process=nuclear mRNA splicing, via spliceosome
  Homolog annotation: Hit_ID=B9T403; Match level="QueryCoverage=90%, HitCoverage=35%, E-value=4e-83, Identity=54%"; Hit description=RNA -binding protein, putative
  Pfam annotation: Domain name=G-patch; Domain location=295-339; Score =62.5; E_value=1.6e-15; Accession=PF01585.15; Description=G-patch domain
VKTSLPDAVHSVXIVAAAAEKREKEKAKEIKLASKTSLIANKKKMNNVLAMWKQRNQEGQAARIVLGDKEPSRSDDKSNHSHSGTGFSLKSKPSSDSGNVKDMNSSASYNSFGQGTSSTQMLDSDVKPRPVSNSLGTTVMGVIRGSTRGVIKSDTTFHALSDTGSAEPHTTATTSTKGLMTTPEALATPAPYKTDISALVSNTSSGVSGSGKRRFSEAPGQSQYRDRAAERRNLYGSSLGNDSVGLDSTGDYPSRKGSSEIGSMPFPPGVGERSSGEISNTENYEVITADRAIDESNVGNRILRNMGWQEGLGLGKDGSGIKEPVQAKSVDVRAGLGSQQRKADPSLEAQAGDSYKTIIQKKAIARFREMS

SEQ ID NO: 83742 - protein, 170 aa, Setaria italica
  misc_feature (61)..(61): Xaa can be any naturally occurring amino acid
  misc_feature (66)..(66): Xaa can be any naturally occurring amino acid
  Transcript Sequence Number=SeqID_17768
  Subcellular localization annotation: CTP_CleavageSite=30; ConfidenceScore=5.18e-01
GSEEREEGAKREREIHPWIPPPSSRLSRRPASSRNSPPRRPSSSRRSASSRSSLPRLPSPXNGVPXSASSRSSLPRLPSPSMVSRNPSSSRSSPPHRPSPSVVPRRPSSSRNSPRSTRRPCSGSPSSPPAPPTPPRSPVARTPPSTTAARSTSPSPSTSPQARGTCSASR

SEQ ID NO: 83743 - protein, 81 aa, Setaria italica
  Transcript Sequence Number=SeqID_17769
  Subcellular localization annotation: CTP_CleavageSite=42; ConfidenceScore=5.18e-01
LVKLLCQMGHVCRLHAAASLQMKPSLCSVTTHVTLISSLVASPNHLSETISHERLAQTTSLCLSLFLSFFLSASCKLITLV

SEQ ID NO: 83744 - protein, 238 aa, Setaria italica
  Transcript Sequence Number=SeqID_17770
  Gene Ontology: Mol. function=electron carrier activity; Cellular component=membrane; Biological process=oxidation reduction
  Homolog annotation: Hit_ID=Q7X7X4; Match level="QueryCoverage=100%, HitCoverage=44%, E-value=1e-102, Identity=73%"; Hit description =Cytochrome P450 99A2
  Pfam annotation: Domain name=p450; Domain location=1-238; Score= -147.7; E_value=0.00016; Accession=PF00067.14; Description=Cytochrome P450
SFGQVCSSDLQEQFLSALDVALKVSGGYTIGDLFPSLWFIDVFTGLRRRVWRARWRMDTVLEKIIAQSESQRGDSLLGVLLRIRDEGDLEFPIDTTNIKAIILDMFAGGTETVSTAAEWVMSELMRNPEVMAKAQAEVRRVFDNKHPQDHEGKMDELHYTKMVIKESMRLNPVAPLLLPHFCRETCDIHGFEVTKGTRVMVNVWAMARSPEYWHDPEKFKPERFEDGTIDYKGSRFEY

SEQ ID NO: 83745 - protein, 44 aa, Setaria italica
  Transcript Sequence Number=SeqID_17771
ILMIQVHKLISSLPLEHRYTKRGIYVIHTHYHAISLSLAKTSTS

SEQ ID NO: 83746 - protein, 74 aa, Setaria italica
  misc_feature (8)..(8): Xaa can be any naturally occurring amino acid
  misc_feature (13)..(13): Xaa can be any naturally occurring amino acid
  Transcript Sequence Number=SeqID_17772
  Gene Ontology: Mol. function=oxidoreductase activity; Cellular component=chloroplast envelope; Biological process=oxidation reduction
  Homolog annotation: Hit_ID=Q52QX9; Match level="QueryCoverage=89%, HitCoverage=19%, E-value=3e-26, Identity=83%"; Hit description =Aldo/keto reductase AKR
KFGITPDXREVRXDPAYVRAACEGSLRRLGVECIDLYYQHRIDTTVPVEATIGELKKLVEEGKIKYIGLSEASA

SEQ ID NO: 83747 - protein, 58 aa, Setaria italica
  Transcript Sequence Number=SeqID_17773
  Gene Ontology: Mol. function=nucleotide binding; Biological process =response to stress
  Homolog annotation: Hit_ID=P09189; Match level="QueryCoverage=58%, HitCoverage=5%, E-value=5e-12, Identity=88%"; Hit description=Heat shock cognate 70 kDa protein
MFFCRDLTVKLTVLLLVPLDADAKRLIGRRFSDPSVQSDMKLWPFKVVAGPADKPMIV

SEQ ID NO: 83748 - protein, 125 aa, Setaria italica
  Transcript Sequence Number=SeqID_17774
  Gene Ontology: Mol. function=nucleotide binding; Cellular component =chloroplast; Biological process=response to stress
  Homolog annotation: Hit_ID=Q2QZ41; Match level="QueryCoverage=88%, HitCoverage=17%, E-value=5e-41, Identity=73%"; Hit description=Heat shock cognate 70 kDa protein, putative, expressed
MLSLSASLRHFSTGSMHFLNRSRFEELNMDLFRKCMEPVEKCLRDAKMDKSTVHDVVLVGGSTRIPRVQQLLQDFFNGKELCKNINPDEAVAYGAAVQAAILSGEGNEKVENTCSFLVGWLCSSG

SEQ ID NO: 83749 - protein, 158 aa, Setaria italica
  misc_feature (134)..(134): Xaa can be any naturally occurring amino acid
  misc_feature (152)..(152): Xaa can be any naturally occurring amino acid
  Transcript Sequence Number=SeqID_17775
  Gene Ontology: Mol. function=nucleotide binding; Cellular component =cytoplasm; Biological process=response to stress
  Homolog annotation: Hit_ID=P09189; Match level="QueryCoverage=100%, HitCoverage=23%, E-value=2e-75, Identity=89%"; Hit description=Heat shock cognate 70 kDa protein
  Pfam annotation: Domain name=HSP70; Domain location=1-157; Score= -256.3; E_value=1.9e-05; Accession=PF00012.12; Description=Hsp70 protein
EEISSMVLTKMKEIAEAYLSTTIKNAVITVPAYFNDSQRQATKDAGVIAGLNVTRIINEPTAAAIAYGLDKKAASTGEKNVLIFDLGGGTFDVSILTIEEGIFEVKATAGDTHLGGEDFDNRLVNHFVQEFKEXSNKKDISGNPEGRSGRLXRTACER

SEQ ID NO: 83750 - protein, 191 aa, Setaria italica
  misc_feature (132)..(132): Xaa can be any naturally occurring amino acid
  Transcript Sequence Number=SeqID_17776
  Gene Ontology: Mol. function=nucleotide binding; Cellular component =chloroplast; Biological process=response to stress
  Homolog annotation: Hit_ID=Q2QZ41; Match level="QueryCoverage=97%, HitCoverage=30%, E-value=1e-95, Identity=91%"; Hit description=Heat shock cognate 70 kDa protein, putative, expressed
  Pfam annotation: Domain name=HSP70; Domain location=1-191; Score= -176.5; E_value=4.8e-08; Accession=PF00012.12; Description=Hsp70 protein
MVVWAKRTLSSTAQTTIEIDSLYEGIDFYSTITRARFEELNMDLFRKCMEPVEKCLRDAKMDKSTVHDVVLVGGSTRIPRVQQLLQDFFNGKELCKNINPDEAVAYGAAVQAAILSGEGNEKVQDLLLLDCXPSALGLETAGGVMTVLIPRNTTIPTKKEQVFSTYSDNQPGVLIQVYEGERTRTRDNNLL

SEQ ID NO: 83751 - protein, 344 aa, Setaria italica
  Transcript Sequence Number=SeqID_17777
  Gene Ontology: Mol. function=oxidoreductase activity; Cellular component=chloroplast envelope
  Homolog annotation: Hit_ID=B6T5H6; Match level="QueryCoverage=100%, HitCoverage=100%, E-value=1e-157, Identity=83%"; Hit description =Auxin-induced protein PCNT115
  Pfam annotation: Domain name=Aldo_ket_red; Domain location=15-318; Score=219.3; E_value=1e-62; Accession=PF00248.13; Description =Aldoketo reductase family
MEEAAPPQAPRVKLGAQGLDVSKLGFGCMGLTGSYNAPLGDEAVAAAVEHAFRRGVTFFDTSDAYGPHTNETLLGRALQRLPRGQVQVATKFGVGQGGAGGGLTVCGTPEYARACCEASLRRLGVSYIDLYYQHRIDTTVPIEDTIGELKKLVEEGKVKYIGLSEASPDTIRRAHAVHPITAVQMEWSLWSRDIEPEIVPLCRELGIGIVPYSPIGRGFFGGRGVTQQVSSESSLQSHPRFTADNLEKNKQIYLKMEDLAKKHQCSPAQLALAWVLHQGDDVVPIPGTTKIKNLDANIDSLKVKLTDEDMKEITSQIRADDVAGGRQYNSYAHTAWKYADTPKK

SEQ ID NO: 83752 - protein, 384 aa, Setaria italica
  misc_feature (181)..(181): Xaa can be any naturally occurring amino acid
  misc_feature (365)..(365): Xaa can be any naturally occurring amino acid
  misc_feature (373)..(373): Xaa can be any naturally occurring amino acid
  Transcript Sequence Number=SeqID_17778
  Gene Ontology: Mol. function=nucleotide binding; Cellular component =cytoplasm; Biological process=response to stress
  Homolog annotation: Hit_ID=P09189; Match level="QueryCoverage=100%, HitCoverage=58%, E-value=0.0, Identity=92%"; Hit description=Heat shock cognate 70 kDa protein
  Pfam annotation: Domain name=HSP70; Domain location=9-384; Score =558.0; E_value=1.1e-164; Accession=PF00012.12; Description=Hsp70 protein
  Pfam annotation: Domain name=MreB_Mbl; Domain location=7-384; Score= -271.0; E_value=0.022; Accession=PF06723.5; Description=MreBMbl protein
  Pfam module annotation: Pfam domain module=HSP70::MreB_Mbl; Domain location=9-384::7-384
MAGKGDGPAIGIDLGTTYSCVGVWQHDRVEIIANDQGNRTTPSYVAFTDSERLIGDAAKNQVAMNPINTVFDAKRLIGRRFSDASVQSDIKLWPFKVVPGSAEKPMIGVQFRGEEKQFSAEEISSMILNKMKETAEQYLGSTVKNAVVTVPAYFNDSQRQATKDAGVISGLNVMRIINEPXTAAAIAYGLDKKSSSDGEKNVLIFDLGGGTFDVSLLTIEEGIFEVKATAGDTHLGGEDFDNRLVNHFVQEFKRKNKKDISGNPRALRRLRTACERAKRTLSSTAQTTIEIDSLYEGIDFYTTITRARFEELNMDLFRKCMEPVEKCLRDAKMDKSSVHDVVLVGGSTRIPRVQQLLQDFFNGKXLCKSINPXEAVAYGAAVQA

SEQ ID NO: 83753 - protein, 378 aa, Setaria italica
  misc_feature (26)..(26): Xaa can be any naturally occurring amino acid
  Transcript Sequence Number=SeqID_17779
  Gene Ontology: Mol. function=nucleotide binding; Cellular component =cytoplasm; Biological process=response to stress
  Homolog annotation: Hit_ID=Q2QZ41; Match level="QueryCoverage=97%, HitCoverage=59%, E-value=0.0, Identity=97%"; Hit description=Heat shock cognate 70 kDa protein, putative, expressed
  Pfam annotation: Domain name=HSP70; Domain location=10-377; Score =513.7; E_value=2.3e-151; Accession=PF00012.12; Description=Hsp70 protein
  Pfam annotation: Domain name=MreB_Mbl; Domain location=8-376; Score= -269.0; E_value=0.016; Accession=PF06723.5; Description=MreBMbl protein
  Pfam module annotation: Pfam domain module=HSP70::MreB_Mbl; Domain location=10-377::8-376
MAPTKGEGPAIGIDLGTTYSCVGVWXQHDRVEIIANDQGNRTTPSYVGFTDSERLIGDAAKNQVAMNPINTVFDAKRLIGRRFSDASVQSDIKMWPYKVIPGPGDKPMIVVQYKGEEKQFSAEEISSMVLIKMREIAEAYLGLTIKNAVVTVPAYFNDSQRQATKDAGVIAGLNVMRIINEPTAAAIAYGLDKKATSVGEKNVLIFDLGGGTFDVSLLTIEEGIFEVKATAGDTHLGGEDFDNRLVNHFVQEFKRKNKKDITGNPRALRRLRTSCERAKRTLSSTAQTTIEIDSLYEGIDFYSTITRARFEELNMDLFRKCMEPVEKCLRDAKMDKSTVHDVVLVGGSTRIPKVQQLLQDFFNGKELCKSILRHARDT

SEQ ID NO: 83754 - protein, 611 aa, Setaria italica
  misc_feature (39)..(39): Xaa can be any naturally occurring amino acid
  Transcript Sequence Number=SeqID_17780
  Gene Ontology: Mol. function=nucleotide binding; Cellular component =cytoplasm; Biological process=response to stress
  Homolog annotation: Hit_ID=P09189; Match level="QueryCoverage=99%, HitCoverage=93%, E-value=0.0, Identity=91%"; Hit description=Heat shock cognate 70 kDa protein
  Pfam annotation: Domain name=HSP70; Domain location=8-611; Score =1365.7; E_value=0; Accession=PF00012.12; Description=Hsp70 protein
  Pfam annotation: Domain name=Hydantoinase_A; Domain location=134-390; Score=-115.4; E_value=0.092; Accession=PF01968.10; Description =Hydantoinaseoxoprolinase
  Pfam annotation: Domain name=MreB_Mbl; Domain location=6-388; Score= -242.5; E_value=0.00028; Accession=PF06723.5; Description=MreBMbl protein
  Pfam module annotation: Pfam domain module=HSP70::Hydantoinase _A::MreB_Mbl; Domain location=8-611::134-390::6-388
MAKGEGPAIGIDLGTTYSCVGVWQHDRVEIIANDQGNRXTTPSYVAFTDTERLIGDAAKNQVAMNPTNTVFDAKRLIGRRFSDPSVQSDMKLWPFKVVAGPADKPMIVVNYKGEEKQFSAEEISSMVLTKMKEIAEAYLGSTIKNAVVTVPAYFNDSQRQATKDAGVISGLNVMRIINEPTAAAIAYGLDKKATSSGEKNVLIFDLGGGTFDVSLLTIEEGIFEVKATAGDTHLGGEDFDNRMVNHFVQEFKRKHKKDISGNPRALRRLRTACERAKRTLSSTAQTTIEIDSLYEGIDFYTTITRARFEELNMDLFRKCMEPVEKCLRDAKMDKSSVHDVVLVGGSTRIPKVQQLLQDFFNGKELCKSINPDEAVAYGAAVQAAILSGEGNEKVQDLLLLDVTPLSLGLETAGGVMTVLIPRNTTIPTKKEQVFSTYSDNQPGVLIQVYEGERARTKDNNLLGKFELSGIPPAPRGVPQITVCFDIDANGILNVSAEDKTTGQKNKITITNDKGRLSKEEIEKMVQEAEKYKAEDEEHKKKVDAKNALENYAYNMRNTIKDDKIASKLGADDKKRIEEAIDGAISWLDSNQLAEADEFEDKMKELEGICNP

SEQ ID NO: 83755 - protein, 345 aa, Setaria italica
  misc_feature (78)..(78): Xaa can be any naturally occurring amino acid
  Transcript Sequence Number=SeqID_17781
  Gene Ontology: Mol. function=oxidoreductase activity; Cellular component=chloroplast envelope
  Homolog annotation: Hit_ID=B6T5H6; Match level="QueryCoverage=100%, HitCoverage=100%, E-value=1e-154, Identity=83%"; Hit description =Auxin-induced protein PCNT115
  Pfam annotation: Domain name=Aldo_ket_red; Domain location=15-319; Score=217.2; E_value=4.3e-62; Accession=PF00248.13; Description =Aldoketo reductase family
MEEAAPPQVPRVKLGAQGLEVSKLGFGCMGLTGSYNAPLGDEAVAAVVEHAFRRGVTFFDTSDAYGPHTNETLLGRAXLQRLPRGQVQVATKFGVGQGGAGGGLTICGTPEYARACCEASLRRLGVGYIDLYYQHRIDTTVPIEDTIGELKKLVEEGKVKYIGLSEASPDTIRRAHAVHPITAVQMEWSLWSRDIEPEIVPLCRELGIGIVPYSPIGRGFFGGRGVTQQVSSESSLQRHPRFTADNLEKNKQIYLKMEDLAKKHQCSPAQLALAWVLHQGDDVVPIPGTTKIKNLDANIDSLKVKLTEEDMKEITSQIRADDVAGGRQYNSYAHTAWKYADTPKK

SEQ ID NO: 83756 - protein, 480 aa, Setaria italica
  misc_feature (136)..(136): Xaa can be any naturally occurring amino acid
  misc_feature (355)..(355): Xaa can be any naturally occurring amino acid
  Transcript Sequence Number=SeqID_17782
  Gene Ontology: Mol. function=nucleotide binding; Cellular component =cytoplasm; Biological process=response to stress
  Homolog annotation: Hit_ID=Q2QZ41; Match level="QueryCoverage=100%, HitCoverage=77%, E-value=0.0, Identity=92%"; Hit description=Heat shock cognate 70 kDa protein, putative, expressed
  Pfam annotation: Domain name=HSP70; Domain location=9-480; Score =920.9; E_value=6.4e-274; Accession=PF00012.12; Description=Hsp70 protein
  Pfam annotation: Domain name=MreB_Mbl; Domain location=7-319; Score= -275.4; E_value=0.042; Accession=PF06723.5; Description=MreBMbl protein
  Pfam module annotation: Pfam domain module=HSP70::MreB_Mbl; Domain location=9-480::7-319
MAGKGDGPAIGIDLGTTYSCVGVWQHDRVEIIANDQGNRTTPSYVAFTDSERLIGDAAKNQVAMNPINTVFDAKRLIGRRFSDASVQSDIKLWPFKVISGPGEKPMIVVQHKGEEKQFAAEEISSMVLIKMREIAXEAYLGSTIKNAVVTVPAYFNDSQRQATKDAGVIAGLNVLRIINEPTAAAIAYGLDKKATSVGEKNVLIFDLGGGTFDVSLLTIEEGIFEVKATAGDTHLGGEDFDNRMVNHFVQEFKRKNKKDITGNPRALRRLRTACERAKRTLSSTAQTTIEIDSLYEGIDFYSTITRARFEELNMDLFRKCMEPVEKCLRDAKMDKSTVHDVVLVGGSTRIPRVVXQLLQDFFNGKELCKNINPDEAVAYGAAVQAAILSGEGNEKVQDLLLLDVTPLSLGLETAGGVMTVLIPRNTTIPTKKEQVFSTYSDNQPGVLIQVYEGERTRTRDNNLLGKFELSGIPPAPRGVP

SEQ ID NO: 83757 - protein, 482 aa, Setaria italica
  Transcript Sequence Number=SeqID_17783
  Gene Ontology: Mol. function=ribulose-bisphosphate carboxylase activity; Cellular component=chloroplast ribulose bisphosphate carboxylase complex; Biological process=carbon utilization by fixation of carbon dioxide
  Homolog annotation: Hit_ID=O03042; Match level="QueryCoverage=98%, HitCoverage=99%, E-value=0.0, Identity=89%"; Hit description =Ribulose bisphosphate carboxylase large chain
  Pfam annotation: Domain name=RuBisCO_large; Domain location=161-469; Score=820.2; E_value=1.3e-243; Accession=PF00016.12; Description =Ribulose bisphosphate carboxylase large chain, catalytic domain
  Pfam annotation: Domain name=RuBisCO_large_N; Domain location=28-153; Score=297.6; E_value=2.7e-86; Accession=PF02788.8; Description =Ribulose bisphosphate carboxylase large chain, N-terminal domain
  Pfam module annotation: Pfam domain module=RuBisCO_large::RuBisCO _large_N; Domain location=161-469::28-153
MSCREGLMSPQTETKASVGFKAGVKDYKLTYYTPEYETKDTDILAAFRVTPQPGVPPEEAGAAVAAESSTGTWTTVWTDGLTSLDRYKGRCYHIEPVPGEADQYICYIAYPLDLFEEGSVTNMFTSIVGNVFGFKALRALRLEDLRIPTAYAKTFQGPPHGIQVERDKLNKYGRPLLGCTIKPKLGLSAKNYGRACYECLRGGLDFTKDDENVNSQPFMRWRDRFVFCAEAIYKAQAETGEIKGHYLNATAGTCEEMIKRAAFARELGVPIVMHDYLTGGFTANTSLSYYCRDNGLLLHIHRAMHAVIDRQKNHGMHFRVLAKALRMSGGDHIHSGTVVGKLEGEREITLGFVDLLRDDFIEKDRSRGIFFTQDWASMPGVIPVASGGIHVWHMPALTEIFGDDSVLQFGGGTLGHPWGNAPGAAANRVALEACVQARNEGRDLAREGNEIIKAACKWSPELAAACEVWKEIKFEFEAMDTL

SEQ ID NO: 83758 - protein, 141 aa, Setaria italica
  Transcript Sequence Number=SeqID_17784
ALRGVANIQEDLMGKQIESLELIFVSMRETLEKFNGIVKALNKALRDTNQMVRGGSALTAKQMQLQVGILPTIAECLDGLRTLCEMHQAEFALKSSIISLLTWKSSSSDIVVLRQLLVDQPNIPKDEVQSIFDVIFADEIC

SEQ ID NO: 83759 - protein, 100 aa, Setaria italica
  Transcript Sequence Number=SeqID_17785
FIGLFWLVFSFYQIMPARYYRPGGFCETEAAICVHPTEPWILRASLHEVFEVWDYDRMVWDIDSPKCKSTLPATYEVSCFDFFIQGGKQYLIVVHHNEYK

SEQ ID NO: 83760 - protein, 858 aa, Setaria italica
  Transcript Sequence Number=SeqID_17786
  Gene Ontology: Mol. function=protein serine/threonine kinase activity; Biological process=protein amino acid phosphorylation
  Homolog annotation: Hit_ID=Q7XVI0; Match level="QueryCoverage=47%, HitCoverage=88%, E-value=1e-68, Identity=38%"; Hit description =OSJNBa0016N04.14 protein
  Pfam annotation: Domain name=Pkinase; Domain location=41-323; Score =180.3; E_value=5.3e-51; Accession=PF00069.17; Description=Protein kinase domain
  Pfam annotation: Domain name=Pkinase_Tyr; Domain location=41-323; Score=44.9; E_value=1e-16; Accession=PF07714.9; Description=Protein tyrosine kinase
  Pfam annotation: Domain name=WD40; Domain location=679-717; Score =12.4; E_value=1.4; Accession=PF00400.24; Description=WD domain, G -beta repeat
  Pfam annotation: Domain name=WD40; Domain location=765-801; Score =19.7; E_value=0.012; Accession=PF00400.24; Description=WD domain, G -beta repeat
  Pfam module annotation: Pfam domain module=Pkinase::Pkinase _Tyr::WD40::WD40; Domain location=41-323::41-323::679-717::765-801
MYSGASTFDDYRKQLQIVLQDPSEEPVPLSLDYLKAITDGFSSDRLVGRGGFGEVYRGVLGREKFIAIKKLYAEHVVDDSKYKAELNSLMRIRHPNIVQLIGYCAETKFEAMPQNGEHILAEVRQRLLCFEYISNGSLRDYVLGLDLGWDKRYAIMEGICKGLDFLHEECNLTHMDLKPENILIDDDMVPKITDFGLSRLRDAQKSQIFTHTLTGTLGYMPPEYLLEGKISHKTDIYSLGVIMCEIITGEKVPIGWSSYSPKSMEFTERACGRWMKIFEKSLNDASLKKIYIKQVKQLLDIALKCVDHDRTKRPGSSEILKAFYPNPAERSLCESNSNYGQVIELLSVHPLQLDFSLPEPKKLHRSSCSLHLTNNIDVPVVFRLLPSERLSAHFLPQSGVVPPKCRYTLAVVMHHQQNPRFGNDDFFTLESTKERYQGLRIVDPGALITKARERGLKVHEVKIAALCAHTDPPIRPNLKPELARPVSWDRQDVKPELKIMPARYYRPGGFCETEAAICVHPTEPWILRASLHEVFEVWDYDRMEKVHFCFAQPQRFYFIPSEEADIYGDADGQLSLPTGIPKLVSRKRWILVGSSTEYSRRDVGYIYVYSYMAVKNFKGSKTYILSKIKSFKAHERGTVLLEVHPSRPYVLSSLVHDNSSDGNAPVVCSIKLWDWERGWDCVQTFNTEDFPRQLKFNPNDQDTFVTFFKRKGVKVWDIDSPKCKSTLPATYEVSCFDFFIQGGKQYLIVVHHNEYKSTIWDYDTGTLVETLKGKNISTACSHPELPVLITGSIDGRVSLWSSSTFNLVGILNCYLGRVYNVFGVKGSERIVIGHAHGIAVAEIGHMLERPHESEGSEI

SEQ ID NO: 83761 - protein, 152 aa, Setaria italica
  Transcript Sequence Number=SeqID_17787
  Subcellular localization annotation: CTP_CleavageSite=18; ConfidenceScore=5.18e-01
MAKKLGKKARKFARKNLQSAAKRNRKIRNQFNHRRPRRGGSGAREDGDEDLLQRVDDASTMATNDAADALISGLEFPEDDVEIDADLSDSDGYLSEDPGCPYYSDGEDGDDVKDCIMQDGLDKQNDDMNLDIKKQKKKLKKLLDKDPEFANF

SEQ ID NO: 83762 - protein, 225 aa, Setaria italica
  Transcript Sequence Number=SeqID_17788
  Gene Ontology: Mol. function=structural constituent of ribosome; Cellular component=ribonucleoprotein complex; Biological process =translation
  Homolog annotation: Hit_ID=B4FRZ3; Match level="QueryCoverage=81%, HitCoverage=79%, E-value=4e-55, Identity=64%"; Hit description=50S ribosomal protein L21
  Pfam annotation: Domain name=Ribosomal_L21p; Domain location=107-203; Score=159.9; E_value=7.4e-45; Accession=PF00829.13; Description =Ribosomal prokaryotic L21 protein
  Subcellular localization annotation: CTP_CleavageSite=62; ConfidenceScore=5.75e-01
LLPTRTSSSMPPLPAAAMATATATATLPLRLLASKTLTLSSLPYARRSLSVSAVAHRRWQLRAAADPDAVEVEFVEPEAEAEEEEPAVPEPVEAQLAAAGAGKDADIFAVVMIGSRQYIVMPGRYIYTQRLKGANVNDQIILNKVLLVSTRDKAYIGMPVVTNAAVHAVVEEQGRDDKVIVYKYKKKKKYQRKLGHRQPNTRLRITGISGYEEYPADPILDPAAA

SEQ ID NO: 83763 - protein, 55 aa, Setaria italica
  Transcript Sequence Number=SeqID_17789
  Homolog annotation: Hit_ID=B6TM91; Match level="QueryCoverage=100%, HitCoverage=10%, E-value=8e-23, Identity=85%"; Hit description =PsRT17-1 like protein
NMALLGRIFVNKSMEWLDFQQAVQAGHKGRYGQIRLRKPKQSIYTYPAPDCMCHG

SEQ ID NO: 83764 - protein, 228 aa, Setaria italica
  Transcript Sequence Number=SeqID_17790
  Gene Ontology: Biological process=pollen maturation
  Homolog annotation: Hit_ID=Q9ZVT9; Match level="QueryCoverage=99%, HitCoverage=22%, E-value=1e-97, Identity=71%"; Hit description =F15K9.2 protein
  Pfam annotation: Domain name=C2; Domain location=25-107; Score=72.4; E_value=1.6e-18; Accession=PF00168.22; Description=C2 domain
  Pfam annotation: Domain name=GRAM; Domain location=176-227; Score =35.9; E_value=1.6e-07; Accession=PF02893.12; Description=GRAM domain
  Pfam module annotation: Pfam domain module=C2::GRAM; Domain location =25-107::176-227
IGRFIQAKRQRGDHGVKAQGDGWLLTVALIEGTNLAATKSSGYSDPYVVFTCNGKTKASSIKFHTLEPQWNEIFEFDAMEDPPSVMEINVYDFDGPFDEVACLGHAEVNFLKYNISELADIWIPLKGKLAQACQSKLHLRIFLNNTRGTQVVKDYLDKMEKEVGKKIAVRSPHANLAFQKIFSLPAEEFLINDFTCHLKRKMLTQGRLFLSPRIFGFYTNLFGQQKQN

SEQ ID NO: 83765 - protein, 89 aa, Setaria italica
  Transcript Sequence Number=SeqID_17791
LYFPQGFALYNEPIPKLLSSPWIHDNDTHRYACLINCPIGSLHSCFVCTTELQARFMSFTTLVAAATFTTELKLSKSLFMSYTPLSFLD

SEQ ID NO: 83766 - protein, 389 aa, Setaria italica
  Transcript Sequence Number=SeqID_17792
  Gene Ontology: Mol. function=electron carrier activity; Cellular component=endoplasmic reticulum membrane; Biological process =oxidation reduction
  Homolog annotation: Hit_ID=B6STM6; Match level="QueryCoverage=94%, HitCoverage=72%, E-value=0.0, Identity=86%"; Hit description =Cytochrome P450 CYP94C20
  Pfam annotation: Domain name=p450; Domain location=16-389; Score= -60.2; E_value=9.4e-09; Accession=PF00067.14; Description=Cytochrome P450
AFSAFSLCLVALAVVLLLVRRWPWCSCHVCRAYLTGSWARDFTNLGDWYAHLLRESPTGTVHVHVLGCTVTANPANVEYMLKTNFDNFPKGKTFAALLGDLLGGGIFNVDGDAWRHQRKMASLELGSVAVRSYAYKIIAQEVEARLMPVLADAADRGAVVDLQDVFRRFAFDTICKISFGLDPGCLEREMPMSKLADAFDTATRLCAMRGAAASPLLWRMKRLLNIGSERELKKAIKLVDELAAAMIRERRKLGFANSHDLLSRFMASAGDAHAVDDKYLRDIVVSFLLAGRDTVSSALTMLFMLLSKNPDVAAAMRAEAGDDSTPVTYEHLKGLHYTHAVLYENMRLFPPVQFDSKFCAAADVLPDGTYVSGGARVMYHPYAMGRMPT

SEQ ID NO: 83767 - protein, 157 aa, Setaria italica
  misc_feature (25)..(25): Xaa can be any naturally occurring amino acid
  Transcript Sequence Number=SeqID_17793
  Gene Ontology: Mol. function=metal ion binding; Cellular component =nucleus
  Homolog annotation: Hit_ID=Q10J83; Match level="QueryCoverage=85%, HitCoverage=13%, E-value=4e-45, Identity=64%"; Hit description=JmjC domain containing protein, expressed
KRDKKTDERLSVIALECLTWCEVDXNIRMFFDGYSRGAVGAEDLPVLLKLKDWPQHSSFEERLPRHNSEFMSALPFRAYTDPKYGPLNLAVKLPESVIKPDLGPKTYIAYGVAQELGIGDSVTKLHCDMSDAVNMLILLVLVAFVLNFAPFLDCLSN

SEQ ID NO: 83768 - protein, 123 aa, Setaria italica
  misc_feature (48)..(48): Xaa can be any naturally occurring amino acid
  Transcript Sequence Number=SeqID_17794
RGKQTDQSYEDHMNVPFSKGKSEVALCATNGGEKLGNGFSSEDKFESXSDAEENFKPKIEISLEPKDDKAPFVEGNQSEGGALWDIFRWEDVSKLHDYLMKHAKEFSHCNYEPEEQYKQKHGG

SEQ ID NO: 83769 - protein, 140 aa, Setaria italica
  Transcript Sequence Number=SeqID_17795
  Gene Ontology: Mol. function=metal ion binding; Cellular component =nucleus
  Homolog annotation: Hit_ID=Q10J83; Match level="QueryCoverage=60%, HitCoverage=7%, E-value=2e-34, Identity=76%"; Hit description=JmjC domain containing protein, expressed
  Subcellular localization annotation: CTP_CleavageSite=47; ConfidenceScore=5.11e-01
PIVRLVVHTASTTPQPSSSPPHWPQHSSFEERLPRHNSEFMSALPFRAYTDPKYGPLNLAVKLPESVIKPDLGPKTYIAYGVAQELGIGDSVTKLHCDMSDAVNILTHTDEIKLKVKRIKAIEKKREREEEQRKQKDGGG

SEQ ID NO: 83770 - protein, 202 aa, Setaria italica
  misc_feature (11)..(11): Xaa can be any naturally occurring amino acid
  misc_feature (125)..(125): Xaa can be any naturally occurring amino acid
  misc_feature (152)..(152): Xaa can be any naturally occurring amino acid
  Transcript Sequence Number=SeqID_17796
  Gene Ontology: Mol. function=metal ion binding; Cellular component =nucleus
  Homolog annotation: Hit_ID=Q6AUV7; Match level="QueryCoverage=95%, HitCoverage=18%, E-value=5e-33, Identity=39%"; Hit description=JmjC domain containing protein
IKFSMHIVRFXLPWLKEFHQEQMLEKSVEASIRGIDSCKMEVPLSECGSDERIYCNNCRTSIVDFHRSCNKCSYDICLSCCRELCQGLNPIGDVNSDKVTSLPDAGGKEDLQLGSSHCKGASQLXQEPSDGHNDILIDNAVPSEDRNPSLRXWRVNNNGTIPRPPNEFGGCGSSLLELKCLFGEKFIADLLEKAKSPPNSST

SEQ ID NO: 83771 - protein, 66 aa, Setaria italica
  Transcript Sequence Number=SeqID_17797
NRQRRNVPAVQEQEPEKKRKSDKDSNMCHQCQRNDSGRVVRCQGCIKREKKFRYCVKCIKRWFVPF

SEQ ID NO: 83772 - protein, 1009 aa, Setaria italica
  Transcript Sequence Number=SeqID_17798
  Gene Ontology: Mol. function=zinc ion binding; Cellular component =nucleus
  Homolog annotation: Hit_ID=Q10J83; Match level="QueryCoverage=82%, HitCoverage=75%, E-value=1e-149, Identity=55%"; Hit description=JmjC domain containing protein, expressed
  Pfam annotation: Domain name=Baculo_IE-1; Domain location=222-324; Score=-81.8; E_value=0.1; Accession=PF05290.3; Description =Baculovirus immediate-early protein (IE-0)
  Pfam annotation: Domain name=JmjC; Domain location=793-911; Score =30.8; E_value=1.5e-06; Accession=PF02373.14; Description=JmjC domain
  Pfam module annotation: Pfam domain module=Baculo_IE-1::JmjC; Domain location=222-324::793-911
MPPKRKRGGGRGRPRKEDKDAAPAADSDPTAAEENGENRGDEEMPEPHDSAKENGEGDPNGDMLQSCAEENGVEGVAEVSKPSKRRRKDPVADPSSLEFSGSGRLRQRRNVAAVQEQEPEKKRKIDKDSTMCHQCQRNDSGRVVRCQGCIKREKKFRYCVKCIKRWYPHLSEDDFATNCPVCHKNCKCKSCLRGDISTVGSRNANKSQKKADKCSVSEEDKIKFSMRIVRFLLPWLKEFHQEQMLEKSVEASIRGIDSCKMEVPLANCGSDERIYCNNCRTSIVDFHRSCNKCSYDICLSCCRELRQGLNPVGDVSSDKVTSLPDAGGKEDSQQGGSHCKVTSQEPSDGQNDILINNAVPSEDCNPSLRRWRVNSNGTIPCPPNEFGGCGSSLLELKCLFGEKFIADLLEKAKSLVNDVTVLELGGSNCSCFTESSGINNGTSRKSACRENSHDNHIYCPTARDVQNESLEHFQEHWLKGQPVIVRDTLALTSGLSWEPMVMWRALREKRDKKTDERLSVIALECLTWCEVDFNIRMFFDGYSRGAVGAEDLPVLLKLKDWPQHSSFEERLPRHNSEFMSALPFRAYTDPKYGPLNLAVKLPESVIKPDLGPKTYIAYGVAQELGIGDSVTKLHCDMSDAVNILTHTDEIKLKVKRIKAIEKKKESLKKKEEGGSQGSQTDLESTIEPRRKGLRSGSNIQQPALDVASEQEEIVQKSAVAVEAEGNLKNANGQQTDQSYEDHMNVPFSKGKSEVALSATNGGEKLGNGFSREDKIESPSDAEENFEPKVGKIAISLEPKDDAAPFAEGNQSEGGALWDIFRREDVSKLHDYLMKHAKEFRHCNYEPVVQVAHPIHDQCFYLTNEHKRKLKEEYGIEPWTFEQKLGEAVFIPAGCPHQVRNLKSCIKVALDFVSPENVRECIRLTEEFRLLPKGHRVNEDKLEVKKIALYALNQSIKDITEKDCEESEKNKAEGEEQGEQKSSSSVNRRGRGRGRGRGRRGRGERGGGSK

SEQ ID NO: 83773 - protein, 83 aa, Setaria italica
  Transcript Sequence Number=SeqID_17799
TTYNNQNITEQSQVSKTERILRTNNDQIEKMVLLRDYSVLDVNKQGKRIQLTQTPSLYKSSQHTIVVKRNSLCSHIHIMKPKR

SEQ ID NO: 83774 - protein, 84 aa, Setaria italica
  Transcript Sequence Number=SeqID_17800
CTAKKLANCYKFKKKEVQSKNSRRQAKQQKKSDDVQPLAQVENGDSNKGANLDLQEYNIIVNFTQILTAPICEVDNLLDQDLFF

SEQ ID NO: 83775 - protein, 117 aa, Setaria italica
  Transcript Sequence Number=SeqID_17801
  Gene Ontology: Mol. function=protein disulfide oxidoreductase activity; Biological process=cell redox homeostasis
  Homolog annotation: Hit_ID=B9RUQ1; Match level="QueryCoverage=96%, HitCoverage=20%, E-value=1e-11, Identity=39%"; Hit description =Electron transporter, putative
SAPGSPVFDPEILDAFRKALDELTPDSPLPNFVKRGGDGFEKREIQMFPGIVRARVSLLQEKINAKTKLAKKASPPPESAGRVVVYLTSLRGIRQTYEDCWSTSAILRSYGVRVDER

SEQ ID NO: 83776 - protein, 319 aa, Setaria italica
  Transcript Sequence Number=SeqID_17802
  Gene Ontology: Mol. function=3'-5' exonuclease activity; Cellular component=intracellular; Biological process=nucleobase, nucleoside, nucleotide and nucleic acid metabolic process
  Homolog annotation: Hit_ID=B9RPI0; Match level="QueryCoverage=100%, HitCoverage=69%, E-value=5e-99, Identity=52%"; Hit description=3-5 exonuclease, putative
  Pfam annotation: Domain name=DUF82; Domain location=154-311; Score =220.8; E_value=3.6e-63; Accession=PF01927.8; Description=Protein of unknown function DUF82
LATICEELLSISLSKELQCSNWSCRPLSEGQIQYAASDAYYLLDIFDLFQQKITMEGKCSSTTELTSDRHCSSSVIECSSSGYDICSGGYLMSIVTKYSEKILLTESDTKPRSSRRKEKTKLPNNAKCKDKVDCCTEWQGPPPWDPSIGGDGYPKFLCDVMIEGLAKHLRCVGIDAAIPSSKKPEPRELLNQTYKEGRILLTRDVKLLKYQYLASNQVYRVKSLLKHDQLAEVINTFQLKISEDQLMSRCTKCNGSFIQKPLTLEEAVEASKGFQVIPSCLFNRNLEFWKCTDCNQLYWEGTQYHNAVQKFLSVCNISD

SEQ ID NO: 83777 - protein, 188 aa, Setaria italica
  misc_feature (72)..(72): Xaa can be any naturally occurring amino acid
  Transcript Sequence Number=SeqID_17803
  Gene Ontology: Mol. function=catalytic activity
  Homolog annotation: Hit_ID=Q8H7V4; Match level="QueryCoverage=66%, HitCoverage=6%, E-value=1e-09, Identity=40%"; Hit description =Putative polyprotein from transposon TNT
RTLVGFLPAKKKNCGSDSSEDSDGPPQSVFVKYDSDNAADTKAEHKYFGAVFSICKSIVSLASTSDGRHLYXCSGTVVDHVGSETWILTSATLVRKPGTQYEAYKDGEVKIKVVLHNEEIAEGTLALCHLHYNLAIVKIISPIDIPAVELRDTPECSSMQPRPVVALGRNIWSEFLMRNGELIRANCE

SEQ ID NO: 83778 - protein, 99 aa, Setaria italica
  Transcript Sequence Number=SeqID_17804
  Subcellular localization annotation: CTP_CleavageSite=48; ConfidenceScore=5.35e-01
ISRFANQIQILLLYCNHQKIQISFRTNTSLARTRCRAGRAEPLTQPVLASSYAGRSGRQPRQPRAHVPLSMPLPLRRRRLRPPIAHVTPAPAGAPPRVS

SEQ ID NO: 83779 - protein, 121 aa, Setaria italica
  Transcript Sequence Number=SeqID_17805
  Subcellular localization annotation: CTP_CleavageSite=48; ConfidenceScore=5.51e-01
GRALFPPGSSSSGSAAGRASKPDRRESRLTRKLARIRRDSCTPRGRCRATHGTEEKKDRCGVGGWVVEKSEREVRGGACWIIEVGERGNGTEAKEGEGVQVPSRSGGRLVAAGGRRGRGRV

SEQ ID NO: 83780 - protein, 212 aa, Setaria italica
  Transcript Sequence Number=SeqID_17806
  Gene Ontology: Mol. function=metal ion binding; Cellular component =integral to membrane; Biological process=ubiquitin-dependent protein catabolic process
  Homolog annotation: Hit_ID=B6TUN7; Match level="QueryCoverage=72%, HitCoverage=79%, E-value=2e-47, Identity=65%"; Hit description=RING zinc finger protein-like
  Pfam annotation: Domain name=zf-C3HC4; Domain location=110-152; Score= 37.1; E_value=7.2e-08; Accession=PF00097.17; Description=Zinc finger, C3HC4 type (RING finger)
  Pfam annotation: Domain name=zf-RING-like; Domain location=110-152; Score=2.4; E_value=0.081; Accession=PF08746.3; Description=RING-like domain
  Pfam module annotation: Pfam domain module=zf-C3HC4::zf-RING-like; Domain location=110-152::110-152
MGFPVGYSEMLLPRVLLQVLLLLGHLHRFLLWAFHAVGLGDLIDLGCNNYPLPASAAAAVQEQPGRDAVLAPLQHRRPEFRTVPAVHIEEALPVVRFEELAGTACGGGDCAVCLSGIGAGDEVRRLSNCRHAFHRGCLDHWMAHDQRTCPLCRAPLIPGAAGAAAGDPWGASAADYDMSYPSSLPSTPLLTVPTPTLLRPHELLLNGLGGFQ

SEQ ID NO: 83781 - protein, 262 aa, Setaria italica
  Transcript Sequence Number=SeqID_17807
  Subcellular localization annotation: CTP_CleavageSite=85; ConfidenceScore=5.86e-01
SLGPSSGVSTSVSAPVSSSTSVTESSGSQLPKLSSISASMFSVGLTPPSVSPSISAVEPSMLVSQGIPSLVNSKPVALPDSTVPSVSSDKPVSVPAASVPTYLPSSQSPSANDASPVNVAEQVTLVTPGQLLPTASSTVISSQALQTASPMVPSSKVASTVPSSEATSSVVPSSQATSSIATPSQVASSSVLSQDVQVISETKAAKQREWKAKQPAVAPSGNKEPLLPAPKPVLEKPIGASSYVQYNNRGRGRGRGGRGNGQ

SEQ ID NO: 83782 - protein, 537 aa, Setaria italica
  misc_feature (296)..(296): Xaa can be any naturally occurring amino acid
  Transcript Sequence Number=SeqID_17808
  Homolog annotation: Hit_ID=B9SEH0; Match level="QueryCoverage=89%, HitCoverage=89%, E-value=2e-54, Identity=50%"; Hit description =Protein binding protein, putative
  Pfam annotation: Domain name=DFDF; Domain location=397-420; Score =34.8; E_value=3.4e-07; Accession=PF09532.2; Description=DFDF motif
  Pfam annotation: Domain name=FFD_TFG; Domain location=451-495; Score =81.2; E_value=3.8e-21; Accession=PF09542.2; Description=FFD and TFG box motifs
  Pfam module annotation: Pfam domain module=DFDF::FFD_TFG; Domain location=397-420::451-495
ARSAAMAAAAAAAPESYIGSVISLTSKSEIRYEGVLYTINTEESNIGLRNVRSFGTEGRKKDGQQIPASDKIYEYILFRGSDIKDLQVKSSPPAQLATLHNDPAIIQSHYPHPALSSTSLPSAASTTAADATSHNAPSAIRMPPPFQGNLPPYQPGASLQSWNSSPMPSSANGAGLTMPPMYWPGYYTPPTGFPHLQPPPFLRPPHSLTVPRPLQPPVQYPGLNGSVPAGFPSMPELPSFLQPGNSNSNSLGPSSGVSTSVSAPVSSSTSVTESSGSQLPKLSSISASMFSVGLTXSSVVPSSQATSSIATPSQVASSSVLSQDVQVISETKAAKQREWKAKQPAVAPSGNKEPLLPAPKPVLEKPIGASSYVQYNNRGRGRGRGGRGNGQSRPITKFTEDFDFMAMNEKFNKDEVWGHLGKSTGQLNDDLNDYEDVLEDEISPRKPEAKPVYVKDDFFDSLSCNTIDNGGRNGRIKFSEQRKIDTETFGDSARHRPMGMRGGRGPRGGGPRGRGYYGRGYGYMGRGRGYSYPNHQS

SEQ ID NO: 83783 - protein, 81 aa, Setaria italica
  Transcript Sequence Number=SeqID_17809
  Gene Ontology: Mol. function=cyclin-dependent protein kinase inhibitor activity; Cellular component=nucleus; Biological process =cell cycle arrest
  Homolog annotation: Hit_ID=Q67J15; Match level="QueryCoverage=86%, HitCoverage=82%, E-value=7e-19, Identity=70%"; Hit description =Cyclin-dependent kinase inhibitor 6
  Pfam annotation: Domain name=CDI; Domain location=34-80; Score=60.6; E_value=5.7e-15; Accession=PF02234.11; Description=Cyclin-dependent kinase inhibitor
MAAAAATVMAVSSCSKRDGDIAATCMPKKAKRARPPPQEEVEAFLAAAESSMARRFAAKYNYDVVKDAPMDGRYEWVRVGP

SEQ ID NO: 83784 - protein, 103 aa, Setaria italica
  Transcript Sequence Number=SeqID_17810
  Subcellular localization annotation: CTP_CleavageSite=42; ConfidenceScore=5.66e-01
MPPVPSPRSSFISPAPALPQTLTPPPPLPPPPPSAAATLPARFAANGESSVDSLPLELPRDVAHPFCLLTFLPPPPCRVLAGCLHPPFRHRPWSSIALPPAHR

SEQ ID NO: 83785 - protein, 196 aa, Setaria italica
  misc_feature (16)..(16): Xaa can be any naturally occurring amino acid
  Transcript Sequence Number=SeqID_17811
  Homolog annotation: Hit_ID=B9RBJ1; Match level="QueryCoverage=97%, HitCoverage=27%, E-value=4e-12, Identity=29%"; Hit description=ATP binding protein, putative
EFSAAFEGSQKEVGCXFAKQGDINVERIKCSRYFQALLQKSKANPADQLSATWHEFASQGAPRIDENPTDLENEKLSVRASKLMMQTKLSSLYSSKSLKANGVPDKNMFKSENLSKESTGIENITNQNGNGHPAYMEIDEDVKPRGLLQNAKRKHTGFRSPICEVSNSPLSNDEADAPANEFMTARTKMEREIAQK

SEQ ID NO: 83786 - protein, 38 aa, Setaria italica
  misc_feature (15)..(15): Xaa can be any naturally occurring amino acid
  Transcript Sequence Number=SeqID_17812
  Gene Ontology: Mol. function=hydrolase activity
  Homolog annotation: Hit_ID=B6TE04; Match level="QueryCoverage=97%, HitCoverage=10%, E-value=5e-11, Identity=75%"; Hit description =Purple acid phosphatase 1
YILSEIADFFFIDTXPFQLKYWTHPKGNHYDWRGVAPR

SEQ ID NO: 83787 - protein, 85 aa, Setaria italica
  Transcript Sequence Number=SeqID_17813
  Gene Ontology: Mol. function=RNA binding; Cellular component =nucleolus; Biological process=ribosome biogenesis
  Homolog annotation: Hit_ID=B6TNS0; Match level="QueryCoverage=80%, HitCoverage=12%, E-value=9e-26, Identity=80%"; Hit description =Nucleolar protein Nop56
RYLANKCSIASRIDCYSELNTSIFGQKLREQVEERLDFYDNGVAPRKNLDVMKAAIEGITNAASEDGDCKDIHTSFLIPETLAFI

SEQ ID NO: 83788 - protein, 86 aa, Setaria italica
  Transcript Sequence Number=SeqID_17814
  Gene Ontology: Mol. function=protein serine/threonine kinase activity; Biological process=protein amino acid phosphorylation
  Homolog annotation: Hit_ID=Q2QMH1; Match level="QueryCoverage=88%, HitCoverage=12%, E-value=4e-40, Identity=96%"; Hit description =Serine/threonine-protein kinase Nek2
QISFALSSSRCYVCIVIGYCEGGDMADAIKRANGNHFSEEKLCKWLVQLLMALDYLHANHILHRDVKCSNIFIARDQSIRLGDFGL

SEQ ID NO: 83789 - protein, 60 aa, Setaria italica
  Transcript Sequence Number=SeqID_17815
  Gene Ontology: Mol. function=hydrolase activity
  Homolog annotation: Hit_ID=B6TWW2; Match level="QueryCoverage=75%, HitCoverage=13%, E-value=2e-15, Identity=82%"; Hit description =Purple acid phosphatase 1
MMLARVSPVIPLEWRGVAPRGKYIANLLEDLDEAMKKSTARWKIVVGHHTMRTGSSNFRK

SEQ ID NO: 83790 - protein, 165 aa, Setaria italica
  Transcript Sequence Number=SeqID_17816
  Gene Ontology: Mol. function=protein serine/threonine kinase activity; Biological process=protein amino acid phosphorylation
  Homolog annotation: Hit_ID=Q2QMH1; Match level="QueryCoverage=100%, HitCoverage=27%, E-value=1e-83, Identity=89%"; Hit description =Serine/threonine-protein kinase Nek2
  Pfam annotation: Domain name=Pkinase; Domain location=4-163; Score= -6.0; E_value=3.9e-08; Accession=PF00069.17; Description=Protein kinase domain
  Pfam annotation: Domain name=Pkinase_Tyr; Domain location=4-163; Score=-136.4; E_value=0.00012; Accession=PF07714.9; Description =Protein tyrosine kinase
  Pfam module annotation: Pfam domain module=Pkinase::Pkinase_Tyr; Domain location=4-163::4-163
MDQYEVLEQIGKGAFGSALLVRHKVEKKKYVLKKIRLARQTDRTRRSAHQEMQLIATVRNPFIVEYKDSWVEKGCYVCIVIGYCEGGDMADAIKRANGNHFSEEKLCKWLVQLLMALDYLHANHILHRDVKCSNIFIARDQSIRLGVFWACKILTSDDLASSVVG

SEQ ID NO: 83791 - protein, 207 aa, Setaria italica
  misc_feature (57)..(57): Xaa can be any naturally occurring amino acid
  misc_feature (199)..(199): Xaa can be any naturally occurring amino acid
  Transcript Sequence Number=SeqID_17817
  Gene Ontology: Mol. function=RNA binding; Cellular component =nucleolus; Biological process=ribosome biogenesis
  Homolog annotation: Hit_ID=B6TNS0; Match level="QueryCoverage=99%, HitCoverage=37%, E-value=1e-111, Identity=95%"; Hit description =Nucleolar protein Nop56
  Pfam annotation: Domain name=Nop; Domain location=41-189; Score =311.8; E_value=1.5e-90; Accession=PF01798.10; Description=Putative snoRNA binding domain
LAEKDVPALADIVGDLDKAKEIVEAAKASMGQDLSPVDLINVQQFAQRVMNLSEYRXNLYEYLVTKMNDIAPNLTSLIGEVVGARLISHAGSLSNLAKCPASTLQILGAEKALFRALKTRGNTPKYGLIFHSSFIGRATTKNKGRMARYLANKCSIASRIDCYSEASTSVFGQKLREQVEERLEFYDKGVAPRKNLDVXKAAIDSIG

SEQ ID NO: 83792 - protein, 342 aa, Setaria italica
  Transcript Sequence Number=SeqID_17818
  Gene Ontology: Mol. function=hydrolase activity
  Homolog annotation: Hit_ID=B6TWW2; Match level="QueryCoverage=90%, HitCoverage=91%, E-value=1e-148, Identity=82%"; Hit description =Purple acid phosphatase 1
  Pfam annotation: Domain name=Metallophos; Domain location=46-257; Score=79.0; E_value=1.8e-20; Accession=PF00149.20; Description =Calcineurin-like phosphoesterase
MANGSSAAMAAAALAFLAVAAALCCDTAAGALPRLEHHPAKNDGSLSLLVVGDWGRKGTHNQSRVAEQMGRVGEKLDIDFVISTGDNFYDNGLKDVHDHAFEESFTDIYTAQSLQKPWYLVLGNHDYRGNALAQLSPVLRKIDSRFICMRSFIVNAEIVDFFFVDTTPFQRNYWTHPGKHHYDWRGVAPRGKYIANLLEDLDEAMKKSTARWKIVVGHHTMRSVSDHGDTKELLKLLLPVLKENGADFYINGHDHCLEHISSRDSPIQYFTSGGGSKAWRGVFQPNKDKLRFFYDGQGFMSLQLNREQAQFNFYDVSGKVLYQWTSSKTGHPQPSAYLDQEE

SEQ ID NO: 83793 - protein, 277 aa, Setaria italica
  Transcript Sequence Number=SeqID_17819
  Gene Ontology: Mol. function=hydrolase activity
  Homolog annotation: Hit_ID=B6TE04; Match level="QueryCoverage=99%, HitCoverage=79%, E-value=1e-135, Identity=83%"; Hit description =Purple acid phosphatase 1
  Pfam annotation: Domain name=Metallophos; Domain location=1-190; Score=39.8; E_value=1.1e-08; Accession=PF00149.20; Description =Calcineurin-like phosphoesterase
VDGKVGEQLDIDFVISTGDNFYENGLTGTDDQAFEQSFTDIYTAKSLQKPWYLVLGNHDYRGDVLAQLSPVLQKIDSRFICMRSFIVNAEIVDFFFVDTTPFQLKYWTHPKDDHYDWREVAPREKYLANLLKDLDEAMKKSTATWKIAVGHHTMRSVSDHGDTKELLQLLLPVLQANGVDFYINGHDHCLEHISSRDSPIQYFTSGGGSKAWRGVFQPNEDNLEFFYDGQGFMSLQLDQNQAEFTFYDVDGNELYQYTRSSPMETSHLRPSGYATEE

SEQ ID NO: 83794 - protein, 378 aa, Setaria italica
  Transcript Sequence Number=SeqID_17820
  Gene Ontology: Mol. function=hydrolase activity
  Homolog annotation: Hit_ID=B6TE04; Match level="QueryCoverage=81%, HitCoverage=88%, E-value=1e-141, Identity=77%"; Hit description =Purple acid phosphatase 1
  Pfam annotation: Domain name=Metallophos; Domain location=82-293; Score=77.3; E_value=5.5e-20; Accession=PF00149.20; Description =Calcineurin-like phosphoesterase
  Subcellular localization annotation: CTP_CleavageSite=42; ConfidenceScore=5.24e-01
SFPFCLPVATAKTPDRGVGLLCCGARALPTGALRSCSLRVRRAMAKGGAAMALALLAAAAALLCAVAALPRLEHPAKTDGSLSLLVVGDWGRKGMYNQSRVAEQMGRVGEELDIDFVVSTGDNFYETGLTGVDDHAFEQSFTDIYTAKSLQKPWYLVLGNHDYKGNALAQFSPVLRKIDSRFICMRSFIVNAEIADFFFIDTTPFQLKYWTHPKGNHYDWRGVAPREKYITNLLKDLDEAMKKSTAKWKIAVGHHTMRSVSHHGDTKELLQLLLPILKINGVDFYINGHDHCLEHISSRDSPIQYFTSGGGSRAWRGFFQPNEDSLKFFYDGQGFMSLQLHQDQADFIFYDVDGNILYRYSQWSLRKAYLPASYFAEE

SEQ ID NO: 83795 - protein, 548 aa, Setaria italica
  Transcript Sequence Number=SeqID_17821
  Gene Ontology: Mol. function=RNA binding; Cellular component =nucleolus; Biological process=ribosome biogenesis
  Homolog annotation: Hit_ID=B6TNS0; Match level="QueryCoverage=95%, HitCoverage=96%, E-value=0.0, Identity=77%"; Hit description =Nucleolar protein Nop56
  Pfam annotation: Domain name=NOP5NT; Domain location=3-69; Score =98.0; E_value=3.3e-26; Accession=PF08156.5; Description=NOP5NT (NUC127) domain
  Pfam annotation: Domain name=NOSIC; Domain location=170-222; Score =121.1; E_value=3.6e-33; Accession=PF08060.5; Description=NOSIC (NUC001) domain
  Pfam annotation: Domain name=Nop; Domain location=266-414; Score =304.2; E_value=2.7e-88; Accession=PF01798.10; Description=Putative snoRNA binding domain
  Pfam module annotation: Pfam domain module=NOP5NT::NOSIC::Nop; Domain location=3-69::170-222::266-414
MALYLLFESASAYALFHAYGIDEIGQSVDAVRASVLDLQRFGKTVKLAGFSPFSSAVDALNQCNAISEGIMTDELRNFLELNLPKVKVGKKAKYSLGVMEPKVGSHISEATGIPCQSNEFVQELLRGVRLHFDQFIDQLKKSDLEKAQLGLGHSYSRAKVKFNVNRVDNMVIQAIFLLDTLDKDINTFSMRVREWYSWHFPELVKIVNDNYLYAKIAKFLVNKSDLAEKDIPALADLTGDEDKAKEIVEAAKASMGQDISPVDLINVQQFAQKVMNLSEYRKKLYEYLVTKMNDIAPNLTSLIGEVVGARLISHAGSLSNLAKCPASTLQILGAEKALFRALKTRGNTPKYGLIFHSSFIGRASARNKGRMARYLANKCSIASRIDCYSELNTSIFGQKLREQVEERLDFYDNGVAPRKNLDVMKAAIEGITNAASEDGDCNEKSDVSAKKSKKKKSKADSAGSEAMDVDKPVAGEDEPQTEKKKKKKHKLEEPEDEGMATDDVKQDETPKKKKKKNREASEDIGPKTTTEGKKKKKKKKSKTDDDDV

SEQ ID NO: 83796 - protein, 622 aa, Setaria italica
  misc_feature (490)..(490): Xaa can be any naturally occurring amino acid
  Transcript Sequence Number=SeqID_17822
  Gene Ontology: Mol. function=RNA binding; Cellular component =nucleolus; Biological process=ribosome biogenesis
  Homolog annotation: Hit_ID=B6TNS0; Match level="QueryCoverage=86%, HitCoverage=97%, E-value=0.0, Identity=84%"; Hit description =Nucleolar protein Nop56
  Pfam annotation: Domain name=NOP5NT; Domain location=72-138; Score =108.2; E_value=2.7e-29; Accession=PF08156.5; Description=NOP5NT (NUC127) domain
  Pfam annotation: Domain name=NOSIC; Domain location=239-291; Score =116.8; E_value=7e-32; Accession=PF08060.5; Description=NOSIC (NUC001) domain
  Pfam annotation: Domain name=Nop; Domain location=335-483; Score =314.6; E_value=2e-91; Accession=PF01798.10; Description=Putative snoRNA binding domain
  Pfam module annotation: Pfam domain module=NOP5NT::NOSIC::Nop; Domain location=72-138::239-291::335-483
MALHWLSASTAEEKGLKAVSLTALPKRSRSRTEERTASTLWPISSMPYAWKRPPPNPNQQQPPPPSAGEMALYLLFESASGYGLFHAYGIDEIGQSVEAVRSSVLDLDRFGKAVKLTAFNPFSSAVDALNQCNAISEGIMTDELRSFLELNLPKPKEGKKAKYSLGVVEPKVGSHIAEVTGIPCQSNEFVQELLRGVRLHFDRFIKELKESDLEKAQLGLGHSYSRAKVKFNVNRVDNMVIQAIFLLDTLDKDINSFSMRVREWFSWHFPELVKIVNDNYIYAKLAKFIVNKSDLAEKDVPALADIVGDLDKAKEIVEAAKASMGQDLSPVDLINVQQFAQRVMNLSEYRKNLYEYLVTKMNDIAPNLTSLIGEVVGARLISHAGSLSNLAKCPASTLQILGAEKALFRALKTRGNTPKYGLIFHSSFIGRATTKNKGRMARYLANKCSIASRIDCYSEASTSVFGQKLREQVEERLEFYDKGVAPRKNXLDVMKAAIDSMVNGTSIDDDDNEKTDASAKKSKKKKSKTEADGDAMDLDKPSNAADGEAEPGTEKKKKKKKHKLEEETQEQENGAANGDAEVNETPKKKKKKSREVSEDAEPKTATEGKKKKKKKSKAEDDE

SEQ ID NO: 83797 - protein, 177 aa, Setaria italica
  Transcript Sequence Number=SeqID_17823
  Gene Ontology: Cellular component=integral to membrane
  Homolog annotation: Hit_ID=B4FBQ7; Match level="QueryCoverage=99%, HitCoverage=82%, E-value=2e-79, Identity=82%"; Hit description =UPF0497 membrane protein 7
  Pfam annotation: Domain name=DUF2503; Domain location=4-148; Score= -48.2; E_value=0.048; Accession=PF10700.1; Description=Protein of unknown function (DUF2503)
  Pfam annotation: Domain name=DUF588; Domain location=2-144; Score =152.4; E_value=1.3e-42; Accession=PF04535.4; Description=Domain of unknown function (DUF588)
  Pfam module annotation: Pfam domain module=DUF2503::DUF588; Domain location=4-148::2-144
ARVRPVETLLRAAPLGLCVAAMAIMLKDQQTNEYGTVAYSDLGGFKYLVYANGLCAAYSLVTAFYTAVPRPATVSRSWVVFLLDQVFTYLILAAGAAAAELLYLAYNGDKEVTWSEACGVFGVFCRKARTSVAITFGSVLCFILLSLISSYRLFSAYEAPPSSALGNKGVEIAAYPR

SEQ ID NO: 83798 - protein, 108 aa, Setaria italica
  Transcript Sequence Number=SeqID_17824
  Gene Ontology: Mol. function=methylcrotonoyl-CoA carboxylase activity; Cellular component=mitochondrial matrix
  Homolog annotation: Hit_ID=B6SWZ4; Match level="QueryCoverage=60%, HitCoverage=11%, E-value=1e-32, Identity=98%"; Hit description =Propionyl-CoA carboxylase beta chain
MSKDCFKSEGAIDEFKKLYGTTLVTGFARICGQPVGIIGNNGILFTESALKGSHFIELCTQRHIPLIFLQNITGFMVWILFTLQNTSMSSFISQPTMRIDKLIIYYLY

SEQ ID NO: 83799 - protein, 103 aa, Setaria italica
  Transcript Sequence Number=SeqID_17825
  Gene Ontology: Mol. function=methylcrotonoyl-CoA carboxylase activity; Cellular component=mitochondrial matrix; Biological process=leucine catabolic process
  Homolog annotation: Hit_ID=B6SWZ4; Match level="QueryCoverage=96%, HitCoverage=17%, E-value=4e-47, Identity=90%"; Hit description =Propionyl-CoA carboxylase beta chain
FLELSQAATGEEISAEDLGGASVHCKVSGVSDHFAQDELHGLALGRNIVKNLHLAAKGTNIQSSACDYQEPLYDIEELRSIAPSDLKQSFDIRSVIARIVDGK

SEQ ID NO: 83800 - protein, 245 aa, Setaria italica
  Transcript Sequence Number=SeqID_17826
  Gene Ontology: Mol. function=methylcrotonoyl-CoA carboxylase activity; Cellular component=mitochondrial matrix; Biological process=regulation of eclosion
  Homolog annotation: Hit_ID=B6SWZ4; Match level="QueryCoverage=99%, HitCoverage=42%, E-value=1e-125, Identity=90%"; Hit description =Propionyl-CoA carboxylase beta chain
  Pfam annotation: Domain name=Carboxyl_trans; Domain location=21-245; Score=-34.1; E_value=1.7e-12; Accession=PF01039.14; Description =Carboxyl transferase domain
AVLRADLRARISQVMRGGGAEAVKRNAARGKLLPRDRIDRLLDPGASFLELSQLAGSDVYEEALPSAGIITGIGPVHGRLCMFVANDPTTKGGTYYPLTVKKHLRAQEIASECKLPCIYLVDSGGANLPRQAEVFPDRDNFGRIFYNQAKMSSDGIPQIALVLGSCTAGGAYIPAMADESVIVKGNGTIFLAGPPLVKAATGEEISAEDLGGASVHCKVSGVSDHFAQDELHGLALGRNIVKNLH

SEQ ID NO: 83801 - protein, 127 aa, Setaria italica
  Transcript Sequence Number=SeqID_17827
  Gene Ontology: Mol. function=methylcrotonoyl-CoA carboxylase activity; Cellular component=mitochondrial matrix; Biological process=leucine catabolic process
  Homolog annotation: Hit_ID=B6SWZ4; Match level="QueryCoverage=67%, HitCoverage=14%, E-value=1e-42, Identity=97%"; Hit description =Propionyl-CoA carboxylase beta chain
  Subcellular localization annotation: CTP_CleavageSite=31; ConfidenceScore=5.06e-01
SKSEASGIAKAGAKMVMAVSCAKVPKITIIVGGSFGAGNYGMCGRAYSPNFLFLWPTARISVMGGIQAAGVLSQIEKNNKKRQGVEACFINPSPRFNVKITFCMTNSCSLTHTGIGHTKKLILTLKR

SEQ ID NO: 83802 - protein, 393 aa, Setaria italica
  Transcript Sequence Number=SeqID_17828
  Gene Ontology: Mol. function=methylcrotonoyl-CoA carboxylase activity; Cellular component=mitochondrial matrix; Biological process=regulation of eclosion
  Homolog annotation: Hit_ID=B6SWZ4; Match level="QueryCoverage=94%, HitCoverage=64%, E-value=0.0, Identity=91%"; Hit description =Propionyl-CoA carboxylase beta chain
  Pfam annotation: Domain name=Carboxyl_trans; Domain location=3-391; Score=387.3; E_value=2.7e-113; Accession=PF01039.14; Description =Carboxyl transferase domain
CLPSWLGSLLFPCLIGRYCCRIFDQAKMSSDGIPQIALVLGSCTAGGAYIPAMADESVIVKGNGTIFLAGPPLVKAATGEEISAEDLGGASVHCKVSGVSDHFAQDELHGLALGRNIVKNLHLAAKGTNIQSSACDYQEPLYDIEELRSIAPSDLKQSFDIRSVIARIVDGSEFDEFKKLYGTTLVTGFARICGQPVGIIGNNGILFTESALKGSHFIELCTQRHIPLIFLQNITGFMVGSKSEASGIAKAGAKMVMAVSCAKVPKITIIVGGSFGAGNYGMCGRAYSPNFLFLWPTARISVMGGIQAAGVLSQIEKNNKKRQGVEWTKDEEEAFKAKVAEAYDREASPYYATARLWDDGIIDPADTRRVLSLCLSAAAKPVPEDTKYGVFRM

SEQ ID NO: 83803 - protein, 146 aa, Setaria italica
  misc_feature (14)..(14): Xaa can be any naturally occurring amino acid
  Transcript Sequence Number=SeqID_17829
EERAHDPEDGEAAXGRPAAAVILVPVPPRRHGQPWRRRRHPRRVRHRWPPPLLRTEQVNRNGNGGRWRRRRARGGLGWRTRGGVGPARQRRGKMKKGERLGWLARLLHGGRGKAGRSATEACAARTAALRARSYGLRAPVPPRATA

SEQ ID NO: 83804 - protein, 109 aa, Setaria italica
  Transcript Sequence Number=SeqID_17830
  Subcellular localization annotation: CTP_CleavageSite=52; ConfidenceScore=5.48e-01
MAAMDKHVATPMGSSPKQNSINFALPPPPTRSRHSLDKQQQPAKTTILHELPISSKQSVNPNKLSERIVKCLICIFIRLLRSSRVADMDKSGNLATSFSFRIDTGLTSP

SEQ ID NO: 83805 - protein, 145 aa, Setaria italica
  Transcript Sequence Number=SeqID_17831
  Gene Ontology: Mol. function=binding; Cellular component=mitochondrion
  Homolog annotation: Hit_ID=Q7XKS2; Match level="QueryCoverage=100%, HitCoverage=69%, E-value=4e-44, Identity=30%"; Hit description =OSJNBa0038P21.9 protein
  Pfam annotation: Domain name=PPR; Domain location=107-141; Score =41.1; E_value=4.4e-09; Accession=PF01535.12; Description=PPR repeat
  Pfam annotation: Domain name=PPR; Domain location=2-36; Score=40.9; E_ value=4.9e-09; Accession=PF01535.12; Description=PPR repeat
  Pfam annotation: Domain name=PPR; Domain location=37-71; Score=32.3; E_value=2e-06; Accession=PF01535.12; Description=PPR repeat
  Pfam annotation: Domain name=PPR; Domain location=72-106; Score=40.7; E_value=5.6e-09; Accession=PF01535.12; Description=PPR repeat
  Pfam module annotation: Pfam domain module=PPR::PPR::PPR::PPR; Domain location=107-141::2-36::37-71::72-106
IATWNSLMASLCKHGKIKEARDVFDSIATKGQEPDTVSYLILLDGYATEGCFVDMTDLFNLMLGDGVAPDVRIFNVLIKGYAKCGMLDRAMIIFSEMRHQGAKPDAVTYLTVIAAHCRMAKMDDAMEIFNEMIDQGVAPSIATYS

SEQ ID NO: 83806 - protein, 63 aa, Setaria italica
  Transcript Sequence Number=SeqID_17832
  Subcellular localization annotation: CTP_CleavageSite=51; ConfidenceScore=5.11e-01
FTEPYPVHHPYSCSKRRTNNSYNSRVIGNHSTFTESCLSIAATRPITLVFRSKGTKSYIYGFK

SEQ ID NO: 83807 - protein, 106 aa, Setaria italica
  Transcript Sequence Number=SeqID_17833
  Homolog annotation: Hit_ID=O80537; Match level="QueryCoverage=51%, HitCoverage=15%, E-value=7e-11, Identity=61%"; Hit description =F14J9.21 protein
  Subcellular localization annotation: CTP_CleavageSite=64; ConfidenceScore=5.35e-01
MFSTLQPHKKAMATELLSPLLPQRRRGLAVAAAAPLLLLLLVVVVFSRSRLTVSSPERVDLTLVAGAREKGAVCLDGSPPGYHLRRGFGSGAHNWLIYLQISTTGI

SEQ ID NO: 83808 - protein, 210 aa, Setaria italica
  Transcript Sequence Number=SeqID_17834
  Gene Ontology: Mol. function=serine-type endopeptidase activity; Biological process=negative regulation of catalytic activity
  Homolog annotation: Hit_ID=Q9LJ20; Match level="QueryCoverage=100%, HitCoverage=27%, E-value=6e-79, Identity=72%"; Hit description =Putative subtilisin-like protein
  Subcellular localization annotation: CTP_CleavageSite=33; ConfidenceScore=5.44e-01
AFVKSAHPGWTPSMIRSALMTTATTMNNLGKPLASSTGAAATGHDMGAGEMSPLRALSPGLVFDTTTHDYLNFLCYYGYKEQIVRKVSGDARFSCPAGAPSPDLIASGVNYPSISVPRLRRGRPATVTRTAINVGATNATYAAAVEAPPGVTVRVSPDRLVFSSRWTTARYEVSFDVAAGAGVSKGYAHGAVTWSDGAHSVRTPFAVNVL

SEQ ID NO: 83809 - protein, 46 aa, Setaria italica
  Transcript Sequence Number=SeqID_17835
  Gene Ontology: Mol. function=translation elongation factor activity; Cellular component=chloroplast; Biological process=translational elongation
  Homolog annotation: Hit_ID=B6UC94; Match level="QueryCoverage=100%, HitCoverage=19%, E-value=2e-18, Identity=100%"; Hit description =Elongation factor P
  Pfam annotation: Domain name=Elong-fact-P_C; Domain location=3-45; Score=63.9; E_value=5.9e-16; Accession=PF09285.3; Description =Elongation factor P, C-terminal
GASDSAQGGTKPATLETGAVVTVPSFVNVGDDILVDSRTGQYMNRA

SEQ ID NO: 83810 - protein, 226 aa, Setaria italica
  Transcript Sequence Number=SeqID_17836
  Gene Ontology: Mol. function=translation elongation factor activity; Cellular component=chloroplast; Biological process=translational elongation
  Homolog annotation: Hit_ID=B6UC94; Match level="QueryCoverage=83%, HitCoverage=80%, E-value=1e-106, Identity=97%"; Hit description =Elongation factor P
  Pfam annotation: Domain name=EFP; Domain location=109-163; Score =87.8; E_value=3.9e-23; Accession=PF01132.12; Description=Elongation factor P (EF-P)
  Pfam annotation: Domain name=EFP_N; Domain location=45-102; Score =106.6; E_value=8.5e-29; Accession=PF08207.4; Description=Elongation factor P (EF-P) KOW-like do
  Pfam annotation: Domain name=Elong-fact-P_C; Domain location=171-225; Score=96.2; E_value=1.1e-25; Accession=PF09285.3; Description =Elongation factor P, C-terminal
  Pfam module annotation: Pfam domain module=EFP::EFP_N::Elong-fact-P _C; Domain location=109-163::45-102::171-225
  Subcellular localization annotation: CTP_CleavageSite=50; ConfidenceScore=5.43e-01
MASLRHLAASPSCHHHHAASLQLRRLPSCPRPLRSRLFTRIYALSSNDIRVGTNVEVDGAPWKVLEFLHVKPGKGAAFVRTKMRNYVTGNTVEKTFRAGSTLQEPSLSKETKQFTYKDGSQFVFMDLTTFEESRLNEADVGDKQKWLKEGMDCNLLYWNGKIIDFELPITVRLTVTDTDPGASDSVQGGTKPATLETGAVVTVPSFVNVGDDILVDSRTGQYMNRA

SEQ ID NO: 83811 - protein, 243 aa, Setaria italica
  Transcript Sequence Number=SeqID_17837
  Homolog annotation: Hit_ID=Q01K95; Match level="QueryCoverage=100%, HitCoverage=9%, E-value=7e-75, Identity=58%"; Hit description =OSIGBa0148A10.3 protein
NTPIDVLHHCIFPASKVKAKALLLLLEASPMHMNLFGKILLETFKKDNSLLQVKDSDSNASWPQEDGAILLLPAALSCLKCHSDDNGRCAEFLEPVSIFYSELLLCDKGFSSWKSFVTRSIFEEDFSDFIPTPVKDIMIYFSGTLLGKSVMMLHHYFSSKEMSRKERLDIVGSIFPESSELLDSDVNDINPTSCKRIVKVTNELFAKISLIRLLLSPPRKSLSSEVASERESKRLHKAKLNFI

SEQ ID NO: 83812 - protein, 84 aa, Setaria italica
  Transcript Sequence Number=SeqID_17838
  Gene Ontology: Mol. function=calcium ion binding; Cellular component =flagellin-based flagellum; Biological process=ciliary or flagellar motility
  Homolog annotation: Hit_ID=Q0DJV6; Match level="QueryCoverage=67%, HitCoverage=36%, E-value=2e-23, Identity=94%"; Hit description =Probable calcium-binding protein CML18
  Pfam annotation: Domain name=efhand; Domain location=17-45; Score =34.7; E_value=3.7e-07; Accession=PF00036.24; Description=EF hand
  Pfam annotation: Domain name=efhand; Domain location=53-81; Score =33.7; E_value=7.6e-07; Accession=PF00036.24; Description=EF hand
  Pfam module annotation: Pfam domain module=efhand::efhand; Domain location=17-45::53-81
RGGAGAGEGQEDATEAELREAFRMYDADHNGLISARELHRVLRQLGDKCSVADCSRMIRSVDADGDGSVNFDEFKKMMGAGARR

SEQ ID NO: 83813 - protein, 369 aa, Setaria italica
  Transcript Sequence Number=SeqID_17839
  Homolog annotation: Hit_ID=Q2R069; Match level="QueryCoverage=87%, HitCoverage=50%, E-value=1e-148, Identity=79%"; Hit description =Kelch motif family protein, expressed
YIAGGGSKKKRHPETWVFDVLESKWSVCVVPPSSSITTKKGFSMVPLYYRDKIVLVAFGGNKKEPSDKVEVLVVLQNEHCFSWRSAPEVEPLMYDESPPSSRELADHLNHCAPLYSSGSVARSSIATTAENSSGRKSLPDSLLQNSNLGSSSLRRQFRQEQDCSLAQKLQKPIDDDKYKDVDDCSELPSITNQKPRNDTHQSPDAEAKARKLGRSSSDINNHHDTRITTLVRRNMALEEQLSAALTTKDEAEKNLSLVIDSKDELEKRLAERDREVEALKEKVTGLELAQEESNNLSNTVHADNVRLEREVAFLKAVMDETQKELHSTRGVLAGERARAFQLQVEVFHLKQRVQTMEGRSPTPRKPQNL

SEQ ID NO: 83814 - protein, 470 aa, Setaria italica
  Transcript Sequence Number=SeqID_17840
  Gene Ontology: Mol. function=hydroxymethylglutaryl-CoA synthase activity; Cellular component=soluble fraction; Biological process =isoprenoid biosynthetic process
  Homolog annotation: Hit_ID=B6T7Q4; Match level="QueryCoverage=100%, HitCoverage=100%, E-value=0.0, Identity=93%"; Hit description =Hydroxymethylglutaryl-CoA synthase
  Pfam annotation: Domain name=HMG_CoA_synt_C; Domain location=176-450; Score=575.5; E_value=6e-170; Accession=PF08540.2; Description =Hydroxymethylglutaryl-coenzyme A synth
  Pfam annotation: Domain name=HMG_CoA_synt_N; Domain location=2-175; Score=335.4; E_value=1.1e-97; Accession=PF01154.9; Description =Hydroxymethylglutaryl-coenzyme A synt
  Pfam module annotation: Pfam domain module=HMG_CoA_synt_C::HMG_CoA _synt_N; Domain location=176-450::2-175
MDRKDVGILAMDIYFPPSCVQQEALEAHDGASKGKYTIGLGQDCMAFCSEVEDVISMSLTVVNSLLKKYKVDPKLIGRLEVGSETVIDKSKSIKTWLMQIFEESGNTDIEGVDSSNACYGGTAALLNCVNWVESNSWDGRYGLVVCTDSAVYAEGPARPTGGAAAIAMLIGPNAPISFESKYRASHMAHVYDFYKPDLASEYPVVDGKLSQTCYLMALDSCYRQFCNKYEKIVGKQFSISDAEYFVFHSPYNKLVQKSFARLCYNDFMRNCSSIDDDAKEKLQPFSNLTGEESYQSRDLEKASQQVAKHLYDIKVQPSTLLPKQIGNMYTASLYAALASVLYNKHDSLDGQRIVMFSYGSGLTSTMFSLRLNNGQHPFSLSNIASVLGVTEKLQSRHETLPEKFIETLKLMEHRYGAKDFETNKDTSLLPPGTFYLTHVDSMYRRFYDQKPVEETAGGKAKCCNGFANGH

SEQ ID NO: 83815 - protein, 85 aa, Setaria italica
  misc_feature (76)..(76): Xaa can be any naturally occurring amino acid
  misc_feature (81)..(81): Xaa can be any naturally occurring amino acid
  misc_feature (85)..(85): Xaa can be any naturally occurring amino acid
  Transcript Sequence Number=SeqID_17841
  Gene Ontology: Biological process=cell wall catabolic process
  Homolog annotation: Hit_ID=B6TTS5; Match level="QueryCoverage=97%, HitCoverage=33%, E-value=3e-36, Identity=91%"; Hit description=LysM domain containing protein
FVLQRLPPIDLARSACVCRAWHAVASDRAVLEAAFCAPWGVRRVVGDPATQAFWRAASLGRFALSHAVRRGDTVPXVALKXSVQX

SEQ ID NO: 83816 - protein, 164 aa, Setaria italica
  misc_feature (146)..(146): Xaa can be any naturally occurring amino acid
  Transcript Sequence Number=SeqID_17842
  Gene Ontology: Mol. function=sugar binding; Biological process =recognition of pollen
  Homolog annotation: Hit_ID=Q7XHV3; Match level="QueryCoverage=75%, HitCoverage=15%, E-value=2e-32, Identity=62%"; Hit description =Putative receptor protein kinase
  Pfam annotation: Domain name=B_lectin; Domain location=87-164; Score =45.6; E_value=2e-10; Accession=PF01453.16; Description=D-mannose binding lectin
  Subcellular localization annotation: CTP_CleavageSite=58; ConfidenceScore=5.32e-01
VRRAFPACAEQSHGCGRAAAISSAAFASLLVTFFSSPASAADTIAANSSLADGETLVSAGGVFELGFFTPASSTARFLGIWYMGIAPQTIVWVANRDAPITGATASLAINATGSLVIADSSGRVFWSSAPSNTSGTGAPVAQLLDXGNFVLRDGGGAVLWQSFD

SEQ ID NO: 83817 - protein, 118 aa, Setaria italica
  Transcript Sequence Number=SeqID_17843
  Gene Ontology: Mol. function=protein binding; Cellular component =integral to membrane
  Homolog annotation: Hit_ID=Q1HTV3; Match level="QueryCoverage=97%, HitCoverage=49%, E-value=1e-26, Identity=56%"; Hit description=Green ripe-like 2
  Pfam annotation: Domain name=DUF778; Domain location=1-62; Score =44.5; E_value=1e-10; Accession=PF05608.4; Description=Protein of unknown function (DUF778)
  Subcellular localization annotation: CTP_CleavageSite=42; ConfidenceScore=5.00e-01
GGATWDGALKKGTQEFQNRNYNLFTCNCHSFVVNNLNRLFYSGHEKWNVVSLAAVMFLRGRWVSTASAVKTFLPFAVVLSVGTLLGGMTFLIGLAAFAAVMTGWFLVGTYCIKGLIEL

SEQ ID NO: 83818 - protein, 332 aa, Setaria italica
  Transcript Sequence Number=SeqID_17844
MSEFVRSRYDKQEDFQVLLSKKDPGESPQHKHYLWMAHWTKASSSAEPQNNNISNPLEDINKGSTTKHSETLPYEFMKSTVAERLMVGVSRGSASMQHAQQFNSSMWGVAHHVCNELGAKNNEQVDESFEKSMKKNAVNLRAREVVSEAFSVHKLSELPLDFQKLGSSEDPSSDWSHFPMFEINRKIDNILNPKRRSELGPASLNLNMSTSHVMALSSQEYMMNSQRIADDNMEMCKSARGFASRIEDPAGLNSDPSGKKLKRKLLDTMSCSCSKNDNDSSDCPIDDQHTSHHFAKAKQELPCASNEKKFMFAANNDSRIVSSAFHNLETRR

SEQ ID NO: 83819 - protein, 85 aa, Setaria italica
  Transcript Sequence Number=SeqID_17845
NLTKQQQIRAYTFHPCGQQIRRPSSRLVMTHSQVLENFHVIDHGSLIIFTVSTHKPCVMYRPHTPRPPPQRKTPPPNRTRDADLG

SEQ ID NO: 83820 - protein, 187 aa, Setaria italica
  Transcript Sequence Number=SeqID_17846
  Gene Ontology: Mol. function=aminoacyl-tRNA hydrolase activity; Cellular component=mitochondrion; Biological process=translation
  Homolog annotation: Hit_ID=Q5N9Q7; Match level="QueryCoverage=41%, HitCoverage=30%, E-value=4e-31, Identity=80%"; Hit description =Peptidyl-tRNA hydrolase, mitochondrial
  Pfam annotation: Domain name=Pept_tRNA_hydro; Domain location=82-187; Score=-29.6; E_value=4.1e-06; Accession=PF01195.11; Description =Peptidyl-tRNA hydrolase
  Subcellular localization annotation: CTP_CleavageSite=61; ConfidenceScore=5.78e-01
MRLLSGVLASSSALLSGVLASSSALLSGVLGSASAAFDRLGFSRVSFGRANPSSMPAPACKAAAASSSAAADADAGAQKPWLFVGLGNPGRMYKGTRHNVGFEMIDAIAEAEGISVTSKQFKAIVGKGLIGDVPVMLAKPQTFMNASGESVSKITLLQLQLNHALLVLSPYYYLCRLDSSFHISRYH

SEQ ID NO: 83821 - protein, 133 aa, Setaria italica
  Transcript Sequence Number=SeqID_17847
  Homolog annotation: Hit_ID=Q9ASH1; Match level="QueryCoverage=79%, HitCoverage=29%, E-value=1e-22, Identity=48%"; Hit description =Membrane-associated salt-inducible protein-like
  Pfam annotation: Domain name=PPR; Domain location=27-61; Score=18.9; E_value=0.022; Accession=PF01535.12; Description=PPR repeat
DRRVDEAVEVYRGMEAGEVEGVAPNCATYTCVVGALCGAERWSEAEDVFYEGVKRRKVIDLGTVRLLVLGLKGAGKGRAARRVVVGLRKKFPEQFDGPWRELEEAAGLPASGKEDDGEEDGADEQPVPTTAAA

SEQ ID NO: 83822 - protein, 134 aa, Setaria italica
  Transcript Sequence Number=SeqID_17848
  Gene Ontology: Mol. function=catalytic activity; Biological process =metabolic process
  Homolog annotation: Hit_ID=B6T5J6; Match level="QueryCoverage=73%, HitCoverage=50%, E-value=3e-35, Identity=76%"; Hit description =Isochorismatase family protein rutB
  Subcellular localization annotation: CTP_CleavageSite=36; ConfidenceScore=5.11e-01
MLLSLDKFLLHYLKKRLFSGPRIPSGGTSKSRRPMAAAAKWSETAMLVIDMQKDFVDPAMRSPMLVAGGEAVVPAVAEAVAVARERGIFLVWVVREHDPSGRDVELFRRHHYSGGKGPTVKGLKGAELADGLVI

SEQ ID NO: 83823 - protein, 137 aa, Setaria italica
  Transcript Sequence Number=SeqID_17849
  Gene Ontology: Mol. function=catalytic activity; Biological process =metabolic process
  Homolog annotation: Hit_ID=B6T5J6; Match level="QueryCoverage=100%, HitCoverage=70%, E-value=6e-74, Identity=97%"; Hit description =Isochorismatase family protein rutB
  Pfam annotation: Domain name=Isochorismatase; Domain location=2-137; Score=-25.6; E_value=0.00025; Accession=PF00857.12; Description =Isochorismatase family
VVREHDPSGRDVELFRRHHYSGGKGPTVKGLKGAELADGLVIKEGEYKLVKTRFSAFFATHLDSVLKTAGIKNLVIVGVQTPNCIRQTVFDAVALDYEKITVLIDATAAARPEIHLSNIRDMKNIGVETPTLDEWRR

SEQ ID NO: 83824 - protein, 153 aa, Setaria italica
  Transcript Sequence Number=SeqID_17850
  Gene Ontology: Mol. function=transferase activity, transferring glycosyl groups; Biological process=metabolic process
  Homolog annotation: Hit_ID=B9RUA9; Match level="QueryCoverage=100%, HitCoverage=25%, E-value=2e-26, Identity=40%"; Hit description=UDP -glucosyltransferase, putative
KLTFEDFMAPFGDPASIAPMMELDGKLGKAIEESQGLIINTFHGLEAQYVDFWNQHMGLRAWPVGPLCLAQPASAPAEAQPSWMEWLDNKTTDGRAVLYVALGTLAAIPESQLKEVADGLERAEVDFIWAVRPKNIDLGSGFEERTKGRGLVV

SEQ ID NO: 83825 - protein, 194 aa, Setaria italica
  misc_feature (184)..(184): Xaa can be any naturally occurring amino acid
  Transcript Sequence Number=SeqID_17851
  Gene Ontology: Mol. function=calcium ion binding; Cellular component =flagellin-based flagellum; Biological process=ciliary or flagellar motility
  Homolog annotation: Hit_ID=B6U518; Match level="QueryCoverage=100%, HitCoverage=100%, E-value=8e-77, Identity=80%"; Hit description =Polcalcin Jun o 2
  Pfam annotation: Domain name=SPARC_Ca_bdg; Domain location=6-108; Score=-37.7; E_value=0.028; Accession=PF10591.1; Description =Secreted protein acidic and rich in cyst
  Pfam annotation: Domain name=efhand; Domain location=122-150; Score =34.5; E_value=4.2e-07; Accession=PF00036.24; Description=EF hand
  Pfam annotation: Domain name=efhand; Domain location=158-186; Score =34.4; E_value=4.6e-07; Accession=PF00036.24; Description=EF hand
  Pfam annotation: Domain name=efhand; Domain location=48-76; Score =34.6; E_value=4e-07; Accession=PF00036.24; Description=EF hand
  Pfam annotation: Domain name=efhand; Domain location=84-112; Score =33.2; E_value=1e-06; Accession=PF00036.24; Description=EF hand
  Pfam module annotation: Pfam domain module=SPARC_Ca_bdg::efhand::efhan d::efhand::efhand; Domain location=6-108::122-150::158-186::48-76::84- 112
  Subcellular localization annotation: CTP_CleavageSite=33; ConfidenceScore=5.12e-01
MGKMRMPVPSLFRLGRRSKSPPPQSQQQQQQAKAEAAPGSPPRTAEEEMARVFRKFDANGDGRISRSELAALFESLGHAASDDELARMMAEADADGDGFISLDEFAALNATVAGDAAAVEEDLRHAFRVFDADGNGTISATELARVLRGLGESASVAQCRRMIEGVDQNGDGLISFEEFKVMMXAGGGCFAKIA

SEQ ID NO: 83826 - protein, 100 aa, Setaria italica
  Transcript Sequence Number=SeqID_17852
SSTSCVLAKTRGWTFFKIIKICPGTFRLSAIEAILLISSSILSRGLSRLLHLHRVIPHLHHCIASIATPSAATASHPIRGEARPGKKGQLRPYTRSRHVL

SEQ ID NO: 83827 - protein, 132 aa, Setaria italica
  misc_feature (20)..(20): Xaa can be any naturally occurring amino acid
  Transcript Sequence Number=SeqID_17853
  Gene Ontology: Mol. function=hydrolase activity
  Homolog annotation: Hit_ID=B9SGX0; Match level="QueryCoverage=62%, HitCoverage=16%, E-value=6e-33, Identity=83%"; Hit description =Catalytic, putative
ACNRRPSIAVTSLLYGAEDXPSIAGMVLDSAFTNLYDLMMELVDVYKIRVPKFTVKMAVQYMRRIIQKRAKFDIMDLNVLKVSSISQLPSLGADVVMSRVDRRARAMRHYSRRPHLCTVAQIGLRQLLRMGL

SEQ ID NO: 83828 - protein, 416 aa, Setaria italica
  Transcript Sequence Number=SeqID_17854
  Gene Ontology: Mol. function=hydrolase activity
  Homolog annotation: Hit_ID=B9SGX0; Match level="QueryCoverage=94%, HitCoverage=78%, E-value=1e-126, Identity=60%"; Hit description =Catalytic, putative
  Pfam annotation: Domain name=Abhydrolase_1; Domain location=40-264; Score=-14.6; E_value=0.088; Accession=PF00561.12; Description =alphabeta hydrolase fold
  Pfam annotation: Domain name=Peptidase_S15; Domain location=1-203; Score=-103.0; E_value=0.017; Accession=PF02129.10; Description=X-Pro dipeptidyl-peptidase (S15 family)
  Pfam module annotation: Pfam domain module=Abhydrolase_1::Peptidase _S15; Domain location=40-264::1-203
YVPAFIPENTALPCVVYCHGNSGCRADANEAAVILLSSNITVFTLDFSGSGLSGGDYVSLGWHEKEDLKCAVSCLRANKQVSSIGLWGRSMGAVTSLLYGAEDPSIAGMVLDSAFTNLYDLMMELVDVYKIRVPKFTVKMAVQYMRRIIQKRAKFDIMDLNVLKLAPKMSIPALFGHGLNDMFIQPHHCERIHQAYGGDKSIIKFEGDHNSPRPQSYYDSVSIFFYKTLHPPLLPAARSNKLHMGAFKVGNVTNESFFFEIINGLQPANTAACSSSTDAPNIPNAKRSAVDLLSESLNQLSVNNETDLDFLLDENRSLSEMDGDSVGSRLQDKISRHNEESCSYTSSNRESWGRCSSLGAASDDESSSGDNNDKQENKTVKALATPQRQSQRKPSDKDKAKEEKIRALWKKIKSEK

SEQ ID NO: 83829 - protein, 118 aa, Setaria italica
  Transcript Sequence Number=SeqID_17855
DKISRHNEESCSYTSSNRESWGRCSSLGAASDDESSSGDNNDKQENKTVKALATPQRQSQRKPSDKDKAKEKKIRALWKKIKSEKVEMGDSLSQRFRMCLGQPARHKRNKSSGELTTP

SEQ ID NO: 83830 - protein, 93 aa, Setaria italica
  Transcript Sequence Number=SeqID_17856
  Subcellular localization annotation: CTP_CleavageSite=73; ConfidenceScore=5.21e-01
NILAGKILSTWIVYLLHQQLMAPSTADSSTVSQPRLTVLAKGDCVKQTLLKNLSRWNVPSPSWSTRHASIGCRGGAGPSYQGQLTRWSSKFLN

SEQ ID NO: 83831 - protein, 89 aa, Setaria italica
  Transcript Sequence Number=SeqID_17857
  Homolog annotation: Hit_ID=B9SGX0; Match level="QueryCoverage=88%, HitCoverage=16%, E-value=1e-32, Identity=73%"; Hit description =Catalytic, putative
MIEQFVNFVIRPPRSENDPDQYLWDTEFILAGRKYKRLDLELTNARGYILKCSHYVPAFIPENTALPCVVYCHGNSGCRRRNRQNRKTD

SEQ ID NO: 83832 - protein, 115 aa, Setaria italica
  Transcript Sequence Number=SeqID_17858
LLRKMAPCAARFMRTNIMGTLTTVTGIISIAALEYHSCQWRCSHARLLLLCYYLGFKSSLPLSSQRIRRSNAILFDQHLCNLNRRSLIMPDYFILKFTGIHEYAISYDINFMSLW

SEQ ID NO: 83833 - protein, 59 aa, Setaria italica
  Transcript Sequence Number=SeqID_17859
  Homolog annotation: Hit_ID=B9SGX0; Match level="QueryCoverage=98%, HitCoverage=14%, E-value=8e-17, Identity=68%"; Hit description =Catalytic, putative
ADANEAAVILLSSNITVFTHDFSGSALSGGDYVSLGCHEVNKQVSSIGLWGRSMAAVTR

SEQ ID NO: 83834 - protein, 116 aa, Setaria italica
  Transcript Sequence Number=SeqID_17860
  Gene Ontology: Mol. function=protein serine/threonine kinase activity; Biological process=protein amino acid phosphorylation
  Homolog annotation: Hit_ID=B6SWP8; Match level="QueryCoverage=100%, HitCoverage=15%, E-value=8e-53, Identity=88%"; Hit description =Carbohydrate binding protein
MLDEAFRARLGDFGLARQAEHGESPDATAAAGTMGYLAPEYLLTGRATEGTDVFSFGALALEVACGRRPIGTEGRCNNLVEWVWSLHGEARVLDAVDPRLGGEFEEGEMRRALLVG

SEQ ID NO: 83835 - protein, 67 aa, Setaria italica
  Transcript Sequence Number=SeqID_17861
WIILYLGSELSHIIDCNTNETSKSNTMVEGKNTRNFQLGNIVETSGWEILLKLACLPHESGAAISGL

SEQ ID NO: 83836 - protein, 137 aa, Setaria italica
  misc_feature (21)..(21): Xaa can be any naturally occurring amino acid
  Transcript Sequence Number=SeqID_17862
  Homolog annotation: Hit_ID=B6SI40; Match level="QueryCoverage=83%, HitCoverage=30%, E-value=2e-32, Identity=64%"; Hit description=mTERF family protein
MQLLRTRLLPLLRATSRLPSXPIHHPACLLSTAAAPFSLEDYLVAACGLAPAQARKTAKKAFDESSQVYKKAFEDLAWSRLNSASNPDAILALLSGVGLSRADIAAVVAADPLLLRSSPKNVGPRLLALRDRLGLSA

SEQ ID NO: 83837 - protein, 145 aa, Setaria italica
  Transcript Sequence Number=SeqID_17863
  Subcellular localization annotation: CTP_CleavageSite=44; ConfidenceScore=5.43e-01
LYSNATATHFRGNKLRFLPQKSTILVNAAKSGPCRCKLNRRKPRTTTKVGQTSLEITTKKRRGKWAAANPEPAGGHHGKLGFGRIWGLRPRARRIQGAVPWPPRQVEERRRGLQDDGPGRHWEPDRNLQRRALSASREDRHRESV

SEQ ID NO: 83838 - protein, 104 aa, Setaria italica
  Transcript Sequence Number=SeqID_17864
  Gene Ontology: Mol. function=protein phosphatase type 2A regulator activity; Cellular component=protein phosphatase type 2A complex; Biological process=signal transduction
  Homolog annotation: Hit_ID=B6T9B2; Match level="QueryCoverage=100%, HitCoverage=20%, E-value=4e-48, Identity=85%"; Hit description =Transposon protein
SKNRQVIMPLVVPALEQNIQNHWNQAVLNLTLNVKKMFSEMDEDLFSSCLAKYKEDEEKRVSFEVKRKLTWEKLESAAAFQPVTGHTAVLVGHQPSANMTATLI

SEQ ID NO: 83839 - protein, 489 aa, Setaria italica
  Transcript Sequence Number=SeqID_17865
  Gene Ontology: Mol. function=protein phosphatase type 2A regulator activity; Cellular component=protein phosphatase type 2A complex; Biological process=signal transduction
  Homolog annotation: Hit_ID=B6T9B2; Match level="QueryCoverage=99%, HitCoverage=97%, E-value=0.0, Identity=91%"; Hit description =Transposon protein
  Pfam annotation: Domain name=B56; Domain location=64-475; Score =811.3; E_value=6e-241; Accession=PF01603.12; Description=Protein phosphatase 2A regulatory B subunit (B56 family)
  Subcellular localization annotation: CTP_CleavageSite=72; ConfidenceScore=5.80e-01
MWKQFLSKLPRKSSASGDSGQCSNGTGIQRTSSLGSIPPSRPASAIRRMSSAVFPSSVVAGIEPLVSFKDVPNSEKQNLFVSKLSLCCVVFDFSDPNKSSVEKDIKRQALLDLIEFVESSNARFSEASIAACARMCAINLFRAFPPNYRSGSCGGEGDEDEPMFDPAWCHLQLVYELLLKFIGSSSLDAKVGKKHFDHSFIVKLLNLLDSEDPRERDCLKTILHRIYGKFMVHRPFIRKAVSNIFYQFVFETDRHNGIAELLEVFGSVISGFALPLKEEHKIFLWRVLIPLHKPKSVGLYLQQLTYCVTQFLEKDPKLASSVIIGLLRYWPITNCQKEVMFLSEIEEILESTSQAEFQKCMVPLFRRIAHCITSSHFQVAERALFVWNNDHIISLIAQNRQVIMPLVVPALEQNIQNHWNQAVLNLTLNVKKMFSEMDEDLFSSCLAKYKEDEEKRVSFEVKRKLTWEKLESAAAFQPVTGHTAVLGPL

SEQ ID NO: 83840 - protein, 73 aa, Setaria italica
  Transcript Sequence Number=SeqID_17866
PPPSIWPAAVAQVPPIAWNGQKGGSRDWLDKEGVVRSFPYPVNVFSFSFLIYLILIYLTSIQTRGERQLQTKK

SEQ ID NO: 83841 - protein, 344 aa, Setaria italica
  Transcript Sequence Number=SeqID_17867
  Gene Ontology: Mol. function=oxidoreductase activity, acting on sulfur group of donors, disulfide as acceptor; Cellular component =chloroplast; Biological process=sulfate reduction, APS pathway
  Homolog annotation: Hit_ID=Q5EUC8; Match level="QueryCoverage=100%, HitCoverage=75%, E-value=0.0, Identity=93%"; Hit description =Adenosine 5'-phosphosulfate reductase 2
  Pfam annotation: Domain name=PAPS_reduct; Domain location=1-177; Score=251.0; E_value=2.8e-72; Accession=PF01507.11; Description =Phosphoadenosine phosphosulfate reductase family
  Pfam annotation: Domain name=Thioredoxin; Domain location=233-343; Score=19.7; E_value=5.4e-06; Accession=PF00085.12; Description =Thioredoxin
  Pfam module annotation: Pfam domain module=PAPS_reduct::Thioredoxin; Domain location=1-177::233-343
FSGAEDVALIEYAKLTGRPFRVFSLDTGRLNPETYQFFDKVEKHYGIRIEYMFPDAGEVQELVRTKGLFSFYEDGHQECCRVRKVRPLRRALKGLRAWITGQRKDQSPGTRASIPVVQVDPSFEGQDGGAGSLIKWNPVANVDGKDIWTFLRTMDVPVNTLHAQGYVSIGCEPCTRPVLPGQHEREGRWWWEDAKAKECGLHKGNIEKDGQAAPKSANGNGSAGAPDIFESPAVVSLTRTGIENLLGLENRAEPWLVVLYAPWCPFCQAMEASYVELAEKLADSGVKVARFRADGEQKPFAQAELQLQSFPTVLLFPSRTARPIKYPSEKRDVDSLLAFVNSLR

SEQ ID NO: 83842 - protein, 68 aa, Setaria italica
  Transcript Sequence Number=SeqID_17868
  Gene Ontology: Mol. function=translation elongation factor activity; Cellular component=cytoplasm; Biological process=translational elongation
  Homolog annotation: Hit_ID=B9FBM7; Match level="QueryCoverage=83%, HitCoverage=13%, E-value=3e-25, Identity=98%"; Hit description =Elongation factor 1-alpha
  Pfam annotation: Domain name=GTP_EFTU_D3; Domain location=1-51; Score= 25.2; E_value=3.8e-06; Accession=PF03143.9; Description=Elongation factor Tu C-terminal domain
KFLKNGDAGMVKMIPTKPMVVETFSEYPPLGRFAVRDMRQTVAVGVIKSVEKKDPTGAKVTKAAAKKK

SEQ ID NO: 83843 - protein, 141 aa, Setaria italica
  Transcript Sequence Number=SeqID_17869
  Gene Ontology: Mol. function=translation elongation factor activity; Cellular component=cytoplasm; Biological process=translational elongation
  Homolog annotation: Hit_ID=B9FBM7; Match level="QueryCoverage=85%, HitCoverage=28%, E-value=3e-64, Identity=97%"; Hit description =Elongation factor 1-alpha
  Pfam annotation: Domain name=GTP_EFTU_D3; Domain location=16-124; Score=210.7; E_value=4e-60; Accession=PF03143.9; Description =Elongation factor Tu C-terminal domain
VVGFRWSFLTSKDDPAKEAASFTSQVIIMNHPGQIGNGYAPVLDCHTSHIAVKFAELITKIDRRSGKELEKEPKFLKNGDAGMVKMIPTKPMVVETFSEYPPLGRFAVRDMRQTVAVGVIKSVEKKDPTGAKVTKAAAKKK

SEQ ID NO: 83844 - protein, 239 aa, Setaria italica
  Transcript Sequence Number=SeqID_17870
  Gene Ontology: Mol. function=electron carrier activity; Cellular component=integral to membrane; Biological process=oxidation reduction
  Homolog annotation: Hit_ID=Q9LDC7; Match level="QueryCoverage=94%, HitCoverage=44%, E-value=8e-84, Identity=66%"; Hit description =Sterol C-22 desaturase-like
MAAESLSSFLDIRAAAPFLVAAVAFYFLVEQLSYHRKKGPLPGPPLVVPFLGSVAHMIRDPTGYWDGQAARAKKSGAGLAADFLVGRFIVFIRDSELSHRVFANVRPDAFHLIGHPFGKKLFGDHNLIYMFGEDHKDLRRRIAPNFTPRALSTYAALQQRVILAHLRRWLDRSAAEGGRAFPIRVPCRDMNLETSQTVFAGPYLSEEARRRFASDYNLFNVGLMAMPVDLPGFAFHIRH

SEQ ID NO: 83845 - protein, 131 aa, Setaria italica
  misc_feature (112)..(112): Xaa can be any naturally occurring amino acid
  Transcript Sequence Number=SeqID_17871
VSRGGAGGEAMPDKGERGHGHQHQHQHQHQHQQQHRKSQQSASAAELEEGELLNGEPDTNGLPERSMPPKKWRKVLAASTAAAEVEPGEIVSTKQAVPLKKARRNGEVEKGXLVPERQRKEKSSGNSARKS

SEQ ID NO: 83846 - protein, 213 aa, Setaria italica
  Transcript Sequence Number=SeqID_17872
  Gene Ontology: Mol. function=metal ion binding
  Homolog annotation: Hit_ID=B6TJA7; Match level="QueryCoverage=94%, HitCoverage=75%, E-value=2e-83, Identity=78%"; Hit description=RING -H2 finger protein
  Pfam annotation: Domain name=PHD; Domain location=164-208; Score= -4.2; E_value=0.077; Accession=PF00628.21; Description=PHD-finger
  Pfam annotation: Domain name=zf-C3HC4; Domain location=165-205; Score= 36.8; E_value=8.4e-08; Accession=PF00097.17; Description=Zinc finger, C3HC4 type (RING finger)
  Pfam module annotation: Pfam domain module=PHD::zf-C3HC4; Domain location=164-208::165-205
CYCLCPTSNENPSLSYSYQDQILSYLDNNNIGDSAARRNRLDRLMFRTNERLPGAVLQAQARVLERLRGISLGSSASRPSISLDEFSASDVFRFIDFRNRETRHQANGPNSSSYHLSSESDEEIPTISSTNLHRSSGLSKAAFLRLQIEIFEASKDDNREPSPECSICLDGFYDGDELIRLRCGHRFHSTCLEPWVRKCADCPYCRTNIRSRS

SEQ ID NO: 83847 - protein, 182 aa, Setaria italica
  misc_feature (13)..(13): Xaa can be any naturally occurring amino acid
  Transcript Sequence Number=SeqID_17873
  Homolog annotation: Hit_ID=Q9LMB4; Match level="QueryCoverage=98%, HitCoverage=92%, E-value=3e-49, Identity=53%"; Hit description =F14D16.29
  Pfam annotation: Domain name=Cupin_5; Domain location=1-161; Score =196.6; E_value=6.8e-56; Accession=PF06172.3; Description=Cupin superfamily (DUF985)
IVAALDLQRHPDXGFYLETFRDPSISLPASALPPRYKVDRAVSSAIYFLLPAGEIARLHRIPCAETWHYYQGEPLTVFEVHDDGQIKITVVGPDLRHGQRPQYMVPPNVWFGAFLTCDIESFTEDGSVFVKTPGRDPAVHYSFVGVTCAPAFQFEDNELATRQDMKALAPKAEAFINYLVPS

SEQ ID NO: 83848 - protein, 231 aa, Setaria italica
  Transcript Sequence Number=SeqID_17874
  Gene Ontology: Mol. function=zinc ion binding; Cellular component =intracellular
  Homolog annotation: Hit_ID=B6TCQ2; Match level="QueryCoverage=100%, HitCoverage=57%, E-value=1e-62, Identity=57%"; Hit description=CCT motif family protein
  Pfam annotation: Domain name=CCT; Domain location=174-218; Score =81.3; E_value=3.5e-21; Accession=PF06203.6; Description=CCT motif
FNILPLATDQPAGSDSMTPKVPYATDDDKFNDGSMYEDLCVDDTDLTFENYEELFGTSHIQTEQLFDDAGIDSYFEMKEMPPFDSNEEPKYMQLECSNVVSADSAMSNQGARADSSLCIPVRQVRSSISQSFSGLTGESSAGDHQDCGVSPMLLMGEPPWHPPGPEGSVAGGSRDSALTRYKEKKKRRKFDKKIRYASRKARADVRKRVKGRFIKAGEAYDYDPLSQTRSY

SEQ ID NO: 83849 - protein, 376 aa, Setaria italica
  Transcript Sequence Number=SeqID_17875
  Gene Ontology: Mol. function=2 iron, 2 sulfur cluster binding; Cellular component=plastid inner membrane; Biological process =oxidation reduction
  Homolog annotation: Hit_ID=Q10RT5; Match level="QueryCoverage=100%, HitCoverage=57%, E-value=0.0, Identity=89%"; Hit description =Pheophorbide a oxygenase, chloroplast, putative, expressed
  Pfam annotation: Domain name=PaO; Domain location=137-245; Score =182.7; E_value=1e-51; Accession=PF08417.4; Description=Pheophorbide a oxygenase
SGACTRIPQAMPEGPEARAVQSPKACATKFPTLVSQGLLFVWPDENGWEKATATKPPMLPKEFDDPAFSTVTIQRDLYYGYDTLMENVSDPSHIEFAHHKVTGRRDRARPLTFKMESSGAWGYSGANSGNPRITATFEAPCYALNKIEIDTKLPIFGDQKWVIWICSFNIPMAPGKTRSIVCSARNFFQFTMPGKAWWQLVPRWYEHWTSNLVYDGDMIVLQGQEKIFLAASKESSADVNQQYTKITFTPTQADRFVLAFRTWLRKFGNSQPEWFGNASQETLPSTVLSKREMLDRYEQHTLKCSSCKGAYDAFQTLQKVFMGATVVCCATAGIPAEVQLRILIGAAALVSAALAYAFHDLQKNFVFVDYVHADID

SEQ ID NO: 83850 - protein, 605 aa, Setaria italica
  Transcript Sequence Number=SeqID_17876
  Homolog annotation: Hit_ID=B9R7H5; Match level="QueryCoverage=96%, HitCoverage=99%, E-value=1e-92, Identity=48%"; Hit description =Transcription factor, putative
  Pfam annotation: Domain name=DUF547; Domain location=390-524; Score =219.8; E_value=6.8e-63; Accession=PF04784.6; Description=Protein of unknown function, DUF547
GILSSFNDGVCVQVMEKDPRKAATPVKGSARAGTGGAMNRIQARRERKLALQQDVDKLKKKLRHEENVHRALERAFTRPLGALPRLPPYLPSQTLALLAEVAVLEEEVVRLEEQVVNFRQGIYKEAIIFSTAKNTHPSGGEVPVPVQLVPSNPVPNSVVSPTAARPGSDHPPTRPSPHNGVVNGKQAPRKPVPGSGSQDDRSGAGKENQSCSNTSSASRNSRQTPLQQKTPSKSRATPAVAPDRRRATPAQTTSAATPDRKRPADASASNRNKATSQDDSSVPNKLSEELLQCLLTIFSRMGSAGGGHGDEDQQAPSPSVSGSSESSGSGSEDAYPQDPYGILELGARDIGPYKRFHVVDAASFDRNAVAGDGDAFHARRLKALLRRLSSVDLAGLSHQQKLAFWINVYNSCMMNAFLEQGIPTTPQMLVAMMPKATINVGGRAHSAMSIEHFILRLPYSVKQVNPEGAKAGDDVTARGAFGLEWPEPLVTFALSCGSWSSPAVRVYTAARVEEELEAAKREYLQAAVGVTSPGKLAVPKLLHWYLLDFAKDVDSFMDWVCLQLPAELRQEAMRSVEDGRRGGAEPRRIQVLPYEFRFRYLLASS

SEQ ID NO: 83851 - protein, 69 aa, Setaria italica
  Transcript Sequence Number=SeqID_17877
MDITESPTAETSIAEEEQLEKLNILKSKVEANIAYLPKVLDKMKESVARCEKTENLNVNIHPVFRRKCL

SEQ ID NO: 83852 - protein, 94 aa, Setaria italica
  Transcript Sequence Number=SeqID_17878
  Gene Ontology: Mol. function=DNA binding; Cellular component=nucleus; Biological process=regulation of transcription
  Homolog annotation: Hit_ID=Q8S3Y9; Match level="QueryCoverage=58%, HitCoverage=40%, E-value=1e-14, Identity=63%"; Hit description =Typical P-type R2R3 Myb protein (Fragment)
  Pfam annotation: Domain name=Myb_DNA-binding; Domain location=22-61; Score=15.7; E_value=0.081; Accession=PF00249.23; Description=Myb -like DNA-binding domain
MDMAHERDASSEEEVMAGELRRGPWTVEEDLLLVNYVASHGEGRWNSLARSAGGIHILHAGSSHGSITCQNLHLQLVQQAQFMGSITSPTEHNQ

SEQ ID NO: 83853 - protein, 151 aa, Setaria italica
  Transcript Sequence Number=SeqID_17879
  Homolog annotation: Hit_ID=B6SN40; Match level="QueryCoverage=99%, HitCoverage=71%, E-value=3e-52, Identity=70%"; Hit description =Cellular retinaldehyde-binding/triple function, C-terminal
MVVVTVEKDETGEPELLLERSRAITLQGRDRKGRAVVRIVGNYFPARALGGRAEEALRGYLRERMLPAIGGRDFVVVYMHSRVDRGGNFPGVGAIRAAYESLPAGDKGRLRAVYFVHPALQSRFFFATFGRFLFSSGLYEKLRYMSRLEYV

SEQ ID NO: 83854 - protein, 104 aa, Setaria italica
  Transcript Sequence Number=SeqID_17880
  Homolog annotation: Hit_ID=B6TW34; Match level="QueryCoverage=39%, HitCoverage=20%, E-value=3e-10, Identity=75%"; Hit description =Lachrymatory factor synthase
VSNYVTVVRPVRPSSLRHSFGNSMGFGRYVATMTVAADDGDSSAGCRLVWAFECEPVQGWSLDGLLGYLDGGVKAIAARIEEAEAAKDVAGGDDVAIYRRIVAQ

SEQ ID NO: 83855 - protein, 104 aa, Setaria italica
  Transcript Sequence Number=SeqID_17881
ANQYIILAAQGTNQYELKHGTSSSGASGGCDDDDDEEREGPDREAIHHSSSDGGPRRGDHRHRLLHRAEPRAHPHLRRRREQPQDRRWRGACPDPLRQQHQHAP

SEQ ID NO: 83856 - protein, 109 aa, Setaria italica
  Transcript Sequence Number=SeqID_17882
  Gene Ontology: Mol. function=DNA ligase (ATP) activity; Cellular component=intracellular; Biological process=response to DNA damage stimulus
  Homolog annotation: Hit_ID=Q01KE4; Match level="QueryCoverage=100%, HitCoverage=8%, E-value=2e-53, Identity=90%"; Hit description=DNA ligase
ILSSLIKKTNALEMKWLLMIILKDLKLGISEKSIFDEFHPDAQDLFNVTCDLKFVCEKLKDRSQRHKRQDIEIGKAVRPQLAMRVRDASAAWKKLHGKQVVAECKFDGD

SEQ ID NO: 83857 - protein, 88 aa, Setaria italica
  misc_feature (4)..(4): Xaa can be any naturally occurring amino acid
  Transcript Sequence Number=SeqID_17883
  Gene Ontology: Mol. function=DNA-directed DNA polymerase activity; Cellular component=nucleus; Biological process=DNA replication
  Homolog annotation: Hit_ID=B9RMM9; Match level="QueryCoverage=100%, HitCoverage=14%, E-value=6e-25, Identity=59%"; Hit description=Alpha DNA polymerase, putative
HHDXVFPQPAFDLNLPEDITHQISCLANPSLFSCNQIHFGCCTVDILKQLSGEEISRKPPVGKPGDRIGRLATHILKQQSYYPLYPPA

SEQ ID NO: 83858 - protein, 262 aa, Setaria italica
  Transcript Sequence Number=SeqID_17884
  Pfam annotation: Domain name=DUF1301; Domain location=122-252; Score=- 45.8; E_value=0.016; Accession=PF06979.4; Description=Protein of unknown function (DUF1301)
MATARLRSAASLRGVLLRHFSVGPASTPHAVSRVPDFQVPQAIIWRHFSTRKPNHLAKRDDFGLIACLHSQTRWASQAAAAVKETESSGSKISIGPKPKQIKEDDDDSNLVYHGPISSIIKKVKLLSLSTCCLSVSLGPVITFMTSPDMNVILKGAVASTVIFLSATTTAALHWFVSPYIHKLRWRPGSDSFEAEVMSWLATPLKRTIKFADIRPPETNRPFVTFKAEGNFYFVDGEHFSNKALLARLTPQKLPHESAFKNL

SEQ ID NO: 83859 - protein, 81 aa, Setaria italica
  Transcript Sequence Number=SeqID_17885
KLMWRPGSDSFEAEVMSWLATPLKRTIKFADIRPPETNRPFVTFKAEGNFYFVDGEHFSNKALLARLTPQKLPHESAFKNL

SEQ ID NO: 83860 - protein, 118 aa, Setaria italica
  Transcript Sequence Number=SeqID_17886
  Gene Ontology: Mol. function=glucose-6-phosphate dehydrogenase activity; Cellular component=chloroplast; Biological process =carbohydrate metabolic process
  Homolog annotation: Hit_ID=Q75IZ9; Match level="QueryCoverage=98%, HitCoverage=20%, E-value=2e-52, Identity=82%"; Hit description =Glucose-6-phosphate 1-dehydrogenase
  Pfam annotation: Domain name=G6PD_N; Domain location=3-117; Score =67.5; E_value=4.9e-17; Accession=PF00479.14; Description=Glucose-6 -phosphate dehydrogenase, NAD bindi
CWYARSKMSDEELRNMISMTLTCRIDKRENCGDKMEEFLQRCFYQSGQYNSEEGFAELDRKLKEKEEGKVPNRLFYLSIPPNIFVDVVRSASRTASSSTGWTRFIVEKPFGRDSESSG

SEQ ID NO: 83861 - protein, 573 aa, Setaria italica
  Transcript Sequence Number=SeqID_17887
  Gene Ontology: Mol. function=glucose-6-phosphate dehydrogenase activity; Cellular component=chloroplast; Biological process =carbohydrate metabolic process
  Homolog annotation: Hit_ID=C0PIW1; Match level="QueryCoverage=100%, HitCoverage=95%, E-value=0.0, Identity=86%"; Hit description=Glucose- 6-phosphate 1-dehydrogenase
  Pfam annotation: Domain name=G6PD_C; Domain location=269-566; Score =532.6; E_value=4.8e-157; Accession=PF02781.8; Description=Glucose-6 -phosphate dehydrogenase, C-terminal domain
  Pfam annotation: Domain name=G6PD_N; Domain location=87-266; Score =314.6; E_value=2.1e-91; Accession=PF00479.14; Description=Glucose-6 -phosphate dehydrogenase, NAD bindi
  Pfam module annotation: Pfam domain module=G6PD_C::G6PD_N; Domain location=269-566::87-266
  Subcellular localization annotation: CTP_CleavageSite=48; ConfidenceScore=5.14e-01
MAATGFRVHPAAFFSAHPREAGAKQLPFHHCSPHRILVARRTWLLRARSSNGRPQIGASFSNSNEVLDGKPAGDGPPKQGGGTVSITVVGASGDLAKKKIFPALFALFYEDCLPEHFTVFGYARSKMSDEELRNMISMTLTCRIDKRENCGDKMEEFLQRCFYQSGQYNSEEGFAELDRKLKEKEEGKVPNRLFYLSIPPNIFVDVVRSASRTASSSTGWTRFIVEKPFGRDSESSGELTRSLKKYLAEEQIFRIDHYLGKELVENLSVLRFSNLVFEPLWSRNYIRNVQLIFSEDFGTEGRGGYFDNYGIIRDIMQNHLLQILALFAMETPVSLDAEDIRNEKVKVLRSMRPLKVEDVVVGQYKGHTRGGRSFPGYADDPTVPKGSVTPTFAAAALFIDNARWDGVPFLMKAGKALHTRRAEIRVQFRSVPGNLYRRSVGTDPDTATNELVLRVQPDEAIYLKINNKVPGLGMRLDRSNLNLLYSERYRREIPDAYERLLLDAIEGERRLFIRSDELDAAWAIFTPVLRELEDRRVAPELYPYGSRGPVGAHYLAANYNVRWGDVTSDDGSF

SEQ ID NO: 83862 - protein, 86 aa, Setaria italica
  Transcript Sequence Number=SeqID_17888
SEHMYLDLDCTPCNSSAYSEEHQTQSSCSCKYGQIKFWKIGKKTYWTAKLATCCVQCCFEFVDLWTIIYQAMKCLYNNRKKKKFCF

SEQ ID NO: 83863 - protein, 191 aa, Setaria italica
  Transcript Sequence Number=SeqID_17889
  Gene Ontology: Mol. function=oxidoreductase activity, acting on the CH-OH group of donors, NAD or NADP as acceptor; Cellular component =chloroplast; Biological process=isocitrate metabolic process
  Homolog annotation: Hit_ID=Q8LPJ5; Match level="QueryCoverage=100%, HitCoverage=33%, E-value=4e-82, Identity=77%"; Hit description =Isocitrate dehydrogenase-like protein
  Pfam annotation: Domain name=Iso_dh; Domain location=1-187; Score= -185.7; E_value=0.00095; Accession=PF00180.12; Description =Isocitrateisopropylmalate dehydrogenase
GRFKDIFQEVYEENWKEKFEENSIWYEHRLIDDMVAYAVKSEGGYVWACKNYDGDVQSDFLAQGLHKFSPVVENLDIMLFFEMMCLQKLHSFGSLGLMTSVLLSSDGKTLEAEAAHGTVTRHFRLHEKGQETSTNSIASIFAWTRGLEHRAKLDKNDRLLDFTQKLESACIETVESGKMTKDLALLIHGPK

SEQ ID NO: 83864 - protein, 182 aa, Setaria italica
  Transcript Sequence Number=SeqID_17890
  Gene Ontology: Mol. function=transferase activity, transferring groups other than amino-acyl groups
  Homolog annotation: Hit_ID=B6SZH6; Match level="QueryCoverage=100%, HitCoverage=38%, E-value=2e-50, Identity=56%"; Hit description =Transferase
AVLAVQATLLLRRQSLALGVTVHHSACDGASSTHFLHTWAAAARAGAPPPPPPVIVDRIPDSRGLYDIYLKSLPPIISDEAFEFVSKPPSSFEDRLLATFTLPRSLQESIKGVVASEAARRGITPPRCSSMLATYAFIWSCYCRSRSGSGSKTTSYFLFSVDHRARLMKSAVPATYFGNCLC

SEQ ID NO: 83865 - protein, 134 aa, Setaria italica
  misc_feature (17)..(17): Xaa can be any naturally occurring amino acid
  Transcript Sequence Number=SeqID_17891
  Gene Ontology: Mol. function=DNA binding; Cellular component=nucleus
  Homolog annotation: Hit_ID=Q8S4P6; Match level="QueryCoverage=93%, HitCoverage=13%, E-value=4e-35, Identity=60%"; Hit description =Histone-lysine N-methyltransferase EZ1
IADGASCGKYCYKASEXPDSVAGIDHMLIDGEEPSHSSGNAMNQPGTNRKKNGSSGRKTKSQQSETSSTAMAVSESSDSEVHPISNKSPQPSPSPSKVKIGPKGGIRKITNRRIAERILMSVKKGTEGRIHQLQ

SEQ ID NO: 83866 - protein, 285 aa, Setaria italica
  Transcript Sequence Number=SeqID_17892
  Gene Ontology: Mol. function=DNA binding; Cellular component=nucleus; Biological process=regulation of transcription, DNA-dependent
  Homolog annotation: Hit_ID=Q8S4P6; Match level="QueryCoverage=99%, HitCoverage=30%, E-value=1e-108, Identity=68%"; Hit description =Histone-lysine N-methyltransferase EZ1
DKDGSSFQDESLFSSSNAILGGNLSAKNSIRPIKLPEVPKLPPYTTWIFLDRNQRMSEDQSVLGRRRIYYDASCGEALICSDSEEEGIDDEEEKKEFKHSEDCIIRMTVQECGMSDAVLHTLAQHLDRATDDIKARYEILQGEKTQDSCKKVIEHNAKVEDLYGDKDLDAALDSFDNLFCRRCLVFDCKLHGCSQDLVFPTEKQPACSGIADGASCGKYCYKASEPDSVAGIDHMLIDGEEPSHSSGNAMNQPGTNRKKNGSSGRKTKSQQSETSSTAMAVSEKQ

SEQ ID NO: 83867 - protein, 55 aa, Setaria italica
  Transcript Sequence Number=SeqID_17893
  Gene Ontology: Mol. function=protein dimerization activity
  Homolog annotation: Hit_ID=B6SWU7; Match level="QueryCoverage=100%, HitCoverage=7%, E-value=2e-19, Identity=85%"; Hit description =Transposon protein
KMKLVEFSYSKIYGAEAAKYVKVVNDAVHELYKEYVAQPLPLTPAYVEVVNDAVH

SEQ ID NO: 83868 - protein, 162 aa, Setaria italica
  misc_feature (83)..(83): Xaa can be any naturally occurring amino acid
  misc_feature (154)..(154): Xaa can be any naturally occurring amino acid
  Transcript Sequence Number=SeqID_17894
  Gene Ontology: Mol. function=protein dimerization activity; Biological process=regulation of RNA metabolic process
  Homolog annotation: Hit_ID=B6SRN0; Match level="QueryCoverage=100%, HitCoverage=22%, E-value=9e-68, Identity=78%"; Hit description =Transposon protein
KIRDVDTMEERCMQLSERKENLLQAFSTMPGRISFTVGLWRTSQTLACVSVAGQFIDSEWKVHRRMLNFMMVPSPHSENALTXSEAISMSLSDWNMKDKLFTITLDSECCSHDIYNADLRDHLSIKNNLMLKEQLFVVRCYAHILDAIVQDVIXASIHGVIY

SEQ ID NO: 83869 - protein, 196 aa, Setaria italica
  misc_feature (18)..(18): Xaa can be any naturally occurring amino acid
  misc_feature (175)..(175): Xaa can be any naturally occurring amino acid
  Transcript Sequence Number=SeqID_17895
  Gene Ontology: Mol. function=protein dimerization activity; Biological process=regulation of RNA metabolic process
  Homolog annotation: Hit_ID=B6SRN0; Match level="QueryCoverage=100%, HitCoverage=27%, E-value=1e-84, Identity=77%"; Hit description =Transposon protein
LYDSALNIMTVANPTSNXFYHEAWKVQLELANGTGHEDPIFSSITKDMHQRFDKYWKDCSLVLAIAVVMDDPRFKMKLVEFSYSKIYGDEIVKRVKVVNDALHELYKEYAAKPTPLTPAYVEQSEGNNGLANAKKSQGAPASTTLLDFDVYLSEIRSSEQSKSEMEQYLDESLTXNLDFDILNWGKLNAIKFPTPS

SEQ ID NO: 83870 - protein, 738 aa, Setaria italica
  misc_feature (82)..(82): Xaa can be any naturally occurring amino acid
  Transcript Sequence Number=SeqID_17896
  Gene Ontology: Mol. function=protein dimerization activity; Biological process=regulation of RNA metabolic process
  Homolog annotation: Hit_ID=B6SRN0; Match level="QueryCoverage=100%, HitCoverage=100%, E-value=0.0, Identity=83%"; Hit description =Transposon protein
  Pfam annotation: Domain name=hATC; Domain location=633-718; Score =127.7; E_value=3.7e-35; Accession=PF05699.6; Description=hAT family dimerisation domain
  Pfam annotation: Domain name=zf-BED; Domain location=85-136; Score =56.6; E_value=9.5e-14; Accession=PF02892.7; Description=BED zinc finger
  Pfam module annotation: Pfam domain module=hATC::zf-BED; Domain location=633-718::85-136
MVEETANDTQVAQDNEIAPNDEAIQGDEMVQGDELTQGDELAQGEEFVQGDELAQGDDLVQGNELVVAEETDPWDQNQERGXKKSLVWEHFTIEEVAGGVTRACCNLCKQTFAYSSGSKIAGTSHLKRHITLGSCPKIKRQEQRLLLPSAGGTDNDGEGTAERPTKRRYRYTGYANAAFDQDRSYSYLAKMIIQHDYPLHIVQQPAFATFIESLQPRFKIVDVDTMEGEVYAVYQKEKENLLQAFNTMPGRISLTIGLWTTSQTLGYVSLAGQFIDSEWKVHRRMLNFMMVSSPHSENALSEAISMSLSDWNMKDRLFTITLDNECSSHDIYSANLRDHLSNKNNLMLKGQLFVVRCYAHVLNAVALDVIASIHGVIYSIRESIKFIKASSAREEKFAEIALQLEIPSTKTLCLDVTTQWNTTYLMLLAALDYKQAFTTLETCDDNYNEAPSAEDWKKVEAACNYLKLLYDSAHSIMAAGNPTSNLFFHEAWKLQLELSNGTGHEDPIFSGIAKDMHERFDKYWKDCSLVLAIAVVMDPRFKMKLVEFSYSKIYGAEAAKYVKVVDDAVHDLYKEYVAQPLPLTPAYVEQGEANNGPANANNSQGAPASTGDGLLDFDMYLSEIQSSQPSKSELEQYLDESLTPRIQEFDILNWWKLNTVKFPTLSKMARDILAIPMSMVSSGSSIFSAGTGSHMLDDYRSSLRPEIVEALVCTKDWLQYSPATTEAPTSALVKAEGS

SEQ ID NO: 83871 - protein, 682 aa, Setaria italica
  Transcript Sequence Number=SeqID_17897
  Gene Ontology: Mol. function=protein dimerization activity; Biological process=regulation of RNA metabolic process
  Homolog annotation: Hit_ID=B6SWU7; Match level="QueryCoverage=99%, HitCoverage=87%, E-value=0.0, Identity=84%"; Hit description =Transposon protein
  Pfam annotation: Domain name=hATC; Domain location=577-662; Score =128.8; E_value=1.7e-35; Accession=PF05699.6; Description=hAT family dimerisation domain
  Pfam annotation: Domain name=zf-BED; Domain location=27-78; Score =53.5; E_value=8.3e-13; Accession=PF02892.7; Description=BED zinc finger
  Pfam module annotation: Pfam domain module=hATC::zf-BED; Domain location=577-662::27-78
DDMAHGNELINAEMTPHTTSRRRRKKSLVWEHFTIENMPGGSSRACCNLCKQTFAYSSGSKIAGTSHLKRHITLGSCPVMKDQDRKLALPPPGGPGTDNDGEGTVERPLKRRYRYTGYANATFDQERSFSYLAKMIILHDYPLHIVQQSAFTTFIESLQPRFKGVDVETMEGEVYAVFQKAKENLLQAFNTMPGRISLTIGLWTTSQTLGYVSLAGQFIDSEWKVHRRMLNFMMVSSPHSENALSEAISSSLLEWNMKDRLFTITLDNDCSSHDIYSANLRDHLSNKNNLMLKGQLFVVRCYAHILNVVAQDVIASIHGVIYNIRESIKFIKASPSREERFAEIALQLEIPSTKTLCLDVTTQWNTTYLMLLAALDYKQAFATLETCDDNYNEAPSAEDWKKVEATCNFLKLIYDSAHSIMAAANPTANIFFHEAWKIQLELANGTGHEDPIFSSIAKDMHERFDKYWKDCSLVLAVAVVMDPRFKMKLVEFSYSKIYGAEAGKYVKVVNDSLRELYKEYVAQPLPLTPTYVEQGEANNVAANANATQGNPPSTTDGLLDFDMYLSEIQSSQPAKCELEQYLEESLTPRIQEFDILNWWKLNTLKFPTLSKMARDILAIPMSMVSSGSSIFSAGTGNRMLDDYRSSLRPETVEALVCAKDWLQYAPDQTEASGSVMVKSEAS

SEQ ID NO: 83872 - protein, 736 aa, Setaria italica
  Transcript Sequence Number=SeqID_17898
  Gene Ontology: Mol. function=protein dimerization activity; Biological process=regulation of RNA metabolic process
  Homolog annotation: Hit_ID=B6SRN0; Match level="QueryCoverage=100%, HitCoverage=100%, E-value=0.0, Identity=86%"; Hit description =Transposon protein
  Pfam annotation: Domain name=hATC; Domain location=631-716; Score =123.8; E_value=5.6e-34; Accession=PF05699.6; Description=hAT family dimerisation domain
  Pfam annotation: Domain name=zf-BED; Domain location=84-135; Score =57.4; E_value=5.4e-14; Accession=PF02892.7; Description=BED zinc finger
  Pfam module annotation: Pfam domain module=hATC::zf-BED; Domain location=631-716::84-135
MVEETANDTQVAQDNEIAPNDEAIQGDEMVQGDELTQGDELAQGEEFVQGDELAQGDDLVQGNELVVAEETTPRTGTRRRRKKSLVWEHFTIEEVAGGATRACCNLCKQTFAYSSGSKIAGTSHLKRHITLGSCPKIKSQEQRLALPSTGGTDNDGEGSVERRTKRRYRYTGYANAAFDQDRSCSYLAKMIIQHDYPLHIVQQPTFATFIESLQPRFKIVDVDTMEGEVYAVYQKEKDNLLQTFNTMPGRISLTIGLWTTSQTLGYVSLAGQFIDSEWKVHRRMLSFMMVSSPHSENALSEAISMSLSDWNMKDRLFTITLDNECSSHDIYSANLRDHLSNKNNLMLKGQLFVVRCYAHILNAVAQDVIASIHGVVYSIRESIKFIKASSAREERFAEIALQLEIPSTKTLCLDVTTQWNTTYLMLLAALDYKQAFTTLETCDDNYNEAPSAEDWKKVEAACTYLKLLYDSAHSIMAAANPTSNLFFHEAWKLQLELANGTGHEDPIFSSIAKDMHERFDKYWKDCSLVLAIAVVMDPRFKMKLVEFSYSKIYGAEAAKYVKVVNDAVHELYKEYVAQPLPLTPAYVEQGEANNGPANANNSQGAPSTGDGLLDFDMYLSEIQSSQPSKSELEQYLDESLTPRIQEFDILNWWKLNTVKFPTLSKMARDILAIPMSMVSSGSSIFTAGTGSRMLDDYRSSLRPEIVEALVCAKDWLQYSPATTEAPSSALVKAEGS

SEQ ID NO: 83873 - protein, 79 aa, Setaria italica
  Transcript Sequence Number=SeqID_17899
  Subcellular localization annotation: CTP_CleavageSite=38; ConfidenceScore=5.27e-01
CAISFQVPSFLTPRHGVKFGNNNSVPEVVVDVPSNLPRSTETAQVGFFLTFHILNFFIPWLECITRLPLIRVLYLFAYF

SEQ ID NO: 83874 - protein, 428 aa, Setaria italica
  Transcript Sequence Number=SeqID_17900
MLEAVEQRSTLLWERLRRASETKELLAAEAGSWQAEHGEGSDDDLGGAREPPVSRWRWLKAVSMVAFGGRPAYKPVAQIVPLSDQPPKSGSDHNNLLEAADTGLGADRPQPRVTAQAQARLSPRDVAKIRSNNPVPQVVMPVPSNLPPSTETVQVPSFLTPRHGVKFGNNNSVPEVVVDVPSNLPRSTETAQVADQMKKKQQERCLKYSQKALAFAVCTFIGYASAAKASRKSSEDSEPSNINITFKLAMVPFFIALCADLFSLKTKAKYGRAFVFLSSFHLVLMVYLVFISFDMRYAYTMIFLPLVAVSSLLQQKLWPGQQQGTDEKANKNLDSIFELSSLILNWSTFISALMVIFRELKPNEKYEDIAHGAVGLFFFLTIVLGLYLMLVTTVRIPELVRVRYLDVLLICLLVGTIISALISFLHFT

SEQ ID NO: 83875 - protein, 155 aa, Setaria italica
  Transcript Sequence Number=SeqID_17901
  Gene Ontology: Mol. function=nucleoside-triphosphatase activity; Cellular component=membrane; Biological process=transport
  Homolog annotation: Hit_ID=Q0JLC5; Match level="QueryCoverage=96%, HitCoverage=10%, E-value=9e-55, Identity=65%"; Hit description =Pleiotropic drug resistance protein 3
  Pfam annotation: Domain name=PDR_assoc; Domain location=50-116; Score= 148.0; E_value=2.8e-41; Accession=PF08370.3; Description=Plant PDR ABC transporter associated
MLIMMTFMVVNGFILVRDDVKKWWIWGYWISPLMYVQNAITVNEFLGHSWDKILNSTVSNETLGVQVLKSHGVFPEARWYWIGFGALLGFTALFNVLFTLALTCLRPYGNPRPSVSEEVLKQKQSNVKNGIPDATPWASVQPIGDNTETNLEMSE

SEQ ID NO: 83876 - protein, 365 aa, Setaria italica
  Transcript Sequence Number=SeqID_17902
  Gene Ontology: Mol. function=ribosome binding; Cellular component =ribosome; Biological process=rRNA processing
  Homolog annotation: Hit_ID=A4CTC3; Match level="QueryCoverage=52%, HitCoverage=88%, E-value=9e-29, Identity=40%"; Hit description=16S rRNA-processing protein
  Pfam annotation: Domain name=PRC; Domain location=133-226; Score =42.5; E_value=1.6e-09; Accession=PF05239.8; Description=PRC-barrel domain
  Pfam annotation: Domain name=RimM; Domain location=38-127; Score =71.5; E_value=3.1e-18; Accession=PF01782.10; Description=RimM N -terminal domain
  Pfam module annotation: Pfam domain module=PRC::RimM; Domain location= 133-226::38-127
REQEEEVEDEEEFYGEEDEQREYDGEEEEQEYDEELVEVGYVSGAHGVRGDVLVTPRTDFPELRFATPGTRWLRARAAGKQQVREFELVRGRAHTGKKCWIVSFDGIHNLDEARQIVGSAILVKAGDRPEIEDDEFFSLDLVGMRVIVKDTGKLVGTVGQVFNFGGGDLLQVMLGSAEGTAVDPDSENQDSTSSRDHVWIPFAEDIVPDVDMESREMWITPPKGLLELNSRSDKRSKKERRVMEWKDRKRLQRRVIAGKKVLSEMDQGHVLEGLVSGDKVQKASLAEQIGCIDFQLFRHAVHCVSKQIESSSKKLLANSSLSRKKVIKIPYKGLINLGEKAEHSFSRELKHGLEILLKSKAALST

SEQ ID NO: 83877 - protein, 224 aa, Setaria italica
  misc_feature (32)..(32): Xaa can be any naturally occurring amino acid
  misc_feature (74)..(74): Xaa can be any naturally occurring amino acid
  Transcript Sequence Number=SeqID_17903
MRWPPPISHRRRPFLLLVLLVALYSIPGAFSXRHVTLNTVEIFTTHEWFGKPTVYFRCNGENKTNLPDVKEAHXLYAFKGEESWQPLAELPEKKCKRCGLYEEDAFKPADVFDEWEMCSSDFKDGKYTRFKENQFNATFLCPNCTASAGDHGNGEHSSEVETNKASVPVIIVVSVLASVLVIIALFGGYKYWQKKKRERDQARFLKLFEEGDDLEDELGLSNEF

SEQ ID NO: 83878 - protein, 52 aa, Setaria italica
  Transcript Sequence Number=SeqID_17904
  Gene Ontology: Mol. function=nucleoside-triphosphatase activity; Cellular component=membrane
  Homolog annotation: Hit_ID=B9P510; Match level="QueryCoverage=92%, HitCoverage=7%, E-value=6e-12, Identity=64%"; Hit description=White -brown-complex ABC transporter family (Fragment)
MSPILQSRCEVIMYTTALLTFMAIGGFPSFVEDVKIFRKERLSGHYGVSEFV

SEQ ID NO: 83879 - protein, 197 aa, Setaria italica
  misc_feature (138)..(138): Xaa can be any naturally occurring amino acid
  Transcript Sequence Number=SeqID_17905
  Gene Ontology: Mol. function=nucleoside-triphosphatase activity; Cellular component=membrane; Biological process=lipid transport
  Homolog annotation: Hit_ID=Q10A32; Match level="QueryCoverage=100%, HitCoverage=33%, E-value=9e-49, Identity=52%"; Hit description=ABC-2 type transporter family protein
GQRKRVSICIEMLTRPRLLFLDEPTSGLDSAASYHVMSHIARIAVREGMTVVSAVHQPSGDVFELFHGLCLLAAGKTVFFGTTSDATEFFTLSGFPCPHLRSPSDHFLRTINKDFDEVYIPINSNIFSVIHLISSHIXENVESSKANRKTAAEAIDILTTAYKSSSYAEKTTYQIVEMKNMDGASFKRREQAGFCNK

SEQ ID NO: 83880 - protein, 256 aa, Setaria italica
  Transcript Sequence Number=SeqID_17906
  Gene Ontology: Mol. function=nucleoside-triphosphatase activity; Cellular component=membrane
  Homolog annotation: Hit_ID=B9P510; Match level="QueryCoverage=96%, HitCoverage=39%, E-value=3e-93, Identity=62%"; Hit description=White- brown-complex ABC transporter family (Fragment)
  Pfam annotation: Domain name=ABC2_membrane; Domain location=1-184; Score=64.3; E_value=4.7e-16; Accession=PF01061.16; Description=ABC-2 type transporter
SIGVCLGTIFYQVGYSYSSIQSRCEVIMYTTALLTFMAIGGFPSFVEDVKIFRKERLSGHYGVSEFVISNTLSATPYLSVIAVLPGAMLYYLTGLTKGVDHFTYFVIVLCICCLLVESMMMIIAAIVPDFLMGIIIGAGVQGVMMLNGGFFRLPSELPKPVWKYPCYYISFHKYAVQGFYKNEFMGLSFPSDQLVESNVTISGIQVLKSKLQVEMGYSKWVNLAILCGMMVLYRLIFFAIVKIAEEIRPKLGGKRG

SEQ ID NO: 83881 - protein, 447 aa, Setaria italica
  Transcript Sequence Number=SeqID_17907
  Gene Ontology: Mol. function=nucleoside-triphosphatase activity; Cellular component=membrane; Biological process=lipid transport
  Homolog annotation: Hit_ID=B9P510; Match level="QueryCoverage=99%, HitCoverage=74%, E-value=1e-156, Identity=57%"; Hit description =White-brown-complex ABC transporter family (Fragment)
  Pfam annotation: Domain name=ABC_tran; Domain location=33-223; Score =137.9; E_value=3.1e-38; Accession=PF00005.19; Description=ABC transporter
LTWEEVRVTVAGGARGAPAVDILDGVSGHARPGEVLAIMGPSGCGKTTLLDTLAGRLGPGMNKTGLILINGRQEKLAYGTSAYVTQDNVLMSTLSVREAVYYSAQLQLPDTMPPPEKRAHADRVIREMGLGDAMDTRIGGRITKGISGGQRKRVSICIEMLTRPRLLFLDEPTSGLDSAASYHVMSHIARIAVREGMTVVSAVHQPSGDVFELFHGLCLLAAGKTVFFGTTSDATEFFTLSGFPCPHLRSPSDHFLRTINKDFDEENVESSKANRKTAAEAIDILTTAYKSSSYAEKTTYQIVEMKNMDGASFKRREQAGFCTKLLVLTRRSFLNMHRDIGYYWMRLAVYMGIGVCLGTIFYQVGYSYSSIQSRCEVIMYTTALLTFMAIGGFPSFVEDVKIFRKERLSGHYGVSEFVISNTLSATPYLSVIAVLPGAMLYYLTGLC

SEQ ID NO: 83882 - protein, 340 aa, Setaria italica
  misc_feature (99)..(99): Xaa can be any naturally occurring amino acid
  Transcript Sequence Number=SeqID_17908
  Homolog annotation: Hit_ID=Q9LJG9; Match level="QueryCoverage=57%, HitCoverage=95%, E-value=6e-11, Identity=26%"; Hit description=COP1 -interacting protein 7 (CIP7)-like
MDRKVASNVELDSAVFQVSSPDNRYEAIACSKGNTELIASGPFDQLVLHLEDAKKFQSCTSSGTFKLLLAGDGKGSSWFTKSTLQRFLHIINSSDTSKXSVNGVLDEMSQLEETRKFHQSLYIKEQQNITSGALTGGLFGTGAIAQQENVGPNSSETTKNELLRALDLRLTALKEEILVLLNRAVGSNLSTREISDLSAFVQRFGTSEFSWLMRCMLLIADCQPSELPPQQDSTAEKIDMGDNAHKTRDISPQTNLQRPIANNVSPAKLAQIERESSTESDDSSESSGEGEAVVERSRPLVRSASPRRSASPMRRVQIGRSGSRRSTAIAIKSLSLLSLP

SEQ ID NO: 83883 - protein, 811 aa, Setaria italica
  misc_feature (18)..(18): Xaa can be any naturally occurring amino acid
  Transcript Sequence Number=SeqID_17909
AQIERESSTESDDSSESXSGEGEAVVERSRPLVRSASPRRSASPMRRVQIGRSGSRRSTAIAIKSLSYFPPSQRIPLDKDDESNGETDQPPRKSDNNVRRMSVQDAISLFESKQKDQNPDSQNKKAGLFTTKSVLRRWSAGMGDSLNDKSEERISDSTSESKPNNMAYDTEKEGAEMKTEPDEAPKNFITSEVEGLTFHADSPDTRVSGMESAVSSNICAEQTKSGLEESSDRAMASAEWNRQKEAELNQMLLKMMEVMPGKFAGANAIAAGLDSTNQQKGATHGQHKEKRDAKIRTEKGTRRPTKEVSSKPLKDTFGQKKSAMTPKTGTVTEKRISPVPQRARRNSSPPVLPKEVASKTPVRKSLPKPSPSPAPAPTTRSSWSGGSLTKATTTQRTKNSPGTGMASTSTPTSRRRTPATPPSSQLASKVERTIQPVKNKKETVTATKPAIKGQEEKRTKTATKTSRITKVSPSLEEKSSVTTKQSLHKVSKKSSVVPVESKPLKKATGISQSVGSGTVKNKVPQLDDSSKDSGSVNQAEDKEQSPMTTEPTTKVLEADLAQPAHDVDENLEISLDNDLNIEKTEKPASSLTATEMGSSDQVEPPTNEADEAIQPPDEDMGISSAAWVEVEHQEQEVTDLSENVVAEDVTSPGIAPLPSSSPRVRHSLSQMLQADSNEPEIIEWGNAENPPAIVFHKDSPKGFKRLLKFARKNKGDNSANGWASPSVVSEGEDELEESRGTSDGANSSRRTFDGSKTNSILSAQSTTGSFNSMNSDKQRERPGAATSTKASRSFFSLSNFRSSRSNESKLR

SEQ ID NO: 83884 - protein, 61 aa, Setaria italica
  Transcript Sequence Number=SeqID_17910
MDPRARYPPGMGNGRGGNPNYYGRGPPPQQPQQPHHQHQQTSGAHHHQQYAQRQQQQHHHH

SEQ ID NO: 83885 - protein, 234 aa, Setaria italica
  Transcript Sequence Number=SeqID_17911
  Homolog annotation: Hit_ID=B6T6B1; Match level="QueryCoverage=100%, HitCoverage=99%, E-value=2e-52, Identity=51%"; Hit description=SAM domain family protein
  Pfam annotation: Domain name=SAM_1; Domain location=162-224; Score =54.3; E_value=4.6e-13; Accession=PF00536.22; Description=SAM domain (Sterile alpha motif)
  Pfam annotation: Domain name=SAM_2; Domain location=161-226; Score =33.2; E_value=1.1e-06; Accession=PF07647.9; Description=SAM domain (Sterile alpha motif)
  Pfam module annotation: Pfam domain module=SAM_1::SAM_2; Domain location=162-224::161-226
MHADRSSGRKRSVRDRLGSGGVSRSRSDDAKRFRRDDGTWRRELYKNSGGTQTSSGPTSRDVQPNKKSRVEQRIQVVKKSSVPDLREKLSGIPSQRPQLSSTVQVPKPAREIVNSDRPVQKRDPPPIAAPPVVKKVSAPAPAPAPAPAPAPAPAPPAPQQSQEKVDASLESLLKSLDLEKYLINFQAEEVDMKAMAYMNEEDMKSLGIPMGPRKKILSALAHKKRKSSKSLPTS

SEQ ID NO: 83886 - protein, 71 aa, Setaria italica
  Transcript Sequence Number=SeqID_17912
FTFTNSRITNRPWKPGSSGHIAYQPTLHLRAPTVHHDHSNLYRHAYVYLLMQGQGSGQLMVVGSLRISSPN

SEQ ID NO: 83887 - protein, 80 aa, Setaria italica
  Transcript Sequence Number=SeqID_17913
  Gene Ontology: Mol. function=1-deoxy-D-xylulose-5-phosphate reductoisomerase activity; Cellular component=chloroplast; Biological process=isoprenoid biosynthetic process
  Homolog annotation: Hit_ID=Q8W250; Match level="QueryCoverage=98%, HitCoverage=16%, E-value=9e-37, Identity=93%"; Hit description=1 -deoxy-D-xylulose 5-phosphate reductoisomerase, chloroplastic
RAGGTMTGVLSAANEKAVELFIDEKISYLDIFKVVERTCDAHRNELVTRPSLEDIIHYDLWARRYAASLQPSAGLSPVPA

SEQ ID NO: 83888 - protein, 89 aa, Setaria italica
  Transcript Sequence Number=SeqID_17914
  Gene Ontology: Mol. function=1-deoxy-D-xylulose-5-phosphate reductoisomerase activity; Cellular component=plastid; Biological process=isoprenoid biosynthetic process
  Homolog annotation: Hit_ID=Q70EZ8; Match level="QueryCoverage=100%, HitCoverage=18%, E-value=3e-46, Identity=95%"; Hit description =Putative 1-deoxy-D-xylulose 5-phosphate reductoisomerase
  Pfam annotation: Domain name=DXP_redisom_C; Domain location=1-42; Score=54.4; E_value=4.3e-13; Accession=PF08436.4; Description=1 -deoxy-D-xylulose 5-phosphate reductoi
LKDVKVADALKHPNWNMGKKITVDSATLFNKGLEVIEAHYLFGAEYDDIEIVIHPQSIIHSMVETQDSSVLAQLGWPDMRIPILYTLSW

SEQ ID NO: 83889 - protein, 108 aa, Setaria italica
  Transcript Sequence Number=SeqID_17915
  Gene Ontology: Mol. function=1-deoxy-D-xylulose-5-phosphate reductoisomerase activity; Cellular component=chloroplast; Biological process=isoprenoid biosynthetic process
  Homolog annotation: Hit_ID=Q8W250; Match level="QueryCoverage=100%, HitCoverage=22%, E-value=4e-56, Identity=96%"; Hit description=1 -deoxy-D-xylulose 5-phosphate reductoisomerase, chloroplastic
CSEVTWPRLDLCKLGSLTFKAPDNVKYPSMDLAYAAGRAGGTMTGVLSAANEKAVELFIDEKISYLDIFKVVERTCDAHRNELVTRPSLEDIIHYDLWARRYAASLQP

SEQ ID NO: 83890 - protein, 60 aa, Setaria italica
  Transcript Sequence Number=SeqID_17916
  Gene Ontology: Mol. function=1-deoxy-D-xylulose-5-phosphate reductoisomerase activity; Cellular component=chloroplast; Biological process=isoprenoid biosynthetic process
  Homolog annotation: Hit_ID=Q8W250; Match level="QueryCoverage=98%, HitCoverage=12%, E-value=2e-22, Identity=84%"; Hit description=1 -deoxy-D-xylulose 5-phosphate reductoisomerase, chloroplastic
LIEDFISYLDIFKVVERTCDAHRNELVTRPSLEDIIHYDLWARRYAASLQPSAGLSPVPA

SEQ ID NO: 83891 - protein, 92 aa, Setaria italica
  Transcript Sequence Number=SeqID_17917
  Gene Ontology: Mol. function=1-deoxy-D-xylulose-5-phosphate reductoisomerase activity; Cellular component=plastid; Biological process=isoprenoid biosynthetic process
  Homolog annotation: Hit_ID=Q5J7B3; Match level="QueryCoverage=60%, HitCoverage=11%, E-value=5e-25, Identity=98%"; Hit description =Putative 1-deoxy-D-xylulose 5-phosphate reductoisomerase
  Pfam annotation: Domain name=DXP_reductoisom; Domain location=1-36; Score=-50.5; E_value=0.0043; Accession=PF02670.8; Description=1 -deoxy-D-xylulose 5-phosphate reductoisomerase
NKGISKGSAGLKPTVAAIEAGKDIALANKETLIAGGPFVLPLAHKHKVKILPADSEHSAIFQVSHKMIICCYNYIFHYFSNTYIFHYYACLV

SEQ ID NO: 83892 - protein, 173 aa, Setaria italica
  misc_feature (20)..(20): Xaa can be any naturally occurring amino acid
  Transcript Sequence Number=SeqID_17918
  Gene Ontology: Mol. function=1-deoxy-D-xylulose-5-phosphate reductoisomerase activity; Cellular component=chloroplast; Biological process=isoprenoid biosynthetic process
  Homolog annotation: Hit_ID=Q8W250; Match level="QueryCoverage=100%, HitCoverage=36%, E-value=3e-81, Identity=85%"; Hit description=1 -deoxy-D-xylulose 5-phosphate reductoisomerase, chloroplastic
  Pfam annotation: Domain name=DXP_redisom_C; Domain location=55-138; Score=210.1; E_value=5.7e-60; Accession=PF08436.4; Description=1 -deoxy-D-xylulose 5-phosphate reductoi
  Pfam annotation: Domain name=DXP_reductoisom; Domain location=1-41; Score=-37.5; E_value=0.00029; Accession=PF02670.8; Description=1 -deoxy-D-xylulose 5-phosphate reductoisomerase
  Pfam module annotation: Pfam domain module=DXP_redisom_C::DXP _reductoisom; Domain location=55-138::1-41
RHPDAVTVVTGIVGCAGLKXAAIKAGKDIALANKETLIAGGPFVLPLAHKHKVKILPADSEHSAIFQCIQGLSEGALRRVILTASGGAFRDWPVDKLKDVKVADALKHPNWNMGKKITVDSATLFNKGLEVIEAHYLFGAEYDDIEIVIHPQSIIHSMVETQDSSVLAQRGWP

SEQ ID NO: 83893 - protein, 321 aa, Setaria italica
  Transcript Sequence Number=SeqID_17919
  Gene Ontology: Mol. function=DNA binding; Cellular component=nucleus; Biological process=regulation of transcription, DNA-dependent
  Homolog annotation: Hit_ID=Q8S985; Match level="QueryCoverage=99%, HitCoverage=45%, E-value=1e-126, Identity=69%"; Hit description =Auxin response factor 15
RGSKWKCLMVRWDDDVDFRRPNRISPWEIELTSSVSGSHLSAPNAKRLKPCLPHVNPDYLVPNGSGRPDFAESAQFHKVLQGQELLGYRTHDNAAVATSQPCEARNMQYIDERSCSNDASNSIPGVPRLGVRTPLGSPGFSYHCSGFGESQRFQKVLQGQEVFRPYRGSLVDACLRNNAFHPQDGSHAPSAVNKWHTQLHGCAFRGPQAPMLPSQSSSPPSVLMFQRGNSKISRFEFGHGSLDKNEDDRPAMFGHDGGIGGTEQSLMLQPHHDSGEVRNRHVTVEKFHSTVAARKDGPDNREVNTNSCKIFGISLTEKVPA

SEQ ID NO: 83894 - protein, 332 aa, Setaria italica
  Transcript Sequence Number=SeqID_17920
  Gene Ontology: Mol. function=DNA binding; Cellular component=nucleus; Biological process=regulation of transcription, DNA-dependent
  Homolog annotation: Hit_ID=Q6U8C8; Match level="QueryCoverage=98%, HitCoverage=50%, E-value=1e-162, Identity=82%"; Hit description =ETTIN-like auxin response factor (Fragment)
  Pfam annotation: Domain name=Auxin_resp; Domain location=190-271; Score=173.8; E_value=5e-49; Accession=PF06507.5; Description=Auxin response factor
  Pfam annotation: Domain name=B3; Domain location=63-168; Score=111.0; E_value=4e-30; Accession=PF02362.13; Description=B3 DNA binding domain
  Pfam module annotation: Pfam domain module=Auxin_resp::B3; Domain location=190-271::63-168
LVVGSYVTLHADASTDEVYAQLALVAENEEVARRLRGGSEDGSGGDGEDGDTVKQRFSRMPHMFCKTLTASDTSTHGGFSVPRRAAEDCFPPLDYSQQRPSQELVAKDLHGTEWRFRHIYRGQPRRHLLTTGWSAFVNKKKLVSGDAVLFLRGDDGELRLGVRRAAQLKNGSAFPALYNQCSNLGSLANVAHAVATKSVFHIYYNPRLSQSEFIIPYSKFMKSFSQPFSAGLRFKMRYESDDATERRYTGIIAGISEADPMWRGSKWKCLMVRWDDDVDFRRPNRISPWEIELTSSVSGSHLSAPTAKRLKPCLPHVNPDYLVPNGSGRPEF

SEQ ID NO: 83895 - protein, 161 aa, Setaria italica
  Transcript Sequence Number=SeqID_17921
  Gene Ontology: Mol. function=DNA binding; Cellular component=nucleus; Biological process=regulation of transcription, DNA-dependent
  Homolog annotation: Hit_ID=Q8S985; Match level="QueryCoverage=78%, HitCoverage=17%, E-value=1e-36, Identity=68%"; Hit description=Auxin response factor 15
MIYIHKTPRITNRPWKPGSSGHIAYQPTLHLRAPTRPAMFGHDGGIGGTEQSLMLQPHHDSGEVRNRHVTVEKFHSTVAARKDGPDNREVNTNSCKIFGISLTEKVPANKEKDSGDVNYPSPFLSLKQQVPKSLGNSCATVHEQRPVVGRVIDVSTMDMMI

SEQ ID NO: 83896 - protein, 449 aa, Setaria italica
  misc_feature (419)..(419): Xaa can be any naturally occurring amino acid
  misc_feature (433)..(433): Xaa can be any naturally occurring amino acid
  misc_feature (441)..(441): Xaa can be any naturally occurring amino acid
  Transcript Sequence Number=SeqID_17922
  Gene Ontology: Mol. function=1-deoxy-D-xylulose-5-phosphate reductoisomerase activity; Cellular component=chloroplast; Biological process=isoprenoid biosynthetic process
  Homolog annotation: Hit_ID=Q8W250; Match level="QueryCoverage=100%, HitCoverage=95%, E-value=0.0, Identity=92%"; Hit description=1-deoxy- D-xylulose 5-phosphate reductoisomerase, chloroplastic
  Pfam annotation: Domain name=DXP_redisom_C; Domain location=220-303; Score=210.1; E_value=5.7e-60; Accession=PF08436.4; Description=1 -deoxy-D-xylulose 5-phosphate reductoi
  Pfam annotation: Domain name=DXP_reductoisom; Domain location=78-206; Score=257.1; E_value=4e-74; Accession=PF02670.8; Description=1-deoxy -D-xylulose 5-phosphate reductoisomerase
  Pfam annotation: Domain name=NAD_binding_3; Domain location=85-223; Score=-9.1; E_value=0.049; Accession=PF03447.8; Description =Homoserine dehydrogenase, NAD binding domain
  Pfam module annotation: Pfam domain module=DXP_redisom_C::DXP _reductoisom::NAD_binding_3; Domain location=220-303::78-206::85-223
  Subcellular localization annotation: CTP_CleavageSite=48; ConfidenceScore=5.24e-01
MAALKASFPGELSAVSFLDSSRGPFGQHKVDFTFQRKGKRAISLRRTCCSMQQAPPPAWPGRAVAEPGRRSWDGPKPISIVGSTGSIGTQTLDIVAENPDKFRVVALAAGSNVTLLADQVKTFKPKLVAVRNESLVDELKEAIADCEEKPEIIPGEQGVIEVARHPDAVTVVTGIVGCAGLKPTVAAIEAGKDIALANKETLIAGGPFVLPLAHKHKVKILPADSEHSAIFQCIQGLSEGALRRVILTASGGAFRDWPVDKLKDVKVADALKHPNWNMGKKITVDSATLFNKGLEVIEAHYLFGAEYDDIEIVIHPQSIIHSMVETQDSSVLAQLGWPDMRIPILYTLSWPDRIYCSEVTWPRLDLCKLGSLTFKAPDNVKYPSMDLAYAAGRAGGTMTGVLSAANEKAVELFIDERLXYLDIFKVVERTCDXHRNELVTXPSLEDIIH

SEQ ID NO: 83897 - protein, 106 aa, Setaria italica
  misc_feature (18)..(18): Xaa can be any naturally occurring amino acid
  misc_feature (47)..(47): Xaa can be any naturally occurring amino acid
  Transcript Sequence Number=SeqID_17923
  Gene Ontology: Mol. function=protein tyrosine kinase activity; Cellular component=integral to membrane; Biological process=protein amino acid phosphorylation
MFKSKIGRVPQKLGEPNXKEVAEIKESHENNVGKGSHVFLTQRRSMXLKMPTSAASNVVYDARDGQKSDSSMAAAPGVVTVKPKEHVIDMKKADNLVEEQLHPMQT

SEQ ID NO: 83898 - protein, 51 aa, Setaria italica
  Transcript Sequence Number=SeqID_17924
RIQIHAPQELHNGIRCGQTTDIQRSTGFMKDENNSIHSLVMKTLVSQYSLL

SEQ ID NO: 83899 - protein, 781 aa, Setaria italica
  Transcript Sequence Number=SeqID_17925
  Gene Ontology: Mol. function=protein tyrosine kinase activity; Cellular component=integral to membrane; Biological process=protein amino acid phosphorylation
  Homolog annotation: Hit_ID=B9RW50; Match level="QueryCoverage=94%, HitCoverage=93%, E-value=1e-149, Identity=42%"; Hit description=Lrr receptor-linked protein kinase, putative
  Pfam annotation: Domain name=LRRNT_2; Domain location=36-76; Score =24.0; E_value=0.00063; Accession=PF08263.4; Description=Leucine rich repeat N-terminal domain
  Pfam annotation: Domain name=LRR_1; Domain location=103-122; Score =13.4; E_value=0.84; Accession=PF00560.25; Description=Leucine Rich Repeat
  Pfam annotation: Domain name=LRR_1; Domain location=125-147; Score =7.8; E_value=9.8; Accession=PF00560.25; Description=Leucine Rich Repeat
  Pfam annotation: Domain name=LRR_1; Domain location=149-171; Score =10.3; E_value=3.3; Accession=PF00560.25; Description=Leucine Rich Repeat
  Pfam annotation: Domain name=LRR_1; Domain location=173-195; Score =14.3; E_value=0.5; Accession=PF00560.25; Description=Leucine Rich Repeat
  Pfam annotation: Domain name=LRR_1; Domain location=197-218; Score =12.7; E_value=1.1; Accession=PF00560.25; Description=Leucine Rich Repeat
  Pfam annotation: Domain name=LRR_1; Domain location=219-241; Score =5.1; E_value=32; Accession=PF00560.25; Description=Leucine Rich Repeat
  Pfam annotation: Domain name=LRR_1; Domain location=79-101; Score =3.8; E_value=56; Accession=PF00560.25; Description=Leucine Rich Repeat
  Pfam annotation: Domain name=Pkinase; Domain location=503-769; Score =10.5; E_value=4.1e-09; Accession=PF00069.17; Description=Protein kinase domain
  Pfam annotation: Domain name=Pkinase_Tyr; Domain location=498-769; Score=2.5; E_value=6.8e-14; Accession=PF07714.9; Description=Protein tyrosine kinase
  Pfam module annotation: Pfam domain module=LRRNT_2::LRR_1::LRR_1::LRR_ 1::LRR_1::LRR_1::LRR_1::LRR_1::Pkinase::Pkinase_Tyr; Domain location =36-76::103-122::125-147::149-171::173-195::197-218::219-241::79 -101::503-769::498-769
MSKPARVLRVSPPPLVASAAILLLLSALPCCQPYTYEQDVFAINGLYTALGAPQLPNWTTNGGDPCNEGWQGVSCVASNITSIILSGASLGGQLGNTLGNFTSLITLDLSNNNIGGTIPDGLPVTMQKFFLSANQLSGSLPSTLSSLTLLTSMSLNNNQLSGDIPDVFLALTGLANLDFSSNNLTGPLPPSMGNLTALTSLHIQNNQLTGTLDVLQDLPFQDLNIENNLFSGPVPVKLLNLPNFKKDGNPFNTSIAPSAQPPAAPTPLPSVSPPARHVPTKEPSTSSSVPGGSTPGSGKHTVSTIKLVGYILTGVVSAVVIVLMAMYCLSKCKERKSRDDIYTKSKIGRVPQKLGEPKIKEVAEIKESPVKHENNVGKGSHVISDAKEEHRLKMPTSAASNVVYDARDGQKSDSSMAAAPGVVTVKPKEHVIDMKKADNLVEEQLHPMQPVALRTEKVIVNPSVRTRKGRVPSVGKVDLTSTVKSFSIASLQQYTNSFSEENFIRDSRFGKVYLAELPDGELLEVLAIDAFNSKVPVDAFLELVVSISELRHPNILGLVGYCAEFEQRLLVYEHCSKMTLHDELHYLDDSSKPLSWNARLQVAVGAAKALQHLHDGCQPPIVHQNFEPSVVLLNSTLVVHISESGLASLASKSVSQLSGRTLFHYEAPEVHESGSVSDRSDVYSFGVVMLELLTGRKPYDSSRPRAEQHLVRWATSQLYDIDAIAKMVDPSIQGQCSEKALSRFADIISRCIQHEPEFRPPMSEVVQDLTRMVSNASKASM

SEQ ID NO: 83900 - protein, 153 aa, Setaria italica
  misc_feature (50)..(50): Xaa can be any naturally occurring amino acid
  Transcript Sequence Number=SeqID_17926
DLLADPCSSLWAEASNSVGDDWSMFDEQTPIKHCTDFEFQFCDIGVKIEXDIIVKDFEEGKETLQAKRRRMLQFCPENIEMTCPITDGGLSESLQVMDFQGANCLLNSDGTDELPEEWLVNCSQDSEPHLPAEEMTSPATAVEKVKRYLCASE

SEQ ID NO: 83901 - protein, 183 aa, Setaria italica
  misc_feature (41)..(41): Xaa can be any naturally occurring amino acid
  Transcript Sequence Number=SeqID_17927
  Gene Ontology: Mol. function=DNA binding; Biological process =regulation of transcription
  Homolog annotation: Hit_ID=B9RHS2; Match level="QueryCoverage=75%, HitCoverage=26%, E-value=3e-31, Identity=56%"; Hit description =Transcription factor, putative
  Pfam annotation: Domain name=Myb_DNA-binding; Domain location=13-65; Score=35.4; E_value=2.2e-07; Accession=PF00249.23; Description=Myb -like DNA-binding domain
KFNLDLKHVTKTRLRWTLELHERFVEAVNKLGGPEKATPKXGALKLMKVEGLTIYHVKSHLQKYRFAKYLPETKEDKKSSSEGKKSQSAIPGNDAGKKSLQVAEALRVQIEVQKQLHEQLEVQRQLQLRIEEHARYLQKILEEQQKARNSLSTTRNSAQEELPESTEKEETGMKVETSSSSPT

SEQ ID NO: 83902 - protein, 126 aa, Setaria italica
  Transcript Sequence Number=SeqID_17928
  Homolog annotation: Hit_ID=Q7DM36; Match level="QueryCoverage=100%, HitCoverage=23%, E-value=2e-32, Identity=58%"; Hit description=H1flk (Fragment)
RFERVTRSLKVTRFFSTLVEELKAIGPSSRDDSPRNDVMVPVAHCNRSPVLLLMGGGMGAGKSTVLKDILKEAFWSGASANSVVVEADAFKETDVIYRAISSRGHHNDMLRTAELASMTHNDDAGA

SEQ ID NO: 83903 - protein, 76 aa, Setaria italica
  Transcript Sequence Number=SeqID_17929
WLGFLDATADSISSSVAACVEHLFYYPSVASKSPEYWKLLVELKSPLHLPRKPHPLTTCSCMLVRSPSEHSVSVRS

SEQ ID NO: 83904 - protein, 69 aa, Setaria italica
  misc_feature (60)..(60): Xaa can be any naturally occurring amino acid
  Transcript Sequence Number=SeqID_17930
  Gene Ontology: Mol. function=inositol or phosphatidylinositol phosphatase activity
  Homolog annotation: Hit_ID=Q10HI4; Match level="QueryCoverage=46%, HitCoverage=11%, E-value=2e-10, Identity=90%"; Hit description =Inositol monophosphatase 3, putative, expressed
IHLGHLAIPINPVSSTRQIERPPHHRRHLRRRLSLLNDRINKLLYKIRSIRMCGSLALNXCGVACGRLD

SEQ ID NO: 83905 - protein, 47 aa, Setaria italica
  Transcript Sequence Number=SeqID_17931
  Gene Ontology: Mol. function=inositol or phosphatidylinositol phosphatase activity
  Homolog annotation: Hit_ID=Q10HI4; Match level="QueryCoverage=74%, HitCoverage=12%, E-value=1e-09, Identity=91%"; Hit description =Inositol monophosphatase 3, putative, expressed
LFTAVRGKGAFLNGSPIKASSQDELVKALLVTEAGTKRDKTTVDDTT

SEQ ID NO: 83906 - protein, 111 aa, Setaria italica
  Transcript Sequence Number=SeqID_17932
SHLTTCSCMLVRSPSEHSVSVRPVLAIYISYTSKIAVQQLIIEHPHCFNWRSQARLPNKSNFNLGCLLCFLNAYVAGNKKNQPYHPPLHPLHQEQDSEQFVKGSQSTDHRN

SEQ ID NO: 83907 - protein, 193 aa, Setaria italica
  misc_feature (176)..(176): Xaa can be any naturally occurring amino acid
  Transcript Sequence Number=SeqID_17933
SHLTTCSCMLVRSPSEHSVSVRPVLAIYISYTSKIAVQQLIIEHPTEVAMLEREEIKQILVTSLLCNIPHCFNWRSQARLPNKSNFNLGCLLCFLNAYVAGTKKTALSPSPASPASGTRQRAVRERITVYRSQELEGEQHRTIHVTISLPKSSKITIKLRSYDLFWENLEWQLANXSLTPSRMESPFLFIQKG

SEQ ID NO: 83908 - protein, 267 aa, Setaria italica
  Transcript Sequence Number=SeqID_17934
  Gene Ontology: Mol. function=inositol or phosphatidylinositol phosphatase activity; Cellular component=cytoplasm; Biological process=phosphatidylinositol biosynthetic process
  Homolog annotation: Hit_ID=Q10HI4; Match level="QueryCoverage=100%, HitCoverage=100%, E-value=1e-124, Identity=79%"; Hit description =Inositol monophosphatase 3, putative, expressed
  Pfam annotation: Domain name=Inositol_P; Domain location=2-265; Score= 366.2; E_value=6.1e-107; Accession=PF00459.17; Description=Inositol monophosphatase family
MSEEQFLAVAEEAAKNAGEIIRKGFYQTKNVEHKGQVDLVTETDKACEDLIFNHLRKHFPDHKFIGEETSAALGATADLTDDPTWIVDPLDGTTNFVHGFPFVCVSIGLTIRKIPTLGVVYNPIMNELFTAVRGKGAFLNGSPIKASSQDELVKALLVTEAGTKRDKTTVDDTTNRINKLLYKIRSIRMCGSLALNMCGVACGRLDLCYEMGFGGPWDVAAGAVILQEAGGHVFDPSGGEFDLMSRRMAGSNGLLKDKFVKELGDTN

SEQ ID NO: 83909 - protein, 150 aa, Setaria italica
  Transcript Sequence Number=SeqID_17935
  Gene Ontology: Mol. function=protein binding
  Homolog annotation: Hit_ID=Q2QNU9; Match level="QueryCoverage=99%, HitCoverage=30%, E-value=4e-54, Identity=71%"; Hit description =Leucine Rich Repeat family protein, expressed
LSALEELRHLEMRCLVRITGIGITSIAIGCTSLVELDLKRCYSVDDAGLWALSRYSQNLRQLTISYCQITGLGLCHLLGSLRCLQDVKMVHLSWVSIEGFEMALRASCGRLKKLKLLGGLQSVLSPELLQMLQACGCRIRWVDKRLVYKG

SEQ ID NO: 83910 - protein, 543 aa, Setaria italica
  misc_feature (152)..(152): Xaa can be any naturally occurring amino acid
  misc_feature (465)..(465): Xaa can be any naturally occurring amino acid
  Transcript Sequence Number=SeqID_17936
  Gene Ontology: Mol. function=magnesium ion binding; Biological process=metabolic process
  Homolog annotation: Hit_ID=B6SPA6; Match level="QueryCoverage=97%, HitCoverage=98%, E-value=0.0, Identity=70%"; Hit description=Terpene synthase 7
  Pfam annotation: Domain name=Terpene_synth; Domain location=22-209; Score=209.3; E_value=1e-59; Accession=PF01397.13; Description =Terpene synthase, N-terminal domain
  Pfam annotation: Domain name=Terpene_synth_C; Domain location=222 -489; Score=323.5; E_value=4.2e-94; Accession=PF03936.8; Description =Terpene synthase family, metal binding domain
  Pfam module annotation: Pfam domain module=Terpene_synth::Terpene _synth_C; Domain location=22-209::222-489
MALISAATSCWKAAPEVHPSVWGDFFINYIPEPLQISDEEMLDRVNQLKGEVSGLFEACKNVVEKMDLVDVLQHLGIDHHFKEQIATTLSSIHRGEFNSSSLHEVALRFRLLRQHGFWVSAGEFNKFKHEDGSFINDITNDPKGLLSLYNAXYLLTHDEGALEEALLFARRHLELMKSSLKSPLAEQVERALKIPLPRTLKRVEAVSYIPEYSGEQRYNPAILELAKLDFNLLQRLHQKELKTISQWWKDLSEDIKLEYVRDRIVECYFWAYSVYYEQEYARARMILARLFVLTSLLDDTYDDHATLEECRELTKAIERWDESDISLLPEYIKKLFLKVIRNFKEFEDELEAHEKYRIAYARKGFQLISKSYLQEAEWSHHNYIPSFNDHVNVSTISAGAQLLCVGLLVGMGDVATKEAFEWTIGNNDAIRACAEVFRFMDDMADFKRGRNKMDVATSVECYIKXHNVSAEVALAKFFPFVDDAWKTLNHAIFEHHALLPVLQRVTNLAMSMMLVFLDQRDGYTNSKELKETLKSQFVKHVPL

SEQ ID NO: 83911 - protein, 69 aa, Setaria italica
  Transcript Sequence Number=SeqID_17937
  Subcellular localization annotation: CTP_CleavageSite=52; ConfidenceScore=5.68e-01
MESLAAASVFSPSRVAAPAAGALVRAGAVVSAGMRRRSGRSGGMRCRAVTPLASAVMSRGAVAAKAAEE

SEQ ID NO: 83912 - protein, 89 aa, Setaria italica
  Transcript Sequence Number=SeqID_17938
  Homolog annotation: Hit_ID=Q6YYC3; Match level="QueryCoverage=96%, HitCoverage=36%, E-value=1e-25, Identity=72%"; Hit description=RNA polymerase II complex component SRB7 protein-like
APALDLAEQPKAMSHALVLAAKKFDALVAALPLSSEEDQLKRIQELQAENEVVGLELQKQLEAAELELKQVEVLFNEATDNCINLKKPE

SEQ ID NO: 83913 - protein, 68 aa, Setaria italica
  misc_feature (34)..(34): Xaa can be any naturally occurring amino acid
  Transcript Sequence Number=SeqID_17939
FIVRAVEHKCTTDIIVFALPSNYKCIHCSGEKKXCICCHKQRSTGTLVPCSSLCYFLSCHNRLSIFQS

SEQ ID NO: 83914 - protein, 80 aa, Setaria italica
  Transcript Sequence Number=SeqID_17940
MGQCPCFGSAQAAEQERRAEADRHESQDARAKAAEAAQRRQEEFDKSAAGRAAKAQMKAMKESKTTSNQGEPVLKWQMGS

SEQ ID NO: 83915 - protein, 189 aa, Setaria italica
  misc_feature (161)..(161): Xaa can be any naturally occurring amino acid
  Transcript Sequence Number=SeqID_17941
  Gene Ontology: Mol. function=hydrolase activity, hydrolyzing O -glycosyl compounds; Cellular component=extracellular region; Biological process=carbohydrate metabolic process
  Homolog annotation: Hit_ID=Q0IQJ7; Match level="QueryCoverage=99%, HitCoverage=50%, E-value=2e-84, Identity=79%"; Hit description =Mannan endo-1,4-beta-mannosidase 8
PFNDGGYRALQLKPFSYDEEVFQALDFVISEARKHKMRLILSLCNNWKDYGGKSQYIRWGKEAGLDLTSDDDFFTDPTIKSYYKAFVKAVLTRINSITNEAYKDDPTILAWELINEPRCHSDPSGDTLQAWIEEMASYVKSIDPVHLLEIGVEGFYGPSTXELLHVNPDAYSGTVGTDFIRNHRALGID

SEQ ID NO: 83916 - protein, 614 aa, Setaria italica
  Transcript Sequence Number=SeqID_17942
  Gene Ontology: Mol. function=ubiquitin-protein ligase activity; Cellular component=ubiquitin ligase complex; Biological process =ubiquitin-dependent protein catabolic process
  Homolog annotation: Hit_ID=C3SA81; Match level="QueryCoverage=99%, HitCoverage=56%, E-value=0.0, Identity=81%"; Hit description=Beta -catenin repeat family protein
  Pfam annotation: Domain name=Arm; Domain location=261-301; Score=7.6; E_value=1.3; Accession=PF00514.15; Description=Armadillobeta-catenin -like repeat
  Pfam annotation: Domain name=Arm; Domain location=302-342; Score=8.9; E_value=0.9; Accession=PF00514.15; Description=Armadillobeta-catenin -like repeat
  Pfam annotation: Domain name=Arm; Domain location=387-427; Score=9.0; E_value=0.87; Accession=PF00514.15; Description=Armadillobeta-catenin- like repeat
  Pfam annotation: Domain name=Arm; Domain location=428-467; Score =12.8; E_value=0.29; Accession=PF00514.15; Description=Armadillobeta -catenin-like repeat
  Pfam annotation: Domain name=Arm; Domain location=468-513; Score=9.8; E_value=0.69; Accession=PF00514.15; Description=Armadillobeta-catenin- like repeat
  Pfam annotation: Domain name=U-box; Domain location=153-229; Score =32.9; E_value=1.6e-07; Accession=PF04564.7; Description=U-box domain
  Pfam module annotation: Pfam domain module=Arm::Arm::Arm::Arm::Arm::U- box; Domain location=261-301::302-342::387-427::428-467::468-513::153- 229
TLHVMEYLAANVDLAKDLVAKCSAAAQRLMDDDLLGITEDLDNVIKNISNELSRIPVSTFTSSRFAEPAVSGHLQVVRNRHDLYDQRSCDGYSEGDMSMVVSMERPRRRTLHNSDMPRLVDFLQGMYQESHEFGGQSFSSLPEVAEYVEPLYDSFFCPLTNKVMVDPVTTESSVTYDRRAIEDYFEKFTDSSEPVICPVTKTAMQSKTLRSNIPLKSTIAEWIMRNEATRIRIARTALSMATTEAMVLEAIHELKVLARLRRKNRDQMHKIGITKFLARLLDHKDALIRCDSLDLLCLLVEDDAGKEIIAKTRAVSRTIKLLSSSSTDERHAAISFLVELSKSELLLENIGSTAGSILILTTMKFNGSDDPIAAEKAGEVLKNLEKLPKNIKYMAESGYLDPLQRHLVEGSEDVQIEMVSYLGELIQKQEMTINIAGSASEILIKMVRSGNTAIRKAALDVLVQISSHHPNGKTLVDAGAVPVMVEELFIRKIDEEPMGSKTEAAAVLANIVESGLDPEAIVVNKEGHVITSKYSVYNFAHMLKCSMPDTLNLSIVRVLLALTALPKPLATVVSVMKEQDSSQTVIELMGSLSESLGIAATRLLIAFVPRIVGH

SEQ ID NO: 83917 - protein, 308 aa, Setaria italica
  Transcript Sequence Number=SeqID_17943
  Gene Ontology: Mol. function=ubiquitin-protein ligase activity; Cellular component=ubiquitin ligase complex; Biological process =ubiquitin-dependent protein catabolic process
  Homolog annotation: Hit_ID=B6SVK1; Match level="QueryCoverage=95%, HitCoverage=44%, E-value=1e-136, Identity=84%"; Hit description =Ubiquitin-protein ligase
  Pfam annotation: Domain name=Arm; Domain location=143-185; Score =13.9; E_value=0.21; Accession=PF00514.15; Description=Armadillobeta -catenin-like repeat
  Pfam annotation: Domain name=Arm; Domain location=239-280; Score =22.3; E_value=0.002; Accession=PF00514.15; Description=Armadillobeta- catenin-like repeat
  Pfam module annotation: Pfam domain module=Arm::Arm; Domain location =143-185::239-280
ERLGERGERKQHAHNAVIELMGSLSESLGIAATRLLIALSPHMGHTIAEKLCKAPGQPGKLVKSIGLNGRISERHAVLATLLAKLPYQHIALNLALLNRGAVATALAKIDEMQCGETRASRHAKAYMEGLVGTLVRLTTTLYDPDVLLAAMNHNLTSVLTDLLVRSAGSDEVQRLAAVGLENLSSQTHNLSQPPAEERRPKKKNILQRLREAHAAGRVHDNRRPPAHSRVCPVHRGVCSPSTTFCLVEAGAVEGLLCVLESNESGRVVEAALGALCTLMDDAVDVTSGVAVLAEHDAARHVLAGGGSH

SEQ ID NO: 83918 - protein, 49 aa, Setaria italica
  Transcript Sequence Number=SeqID_17944
LLVSMVHGTIPSAVRSSACSFQHSIIDQSATRAHPFDVVRVGKGVRESK

SEQ ID NO: 83919 - protein, 121 aa, Setaria italica
  Transcript Sequence Number=SeqID_17945
  Gene Ontology: Mol. function=electron carrier activity; Cellular component=extracellular region; Biological process=hydrogen peroxide catabolic process
  Homolog annotation: Hit_ID=B6THG0; Match level="QueryCoverage=68%, HitCoverage=22%, E-value=7e-36, Identity=85%"; Hit description =Peroxidase 12
  Pfam annotation: Domain name=peroxidase; Domain location=54-119; Score=-102.3; E_value=0.052; Accession=PF00141.15; Description =Peroxidase
MAGSTAGPAALLPLVAVIALLMTAPAAAARYPPLAPGLSFDFYKKSCPKAESIVRDYLTSAIRSNVGLAAALIRLHFHDCFVQGCDASILLDSTPTQKSERDAFPNQTLRPAAFKAVNDIR

SEQ ID NO: 83920 - protein, 67 aa, Setaria italica
  Transcript Sequence Number=SeqID_17946
  Subcellular localization annotation: CTP_CleavageSite=52; ConfidenceScore=5.68e-01
QQSSIIRNATNSSHCKKVLSRSRYFPTSRSVFPSHHTLVNFTYHPFSYRCLKLQPVSNNLCRSRTAN

SEQ ID NO: 83921 - protein, 205 aa, Setaria italica
  Transcript Sequence Number=SeqID_17947
  Gene Ontology: Mol. function=metal ion binding
  Homolog annotation: Hit_ID=B6TYP6; Match level="QueryCoverage=100%, HitCoverage=80%, E-value=1e-79, Identity=71%"; Hit description=PHD finger protein
  Pfam annotation: Domain name=C1_3; Domain location=150-180; Score =8.2; E_value=0.063; Accession=PF07649.4; Description=C1-like domain
  Pfam annotation: Domain name=PHD; Domain location=151-201; Score =49.1; E_value=1.7e-11; Accession=PF00628.21; Description=PHD-finger
  Pfam module annotation: Pfam domain module=C1_3::PHD; Domain location= 150-180::151-201
LCLYGYPNETWEVTLPAEEVPPEIPEPALGINFARDGMNEKDWLALVAVHSDSWLLSVAFYFGARFGFDKEARRRLFSMINNMPTIFEVVTGSAKKQTKEKTPNSSSKSNKPSSKVQSRAEARSKAKVPKDEEESGDDDGDEEAEEHDNTLCGTCGTNDGKDQFWICCDNCEKWYHGKCVKITPARAEHIKQYKCPDCTNKRARV

SEQ ID NO: 83922 - protein, 176 aa, Setaria italica
  Transcript Sequence Number=SeqID_17948
  Gene Ontology: Mol. function=catalytic activity; Biological process =cellular metabolic process
  Homolog annotation: Hit_ID=B9R8T7; Match level="QueryCoverage=99%, HitCoverage=55%, E-value=2e-54, Identity=58%"; Hit description =Cinnamoyl-CoA reductase, putative
MDEASWSDVEFCRSTQNWYCLSKTLAELEAFDYAKRTGLDVVSVCPSLVIGPLLQSTVNASSSVIVDCLEGDREVKLKLRNFVDVRDVADALLLVYEAPEASGRYICDAHARQVSDVVELLKGWYPTYKHATKFLQVSDEPLFSSKKLEALGWKFRPFEETLRDSVESFREAGVLD

SEQ ID NO: 83923 - protein, 102 aa, Setaria italica
  Transcript Sequence Number=SeqID_17949
  Subcellular localization annotation: CTP_CleavageSite=49; ConfidenceScore=5.84e-01
HSSAVSQWPAVTFVGGRRRCWRSCGTTWWPGLTRRRGSRSSARPPPPARSSSTKVARFSTTSCYGSSLEQNSIKIHEAPMQTDLMSNDGLSQLVQICLKDGS

SEQ ID NO: 83924 - protein, 191 aa, Setaria italica
  Transcript Sequence Number=SeqID_17950
  Gene Ontology: Mol. function=binding
IFSIEGQDESSPLYDFRFMLPMLSQITMEADGCRTLASFGGHKAVIDCLVKMTEQDGIDNGSMFLACDTIINFMSNRKSVNIPVDSCFIRLLKALVTWAGTTNASSVTMTASCLCAMLIDLTSEEFLLSCSDFDTKTLGSLSELIVRSLQQDVPDDDGEQFNQKQMIVSGYRRWANRFPHVKNVVEQHVSL

SEQ ID NO: 83925 - protein, 70 aa, Setaria italica
  Transcript Sequence Number=SeqID_17951
  Gene Ontology: Mol. function=oxidoreductase activity; Biological process=metabolic process
  Homolog annotation: Hit_ID=B6T3T7; Match level="QueryCoverage=70%, HitCoverage=15%, E-value=1e-18, Identity=91%"; Hit description =Carbonyl reductase 3
SRETYDAAKKGLQTNYYGTKHVIEALLPLLQASSNGRIVNVSSDFGLLRVTSFDHALFQIPIQRQRIIIS

SEQ ID NO: 83926 - protein, 311 aa, Setaria italica
  Transcript Sequence Number=SeqID_17952
  Gene Ontology: Mol. function=oxidoreductase activity; Biological process=oxidation reduction
  Homolog annotation: Hit_ID=B6T3T7; Match level="QueryCoverage=100%, HitCoverage=100%, E-value=1e-124, Identity=74%"; Hit description =Carbonyl reductase 3
  Pfam annotation: Domain name=Epimerase; Domain location=16-221; Score= -57.2; E_value=0.0074; Accession=PF01370.13; Description=NAD dependent epimerasedehydratase family
  Pfam annotation: Domain name=KR; Domain location=17-172; Score=-88.1; E_value=0.056; Accession=PF08659.2; Description=KR domain
  Pfam annotation: Domain name=adh_short; Domain location=14-192; Score= 34.7; E_value=7.2e-08; Accession=PF00106.17; Description=short chain dehydrogenase
  Pfam module annotation: Pfam domain module=Epimerase::KR::adh_short; Domain location=16-221::17-172::14-192
MEGGISSFPVPSTRIAVVTGGNKGIGLEVCRQLAVNGVTVVLTARDETRGGAAVEKLGELGLSSVIFHQLDITDASSIARLADFLKIRFGRLDILINNAAFGGVEYNRDPAYASVTSEEELCGMDRDQRLEWLWRNSRETYDAAKKGLQTNYYGTKHVIEALLPLLQASSNGRIVNVSSDFGLLRFFRNEELKQELNNVGNLTEERLDELLDTFLKDFEAGKADARGWPVAFAAYKVAKAAMNAYSRILAAKEPGLRVNCVHPGYIKTDITMHSGLLTPEEGGSRVAKVALLPEGGVTGAFFEDGEEASFV

SEQ ID NO: 83927 - protein, 708 aa, Setaria italica
  Transcript Sequence Number=SeqID_17953
  Gene Ontology: Mol. function=microtubule motor activity; Cellular component=microtubule associated complex; Biological process =microtubule-based movement
  Homolog annotation: Hit_ID=B6SXM5; Match level="QueryCoverage=100%, HitCoverage=87%, E-value=0.0, Identity=76%"; Hit description=ATP binding protein
  Pfam annotation: Domain name=Kinesin; Domain location=98-429; Score =428.2; E_value=1.3e-125; Accession=PF00225.15; Description=Kinesin motor domain
DGFYSPELRGEFGAGLLDLHAMDDSELLSENVASEPFEPSPFMPKECIRALDNDEDDVIPESQQGLADNRSSAFTSEKENTTVGARESNVAKIKVVVRKRPLNKKEVSRKEEDIIDVHNSQFLTVHEPKLKVDLTAYVEKHEFCFDAVLDEYVSNDEVYRETVEPIIPIIFQRTKATCFAYGQTGSGKTYTMQPLPLRAAHDMVRLLHQPMYRNQHFKLWLSYFEIYGGKLFDLLSERRQLLMREDGKKQVCIVGLQEFEVSDVQIVKEYIEKGNAARSTGTTGANEESSRSHAILQLAVKKHIPVTDTRRQRDRDAIEAKNTKLVGKMSFIDLAGSERGADTTDNDKQTRIEGAEINKSLLALKECIRALDNDQIHIPFRGSKLTEVLRDSFVGNSRTVMISCISPSSGSCEHTLNTLRYADRVKSLSKGGNTKKEQLTVQSVASGKESTYNSYPLSGEAEENMEQTQETRPVDGSRKGVDNFISNSSMEPERNSFSMIPSYQHRGKDEMSSRSSLNDRERGDLKPSQACFTSKTQSLQDSVNSQEDVKITKVSPPRRKANRDDKSERQSNFVKKESGPEISRTVLKQQHQFKQQQLQRPSSTSAPQVSSKQSEKEDMEINAILEEEEALIAAHRKEIENTMEIVREEMNLLAEVDQPGSLIDNYVAQLSFLLSRKASGLVSLQARLARFQQRLKEQEILSRQKTSR

SEQ ID NO: 83928 - protein, 72 aa, Setaria italica
  Transcript Sequence Number=SeqID_17954
VTGSTQTLVCMSNNIKCKTESRENIRICHESKMYACTGHTKIAYQAYCMPITELIYYNAGYMLNAGNTEQQN

SEQ ID NO: 83929 - protein, 325 aa, Setaria italica
  misc_feature (256)..(256): Xaa can be any naturally occurring amino acid
  misc_feature (306)..(306): Xaa can be any naturally occurring amino acid
  Transcript Sequence Number=SeqID_17955
  Gene Ontology: Mol. function=transporter activity; Cellular component= membrane; Biological process=transport
  Homolog annotation: Hit_ID=B6TEJ2; Match level="QueryCoverage=100%, HitCoverage=60%, E-value=1e-151, Identity=80%"; Hit description =Permease I
  Pfam annotation: Domain name=Xan_ur_permease; Domain location=1-325; Score=-2.9; E_value=6.2e-08; Accession=PF00860.12; Description =Permease family
GINTLCQSFFGTRLPAVMGGSYTVVAPTISIIMAGRYSNETDPHQKFLRTMRGTQGALIIASTIQIILGFSGLWRNVVRFLSPLSAVPLISLAGFGLYELGFPGVAKCVEIGLPEIILMLIFSQYLPHAIHVAKPVFDRFSVIFTIAIVWLYAYILTASGAYKNARTKTQVHCRVDRSGLISGAPWINVPYPFQWGAPTFDAGECFAMMMASFIALVESTGTFIAVSRYASATMIPPSVLGRGIGWQGIGTLLGAXFFGTANGTAVSVENAGLLALTHVGSRRVVQISAGFMIFFSILGKFGAIFXASIPLPIFAALYCIFFAYI

SEQ ID NO: 83930 - protein, 159 aa, Setaria italica
  Transcript Sequence Number=SeqID_17956
  Gene Ontology: Mol. function=binding; Cellular component=nucleus
  Homolog annotation: Hit_ID=Q6F2D9; Match level="QueryCoverage=88%, HitCoverage=32%, E-value=7e-34, Identity=56%"; Hit description =T24P13.14, putative
DEMSRRHAIGLARSRDGIRWTKIGKVLEGGRAGSFDECGVRHGHVVRDRAAGRYVMVYDGVDADGKVSIGMAVSEDGLKGWRRSSEMPVLCPSEEGEGWDGAGVGSPYLVQMDGAYDWRLYYMGVGRNGEASIGMAYSEGQALQKFEKCDAVPTISKGK

SEQ ID NO: 83931 - protein, 105 aa, Setaria italica
  Transcript Sequence Number=SeqID_17957
  Subcellular localization annotation: CTP_CleavageSite=51; ConfidenceScore=5.74e-01
MPPSPSSTGAGAASPSPSASASASDPTPSWWESVSQARSRIQTLSSILPPAASQDVAALADSDRPARALLRSPAAYSALSDALRAGGGADDPACHWLYDTLLSAD

SEQ ID NO: 83932 - protein, 101 aa, Setaria italica
  Transcript Sequence Number=SeqID_17958
SQCDHKARRIVSTHTKSLLSQECYIDERGTCSNDVGMPNTRAPGGTKHQLSMRPRNLSSCSCGTPSKMGSPRLERRRKPEGRRLACAGGWSQCASFLFPLP

SEQ ID NO: 83933 - protein, 62 aa, Setaria italica
  Transcript Sequence Number=SeqID_17959
FSISVASLVNASVYIQYNEYFFAKNQRILVVSTTLKFVDEDFDTLVCLADMIFPLMFVFISH

SEQ ID NO: 83934 - protein, 105 aa, Setaria italica
  Transcript Sequence Number=SeqID_17960
AFRKISNKRKLLTCGAPCCTASSTAWYSMPFINIDERSFDFSGYDEINEKWDKFVDFTNNLVLLHSNSVSLNKWTRHGISYAGDVPFKLLVDPCHCCLKNTQSLI

SEQ ID NO: 83935 - protein, 89 aa, Setaria italica
  Transcript Sequence Number=SeqID_17961
PALGQRERHKRRGPSPRSHLNFGVSPCHLVASPCATKVQPGHGRTGHINFSFGHQNVVSTLALQAGSPQYKPRTYGKLLVVIQGKIAES

SEQ ID NO: 83936 - protein, 88 aa, Setaria italica
  Transcript Sequence Number=SeqID_17962
  Subcellular localization annotation: CTP_CleavageSite=57; ConfidenceScore=5.75e-01
PPPPVLPPALLFSQFSDCVASHSFFHFFCSHPPFNNSKGSCVRWARACSSLGRRDIAAREGSSASTHPEPSPNPTSPNPPLQHSPSPI

SEQ ID NO: 83937 - protein, 110 aa, Setaria italica
  Transcript Sequence Number=SeqID_17963
  Gene Ontology: Mol. function=ATP binding; Biological process=apoptosis
  Homolog annotation: Hit_ID=Q2R1P5; Match level="QueryCoverage=87%, HitCoverage=8%, E-value=1e-21, Identity=54%"; Hit description =Leucine Rich Repeat family protein, expressed
IKKRKAQLIFIKLQYEQILREVFPMQAQPAKQASKITTTTLDEEQIKKMINEAKQEVLRELQEGKPDKNQATGEPCQNQNVGFEEIAQKIKKIKWELKEQLKIKGIVDKN

SEQ ID NO: 83938 - protein, 86 aa, Setaria italica
  misc_feature (12)..(12): Xaa can be any naturally occurring amino acid
  Transcript Sequence Number=SeqID_17964
RVRGFDLLSGCXKEGNLELAAKVTDRLVELQPERAAGHLVLLSNMYAGVGQWEQAGMVRARVAALNAEKPAGRSWVNQNESSVVVA

SEQ ID NO: 83939 - protein, 55 aa, Setaria italica
  Transcript Sequence Number=SeqID_17965
  Gene Ontology: Mol. function=cysteine-type endopeptidase activity; Biological process=proteolysis
  Homolog annotation: Hit_ID=B4ESF4; Match level="QueryCoverage=69%, HitCoverage=9%, E-value=2e-12, Identity=81%"; Hit description=Papain- like cysteine proteinase
PAAGAVGAAAGGLRPGGTKYWIGKNSWSARWGDNGFVYVLRDSPPLGLCGLAVRP

SEQ ID NO: 83940 - protein, 48 aa, Setaria italica
  Transcript Sequence Number=SeqID_17966
LGLVLTLSLNRRGLGLTATATVSGYCINKDGCACLLDTGPLWAALSWY

SEQ ID NO: 83941 - protein, 51 aa, Setaria italica
  Transcript Sequence Number=SeqID_17967
  Gene Ontology: Mol. function=translation elongation factor activity; Cellular component=cytoplasm; Biological process=translational elongation
  Homolog annotation: Hit_ID=Q9LN13; Match level="QueryCoverage=92%, HitCoverage=58%, E-value=2e-18, Identity=97%"; Hit description =Elongation factor 1-alpha
ASPATMGKEKSHINIVVIGHVDSGKSTTTGHLIYKLGGIDKRVIERFEKEA

SEQ ID NO: 83942 - protein, 78 aa, Setaria italica
  Transcript Sequence Number=SeqID_17968
  Homolog annotation: Hit_ID=B4ESF4; Match level="QueryCoverage=97%, HitCoverage=18%, E-value=3e-18, Identity=69%"; Hit description =Papain-like cysteine proteinase
EFMAMYSSNDDDGPSSSSLSEETTVITTRAGPVHEGTAAVEEPPPRRTNLTAAVPPSVDWRAKGVVTAAKFQGVSCCK

SEQ ID NO: 83943 - protein, 44 aa, Setaria italica
  Transcript Sequence Number=SeqID_17969
GLAALGLMRPCGAPGLPYHLMTTPAAVHLHHVCVPPCILIIYNE

SEQ ID NO: 83944 - protein, 127 aa, Setaria italica
  Transcript Sequence Number=SeqID_17970
  Gene Ontology: Mol. function=cysteine-type endopeptidase activity; Biological process=proteolysis
  Homolog annotation: Hit_ID=B4ESF4; Match level="QueryCoverage=85%, HitCoverage=28%, E-value=5e-37, Identity=70%"; Hit description =Papain-like cysteine proteinase
  Pfam annotation: Domain name=Peptidase_C1; Domain location=1-127; Score=1.0; E_value=1.2e-11; Accession=PF00112.15; Description=Papain family cysteine protease
PPSVDWRAEGVVTPVGFNGWCSSCWAFVAAATIESAQAISTGDPPPVLSEQQLVDCDTLDKGCGGGWMDTAFKWVIQNGGITSAASYPYTDRNGTCQEGKPAEVVRLKSVLLSRSCPSRRRGGDHGG

SEQ ID NO: 83945 - protein, 58 aa, Setaria italica
  Transcript Sequence Number=SeqID_17971
GISATAPVPEPKPEPKPEPKPMPEPKPEPKPEPKPEPKPMPHPEPKPEPMPHPEPNLS

SEQ ID NO: 83946 - protein, 31 aa, Setaria italica
  misc_feature (12)..(12): Xaa can be any naturally occurring amino acid
  Transcript Sequence Number=SeqID_17972
TKPKPEPKPEPXPKPEPKPMPHPEPKPEPKP

SEQ ID NO: 83947 - protein, 54 aa, Setaria italica
  Transcript Sequence Number=SeqID_17973
  Gene Ontology: Mol. function=cysteine-type endopeptidase activity; Biological process=proteolysis
  Homolog annotation: Hit_ID=B4ESF4; Match level="QueryCoverage=90%, HitCoverage=12%, E-value=5e-14, Identity=73%"; Hit description =Papain-like cysteine proteinase
VRVTATMPGGTKYWIGKNSWSARWGDNGFVYVNYRDSPPLGLCGLAVRPSFPII

SEQ ID NO: 83948 - protein, 123 aa, Setaria italica
  Transcript Sequence Number=SeqID_17974
  Gene Ontology: Mol. function=cysteine-type endopeptidase activity; Cellular component=extracellular region; Biological process =proteolysis
  Homolog annotation: Hit_ID=B4ESF4; Match level="QueryCoverage=89%, HitCoverage=28%, E-value=3e-37, Identity=68%"; Hit description =Papain-like cysteine proteinase
  Pfam annotation: Domain name=Peptidase_C1; Domain location=3-123; Score=5.3; E_value=5.7e-12; Accession=PF00112.15; Description=Papain family cysteine protease
LIKCPYIPSASCWAFVAAATIESAQAISTGDPPPVLSEQQLVDCDTLDKGCGGGWMDTAFKWVIQNGGITSAAAYPYTDRNGTCQEGKPAEVTLSGYKRLPRGDEAAIMEAVARQPVAAACSR

SEQ ID NO: 83949 - protein, 91 aa, Setaria italica
  Transcript Sequence Number=SeqID_17975
  Gene Ontology: Mol. function=inorganic phosphate transmembrane transporter activity; Cellular component=membrane; Biological process=phosphate transport
  Homolog annotation: Hit_ID=Q6ZH87; Match level="QueryCoverage=68%, HitCoverage=12%, E-value=3e-09, Identity=54%"; Hit description =Putative phosphate transporter 2-1
  Subcellular localization annotation: CTP_CleavageSite=54; ConfidenceScore=5.53e-01
MGFGSGFGSGMGFGSGLGFGSGFGSGLGLPISATHTLVGAVMGVGFSRGLNRVRVETVREIVVSWLVTIPAGAVLCVLYTTILTKILTYFM

SEQ ID NO: 83950 - protein, 125 aa, Setaria italica
  misc_feature (92)..(92): Xaa can be any naturally occurring amino acid
  Transcript Sequence Number=SeqID_17976
  Gene Ontology: Mol. function=translation elongation factor activity; Cellular component=cytoplasm; Biological process=translational elongation
  Homolog annotation: Hit_ID=B9FBM7; Match level="QueryCoverage=100%, HitCoverage=29%, E-value=8e-68, Identity=98%"; Hit description =Elongation factor 1-alpha
  Pfam annotation: Domain name=GTP_EFTU; Domain location=5-125; Score =93.8; E_value=6.1e-25; Accession=PF00009.19; Description=Elongation factor Tu GTP binding domain
MGKEKSHINIVVIGHVDSGKSTTTGHLIYKLGGIDKRVIERFEKEAAEMNKRSFKYAWVLDKLKAERERGITIDIALWKFETTKYYCTVIDXPGHRDFIKNMITGTSQADCAVLIIDSTTGGFEA

SEQ ID NO: 83951 - protein, 130 aa, Setaria italica
  misc_feature (65)..(65): Xaa can be any naturally occurring amino acid
  Transcript Sequence Number=SeqID_17977
  Gene Ontology: Mol. function=cysteine-type endopeptidase activity; Cellular component=endoplasmic reticulum lumen; Biological process =proteolysis
  Homolog annotation: Hit_ID=B4ESF4; Match level="QueryCoverage=91%, HitCoverage=31%, E-value=2e-45, Identity=70%"; Hit description =Papain-like cysteine proteinase
  Pfam annotation: Domain name=Peptidase_C1; Domain location=1-129; Score=-48.0; E_value=3.8e-08; Accession=PF00112.15; Description =Papain family cysteine protease
VSPVGRLYVLSRSYKRLPRGDEAAIMEAVARQPVAVAFDHNDPCFQHYIDGVYDGKCFASGVYVXGACGTNQTHGLALVGYGTMPGGTKYWIGKNSWSARWGDNGFVYVLRDSPPLGLCGLAVRPSFPII

SEQ ID NO: 83952 - protein, 184 aa, Setaria italica
  misc_feature (129)..(129): Xaa can be any naturally occurring amino acid
  Transcript Sequence Number=SeqID_17978
  Gene Ontology: Mol. function=cysteine-type endopeptidase activity; Cellular component=endoplasmic reticulum; Biological process =proteolysis
  Homolog annotation: Hit_ID=B4ESF4; Match level="QueryCoverage=88%, HitCoverage=41%, E-value=4e-56, Identity=65%"; Hit description =Papain-like cysteine proteinase
  Pfam annotation: Domain name=Peptidase_C1; Domain location=1-163; Score=40.2; E_value=1.8e-14; Accession=PF00112.15; Description =Papain family cysteine protease
GGGLMDTAFKWVIQNGGITSAAAYPYTDRNGTCQEGKPAEVTLSGYKRLPRGDEAAIMEAVARQPVAVAFDHNDPCFQHYIDGVYDGKCFASGVYVGGACGTNQTHGLALVGYGTMPGGTKYWIGKNSXRKDARWGDNGFVYVLRDSPPLGLCGLDGAPQLPYHLIDHRPDPRPVDRHAPPSHA

SEQ ID NO: 83953 - protein, 141 aa, Setaria italica
  Transcript Sequence Number=SeqID_17979
  Subcellular localization annotation: CTP_CleavageSite=32; ConfidenceScore=5.06e-01
MMQLPVQPVLFRYYHTLQRHTKQLAATSSVVSCGRDVRRVWLRLGLRLGLGFGLGFWLRFWLGFWFRLRIRLRAWVLAQPEPKPEPKPKPEPKPMPEPKPEPKPMPKPKPEPTPVPEPKPEPKPEPKPMPEPKPEPKPEPK

SEQ ID NO: 83954 - protein, 124 aa, Setaria italica
  Transcript Sequence Number=SeqID_17980
  Gene Ontology: Mol. function=translation elongation factor activity; Cellular component=cytoplasm; Biological process=translational elongation
  Homolog annotation: Hit_ID=B9FBM7; Match level="QueryCoverage=100%, HitCoverage=29%, E-value=6e-68, Identity=99%"; Hit description =Elongation factor 1-alpha
  Pfam annotation: Domain name=GTP_EFTU; Domain location=5-124; Score =97.1; E_value=6.1e-26; Accession=PF00009.19; Description=Elongation factor Tu GTP binding domain
MGKEKSHINIVVIGHVDSGKSTTTGHLIYKLGGIDKRVIERFEKEAAEMNKRSFKYAWVLDKLKAERERGITIDIALWKFETTKYYCTVIDAPGHRDFIKNMITGTSQADCAVLIIDSTTGGFE

SEQ ID NO: 83955 - protein, 166 aa, Setaria italica
  Transcript Sequence Number=SeqID_17981
  Gene Ontology: Mol. function=translation elongation factor activity; Cellular component=cytoplasm; Biological process=translational elongation
  Homolog annotation: Hit_ID=B9FBM7; Match level="QueryCoverage=95%, HitCoverage=37%, E-value=2e-88, Identity=98%"; Hit description =Elongation factor 1-alpha
  Pfam annotation: Domain name=GTP_EFTU; Domain location=5-166; Score =233.6; E_value=5.1e-67; Accession=PF00009.19; Description=Elongation factor Tu GTP binding domain
  Pfam annotation: Domain name=MMR_HSR1; Domain location=8-156; Score= -3.3; E_value=0.002; Accession=PF01926.15; Description=GTPase of unknown function
  Pfam module annotation: Pfam domain module=GTP_EFTU::MMR_HSR1; Domain location=5-166::8-156
MGKEKSHINIVVIGHVDSGKSTTTGHLIYKLGGIDKRVIERFEKEAAEMNKRSFKYAWVLDKLKAERERGITIDIALWKFETTKYYCTVIDAPGHRDFIKNMITGTSQADCAVLIIDSTTGGFEAGISKDGQTREHALLAFTLGVKQMICCCNKMDCPTYFPKLLP

SEQ ID NO: 83956 - protein, 139 aa, Setaria italica
  misc_feature (120)..(120): Xaa can be any naturally occurring amino acid
  misc_feature (127)..(127): Xaa can be any naturally occurring amino acid
  Transcript Sequence Number=SeqID_17982
  Gene Ontology: Mol. function=translation elongation factor activity; Cellular component=cytoplasm; Biological process=translational elongation
  Homolog annotation: Hit_ID=B9FBM7; Match level="QueryCoverage=96%, HitCoverage=31%, E-value=2e-72, Identity=97%"; Hit description =Elongation factor 1-alpha
  Pfam annotation: Domain name=GTP_EFTU; Domain location=10-138; Score =109.2; E_value=1.4e-29; Accession=PF00009.19; Description=Elongation factor Tu GTP binding domain
  Pfam annotation: Domain name=MMR_HSR1; Domain location=13-135; Score=- 19.6; E_value=0.064; Accession=PF01926.15; Description=GTPase of unknown function
  Pfam module annotation: Pfam domain module=GTP_EFTU::MMR_HSR1; Domain location=10-138::13-135
ASPATMGKEKSHINIVVIGHVDSGKSTTTGHLIYKLGGIDKRVIERFEKEAAEMNKRSFKYAWVLDKLKAERERGITIDIALWKFETTKYYCTVIDAPGHRDFIKNMITGTSQADCAVLXIDSTTGXFEAGISKDGQTR

SEQ ID NO: 83957 - protein, 157 aa, Setaria italica
  Transcript Sequence Number=SeqID_17983
  Gene Ontology: Mol. function=translation elongation factor activity; Cellular component=cytoplasm; Biological process=translational elongation
  Homolog annotation: Hit_ID=B9FBM7; Match level="QueryCoverage=100%, HitCoverage=36%, E-value=2e-89, Identity=99%"; Hit description =Elongation factor 1-alpha
  Pfam annotation: Domain name=GTP_EFTU; Domain location=5-157; Score =198.3; E_value=2.1e-56; Accession=PF00009.19; Description=Elongation factor Tu GTP binding domain
  Pfam annotation: Domain name=MMR_HSR1; Domain location=8-156; Score= -3.3; E_value=0.002; Accession=PF01926.15; Description=GTPase of unknown function
  Pfam module annotation: Pfam domain module=GTP_EFTU::MMR_HSR1; Domain location=5-157::8-156
MGKEKSHINIVVIGHVDSGKSTTTGHLIYKLGGIDKRVIERFEKEAAEMNKRSFKYAWVLDKLKAERERGITIDIALWKFETTKYYCTVIDAPGHRDFIKNMITGTSQADCAVLIIDSTTGGFEAGISKDGQTREHALLAFTLGVKQMICCCNKMDA

SEQ ID NO: 83958 - protein, 170 aa, Setaria italica
  Transcript Sequence Number=SeqID_17984
  Gene Ontology: Mol. function=translation elongation factor activity; Cellular component=cytoplasm; Biological process=translational elongation
  Homolog annotation: Hit_ID=B9FBM7; Match level="QueryCoverage=94%, HitCoverage=37%, E-value=7e-91, Identity=98%"; Hit description =Elongation factor 1-alpha
  Pfam annotation: Domain name=GTP_EFTU; Domain location=10-170; Score =231.4; E_value=2.3e-66; Accession=PF00009.19; Description=Elongation factor Tu GTP binding domain
  Pfam annotation: Domain name=MMR_HSR1; Domain location=13-161; Score=- 3.3; E_value=0.002; Accession=PF01926.15; Description=GTPase of unknown function
  Pfam module annotation: Pfam domain module=GTP_EFTU::MMR_HSR1; Domain location=10-170::13-161
ASPATMGKEKSHINIVVIGHVDSGKSTTTGHLIYKLGGIDKRVIERFEKEAAEMNKRSFKYAWVLDKLKAERERGITIDIALWKFETTKYYCTVIDAPGHRDFIKNMITGTSQADCAVLIIDSTTGGFEAGISKDGQTREHALLAFTLGVKQMICCCNKMDATTSLTISS

SEQ ID NO: 83959 - protein, 165 aa, Setaria italica
  Transcript Sequence Number=SeqID_17985
  Gene Ontology: Mol. function=translation elongation factor activity; Cellular component=cytoplasm; Biological process=translational elongation
  Homolog annotation: Hit_ID=B9FBM7; Match level="QueryCoverage=100%, HitCoverage=38%, E-value=3e-94, Identity=99%"; Hit description =Elongation factor 1-alpha
  Pfam annotation: Domain name=GTP_EFTU; Domain location=5-165; Score =224.1; E_value=3.7e-64; Accession=PF00009.19; Description=Elongation factor Tu GTP binding domain
  Pfam annotation: Domain name=MMR_HSR1; Domain location=8-156; Score= -3.3; E_value=0.002; Accession=PF01926.15; Description=GTPase of unknown function
  Pfam module annotation: Pfam domain module=GTP_EFTU::MMR_HSR1; Domain location=5-165::8-156
MGKEKSHINIVVIGHVDSGKSTTTGHLIYKLGGIDKRVIERFEKEAAEMNKRSFKYAWVLDKLKAERERGITIDIALWKFETTKYYCTVIDAPGHRDFIKNMITGTSQADCAVLIIDSTTGGFEAGISKDGQTREHALLAFTLGVKQMICCCNKMDATTPKYSKA

SEQ ID NO: 83960 - protein, 153 aa, Setaria italica
  Transcript Sequence Number=SeqID_17986
GFWLRFWLGFWFRLRIRLRLWFRLGLGFRFRLRLWPEPKPEPKPEPKPEPKPEPKPEPKPEPEPKPEPKPEPKPEPKPEPKPEPKPEPKPKPEPKPKPEPKPEPKPEPEPKPYPKPEPKPKPEPKPEPKPKPEPKPEPKPKPDPPHIPPAADN

SEQ ID NO: 83961 - protein, 165 aa, Setaria italica; identical to SEQ ID NO: 83959
  Transcript Sequence Number=SeqID_17987
  Gene Ontology: Mol. function=translation elongation factor activity; Cellular component=cytoplasm; Biological process=translational elongation
  Homolog annotation: Hit_ID=B9FBM7; Match level="QueryCoverage=100%, HitCoverage=38%, E-value=3e-94, Identity=99%"; Hit description =Elongation factor 1-alpha
  Pfam annotation: Domain name=GTP_EFTU; Domain location=5-165; Score =224.1; E_value=3.7e-64; Accession=PF00009.19; Description=Elongation factor Tu GTP binding domain
  Pfam annotation: Domain name=MMR_HSR1; Domain location=8-156; Score= -3.3; E_value=0.002; Accession=PF01926.15; Description=GTPase of unknown function
  Pfam module annotation: Pfam domain module=GTP_EFTU::MMR_HSR1; Domain location=5-165::8-156

SEQ ID NO: 83962 - protein, 197 aa, Setaria italica
  misc_feature (94)..(94): Xaa can be any naturally occurring amino acid
  Transcript Sequence Number=SeqID_17988
  Pfam annotation: Domain name=Trypan_PARP; Domain location=1-141; Score=6.0; E_value=0.031; Accession=PF05887.3; Description=Procyclic acidic repetitive protein (P
MATRRLSSCCLLLAVLLVAAAAATAFDEAAAAAGVGLGHGARFARKPGRAVAEMPQPEPKPEPKPEPMPHPEPKPEPKPMPEPKPMPHPEPKPXPMPHPEPKPEPKPEPKPEPKPMPEPKPEPKPMPEPKPEPKPEPKPEPKPKPEPKPEPKPKPEPKPMPEPKPEPKPMPKPKPEPTPVPEPKPEPKPEPKTSATE

SEQ ID NO: 83963 - protein, 489 aa, Setaria italica
  Transcript Sequence Number=SeqID_17989
  Gene Ontology: Mol. function=enzyme regulator activity; Cellular component=proteasome complex; Biological process=regulation of protein catabolic process
  Homolog annotation: Hit_ID=P93768; Match level="QueryCoverage=100%, HitCoverage=100%, E-value=0.0, Identity=69%"; Hit description =Probable 26S proteasome non-ATPase regulatory subunit 3
  Pfam annotation: Domain name=PCI; Domain location=312-419; Score =104.9; E_value=2.7e-28; Accession=PF01399.19; Description=PCI domain
  Pfam annotation: Domain name=Rpn3_C; Domain location=422-488; Score =153.6; E_value=6.1e-43; Accession=PF08375.3; Description=Proteasome regulatory subunit C-terminal
  Pfam module annotation: Pfam domain module=PCI::Rpn3_C; Domain location=312-419::422-488
MPEDVEMNDSAATAAAADAPAPAQSTLHHLKEIASVIEAGSLSKEVRRISRAFRLTIALRRRLAARDVAAFLAFALPPSSEAFARLAALVPKEDGSEMDVDAAAPTAQVSIKHGLPEIEIYCYLLVLIFLIDNKKYDEAKTCASASIARLKSLNRRTVDVLASRLYSYYSDVHELTNTLAEIRGTLLALHRMATLHHDELGQETLLNLLLRNYLHYNLYDQAEKLRSKAPRFEAHSNQQFCRYLFYLGKIRTIQLEYTDAKESLLQAARKAPTTAQGFRIQCNKWAIIVRLLLGEIPERTVFMQKGMKEALTPYFELTNAVRVGDLELFRSVADKFSSTFSADRTCNLIVRLRHNVIRTGLRNISISYSRISLADIAKKLRLDSENPVADAESIVAKAIRDGAIDATIDHANGWMVSKETGDVYSTNEPQIAFNSRIAFCLNMHNEAVKALRFPPNSHKEKESAEKRRERLQQEEELAKHMAEEDDDDF

SEQ ID NO: 83964 - protein, 324 aa, Setaria italica
  misc_feature (132)..(132): Xaa can be any naturally occurring amino acid
  misc_feature (195)..(195): Xaa can be any naturally occurring amino acid
  misc_feature (237)..(237): Xaa can be any naturally occurring amino acid
  Transcript Sequence Number=SeqID_17990
  Gene Ontology: Mol. function=cysteine-type endopeptidase activity; Cellular component=extracellular region; Biological process =proteolysis
  Homolog annotation: Hit_ID=B4ESF4; Match level="QueryCoverage=81%, HitCoverage=68%, E-value=3e-79, Identity=59%"; Hit description =Papain-like cysteine proteinase
  Pfam annotation: Domain name=Peptidase_C1; Domain location=45-273; Score=242.2; E_value=1.3e-69; Accession=PF00112.15; Description =Papain family cysteine protease
GEGGDDDHHSRWPRTNEGGVHRSDLQLAAVDEEEPPRRPNPTTLLPPSVDWRAEGVVTPVGFNGWCSSCWAFVAAATIESAQAISTGDPPPVLSEQQLVDCDTLDKGCGGGWMDTAFKWVIQNGGITSAAAXPLTTEQGNGTCQEGKPAEVTLSGYNRLPRGDEAAIMEAVARQPVAVAFDHNDPCFQHYIDGVXTTASASRPDVYVGGACGTNQTHGLALVGYGTMPGGTKYWIGXKNSWSARWGDNGFVYVLRDSPPLGLCGLAVAPPASLSSDRSPAGPPAGRSPCTSEPCMICVCLSIQNNGVYTRPACLYTVCIVAKII

SEQ ID NO: 83965 - protein, 395 aa, Setaria italica
  Transcript Sequence Number=SeqID_17991
  Gene Ontology: Mol. function=cysteine-type endopeptidase activity; Biological process=proteolysis
  Homolog annotation: Hit_ID=B4ESF4; Match level="QueryCoverage=94%, HitCoverage=94%, E-value=1e-151, Identity=73%"; Hit description =Papain-like cysteine proteinase
  Pfam annotation: Domain name=Inhibitor_I29; Domain location=53-110; Score=86.8; E_value=7.5e-23; Accession=PF08246.4; Description =Cathepsin propeptide inhibitor domain (
  Pfam annotation: Domain name=Peptidase_C1; Domain location=170-394; Score=295.8; E_value=9.6e-86; Accession=PF00112.15; Description =Papain family cysteine protease
  Pfam module annotation: Pfam domain module=Inhibitor_I29::Peptidase _C1; Domain location=53-110::170-394
ASMRSSSSSMALALLPLLVAAAFFIPSLLASSASRTLDDHGLDGEALLMLGRFHGWMAAHGRSYATEEEKLRRFEVYRSNMAFIEAANRDSRMSYRLGETPFTDLTHDEFMAMYGGNNGDPTSEKEEMMMITTRAGPVHEGGGVHGGDLHQLAAVDEEEPPRRANLTALLPPSVDWRAEGVVTPVGFNAWCSSCWAFVAAATIESAKAISTGDPPPVLSEQQLVDCDTLDKGCGGGWMDRAFKWVIQNGGITSAAAYPYTDKNGTCQEGKPAEATLSSYKLLPRGDEEAIMEAVARQPVAVAFDHNDPCFQHYIDGVYDAGCSISGVYTKGACKTAQNHALALVGYGTKPDGTKYWIGKNSWSAKWGENGFVYVLRDSPPLGLCGLAVRPSFPII

SEQ ID NO: 83966 - protein, 343 aa, Setaria italica
  misc_feature (295)..(295): Xaa can be any naturally occurring amino acid
  Transcript Sequence Number=SeqID_17992
  Gene Ontology: Mol. function=translation elongation factor activity; Cellular component=cytoplasm; Biological process=translational elongation
  Homolog annotation: Hit_ID=P13905; Match level="QueryCoverage=98%, HitCoverage=74%, E-value=0.0, Identity=95%"; Hit description =Elongation factor 1-alpha
  Pfam annotation: Domain name=GTP_EFTU; Domain location=10-230; Score =381.4; E_value=1.6e-111; Accession=PF00009.19; Description =Elongation factor Tu GTP binding domain
  Pfam annotation: Domain name=GTP_EFTU_D2; Domain location=253-322; Score=72.7; E_value=1.3e-18; Accession=PF03144.17; Description =Elongation factor Tu domain 2
  Pfam annotation: Domain name=MMR_HSR1; Domain location=13-161; Score=- 3.3; E_value=0.002; Accession=PF01926.15; Description=GTPase of unknown function
  Pfam module annotation: Pfam domain module=GTP_EFTU::GTP_EFTU_D2::MMR_ HSR1; Domain location=10-230::253-322::13-161
ALLVAMGKEKSHINIVVIGHVDSGKSTTTGHLIYKLGGIDKRVIERFEKEAAEMNKRSFKYAWVLDKLKAERERGITIDIALWKFETTKYYCTVIDAPGHRDFIKNMITGTSQADCAVLIIDSTTGGFEAGISKDGQTREHALLAFTLGVKQMICCCNKMDATTPKYSKARYDEIVKEVSSYLKKVGYNPDKIHFVPISGFEGDNMIERSTNLDWYKGPTLLEALDLINEPKRPSDKPLRLPLQDVYKIGGIGTVPVGRVETGVIKPGMLVTFGPSGLTTEVKSVEMHHCRSSSXEALPGDNVGFNVKNVAVKDLKRGYVASNSKDDPAKEAANFTSQVIIMN

SEQ ID NO: 83967 - protein, 351 aa, Setaria italica
  misc_feature (70)..(70): Xaa can be any naturally occurring amino acid
  misc_feature (156)..(156): Xaa can be any naturally occurring amino acid
  misc_feature (241)..(241): Xaa can be any naturally occurring amino acid
  Transcript Sequence Number=SeqID_17993
  Homolog annotation: Hit_ID=B6T4Q5; Match level="QueryCoverage=91%, HitCoverage=81%, E-value=2e-41, Identity=42%"; Hit description=Pro -resilin
MASAYYESSRGGAADEGDDFDEFDPTPYGGGYDLFVTFGRPLPPSEETCYPCSEPSTSYDAPHYSASEPXSPYGHHTKAKPNYGFRPQQEQQPSYGSSGGSYGSRPEPAAEEGGGGYGSGYGSGYGRKNQEEESYGSGYGRKPQAEESYGSGGYGXSGYGGQARPEAGYGSAAYGSGYGSNPQAESYGSGYGRKPQVEESYGSEYGSGYGRKPQVEQSYGSEYGSGYGRKPQAEEGYGSGXNGSRPQGGEEYGSGGYGRKTQEESYGSSGYGYGRKTEEEGYGGSGYGYEKPKPKPFGEEHQSGGYERPSYGGGDEYQGSYGRKKHDDDSDDEKKQHYQKHHHHRRHDYDD

SEQ ID NO: 83968 - protein, 383 aa, Setaria italica
  Transcript Sequence Number=SeqID_17994
  Gene Ontology: Mol. function=cysteine-type endopeptidase activity; Biological process=proteolysis
  Homolog annotation: Hit_ID=B4ESF4; Match level="QueryCoverage=90%, HitCoverage=89%, E-value=1e-163, Identity=81%"; Hit description =Papain-like cysteine proteinase
  Pfam annotation: Domain name=Inhibitor_I29; Domain location=47-104; Score=87.7; E_value=4e-23; Accession=PF08246.4; Description =Cathepsin propeptide inhibitor domain (
  Pfam annotation: Domain name=Peptidase_C1; Domain location=156-382; Score=320.4; E_value=3.5e-93; Accession=PF00112.15; Description =Papain family cysteine protease
  Pfam module annotation: Pfam domain module=Inhibitor_I29::Peptidase _C1; Domain location=47-104::156-382
MASMRSSSSSMALALLPLLVAAALAPSLASASPALDNGEELLMLGRFHGWMAAHGRSYATEEEKLRRFEVYRSNMEFIEAANRDSRMSYRLGETPFTDLTHDEFMAMYSSNDDDGPSSSSLSEETTVITTRAGPVHEGTAAVEEPPPRRTNLTAAVPPSVDWRAKGVVTAAKFQGVSCSSCWAFTSVATMESAQAISTGGSPPVLSEQQLVDCVTLNHGCNRGWMDNAFKWVIQNGGITTEAAYPYTGKDGKCQTGKPVAVRLSGYKKVSPPGNEAALMEAVAQQPVAASFDYSDPCFQHYIGGVYNAGCSKSGVYTKGACKTAQNHALALVGYGTMPDGTKYWIGKNSWGEKWGEKGFIYVLRDSPPLGLCGLAALPVYPII

SEQ ID NO: 83969 - protein, 377 aa, Setaria italica
  misc_feature (169)..(169): Xaa can be any naturally occurring amino acid
  misc_feature (254)..(254): Xaa can be any naturally occurring amino acid
  misc_feature (331)..(331): Xaa can be any naturally occurring amino acid
  Transcript Sequence Number=SeqID_17995
  Gene Ontology: Mol. function=cysteine-type endopeptidase activity; Biological process=proteolysis
  Homolog annotation: Hit_ID=B4ESF4; Match level="QueryCoverage=90%, HitCoverage=89%, E-value=1e-123, Identity=64%"; Hit description =Papain-like cysteine proteinase
  Pfam annotation: Domain name=Inhibitor_I29; Domain location=47-104; Score=80.0; E_value=8.3e-21; Accession=PF08246.4; Description =Cathepsin propeptide inhibitor domain (
  Pfam annotation: Domain name=Peptidase_C1; Domain location=160-376; Score=237.4; E_value=3.6e-68; Accession=PF00112.15; Description =Papain family cysteine protease
  Pfam module annotation: Pfam domain module=Inhibitor_I29::Peptidase _C1; Domain location=47-104::160-376
MAAMHYSSSSMSLSLLPLLLAAALAPSLASASPALDNGEELLMLGRFHGWMAAHGRSYATEEEKLLRFEIYRSNMEFIAAANRDSRMRYRLGETPFTDLTHDEFMAMYGGNGGDPSEKEEMMITTHAGPVHEGGVHRSDLQLAAVDEEEPPRRPNPTTLLPPSVDWRAXKGVVTPGRYVAAATIESAQAISTGDPPPVLSEQQLVDCDTLDKGCGGGWMDTAFKWVIQNGGITSAAAVPLHGTGTAPCQEGKPXEVTLSGYKRLPRGDEAAIMEAVARQPVAVAFDHNDPCFQHYIDGVYDGKCFASGVYVGGACGTNQTHGLALVGYGTXPGGTKYWIGKNSWSARWGDNGFVYVLRDSPPLGLCGLAVRPSFPII

SEQ ID NO: 83970 - protein, 186 aa, Setaria italica
  Transcript Sequence Number=SeqID_17996
  Gene Ontology: Mol. function=ATPase activity, coupled to transmembrane movement of substances; Cellular component=integral to membrane; Biological process=transport
  Homolog annotation: Hit_ID=Q8GU69; Match level="QueryCoverage=100%, HitCoverage=14%, E-value=2e-72, Identity=75%"; Hit description=MDR -like ABC transporter
  Subcellular localization annotation: CTP_CleavageSite=64; ConfidenceScore=5.10e-01
MGEKVGKFIQLLVTFAGGFAVAFAQGWLLTLVMLATIPPLVLAGAVMSGVVARMASLGQAAYAEAAAVVEQTVGSIRTVASFTGEKRAVEKYNESLKSAYSSGVREGLAAGIGMAIVMVLLFCGYSLGIWYGAKLILEKGYSGAQVMNVIFAVLTGSLALGQASPSMKAFAAGQAAAYKMFETINR

SEQ ID NO: 83971 - protein, 337 aa, Setaria italica
  Transcript Sequence Number=SeqID_17997
  Gene Ontology: Mol. function=ATPase activity, coupled to transmembrane movement of substances; Cellular component=integral to membrane; Biological process=transport
  Homolog annotation: Hit_ID=Q8GU69; Match level="QueryCoverage=97%, HitCoverage=76%, E-value=1e-170, Identity=70%"; Hit description=MDR -like ABC transporter
  Pfam annotation: Domain name=AAA; Domain location=143-299; Score= -39.8; E_value=0.078; Accession=PF00004.21; Description=ATPase family associated with various cellular activities (AAA)
  Pfam annotation: Domain name=ABC_tran; Domain location=141-325; Score= 227.9; E_value=2.6e-65; Accession=PF00005.19; Description=ABC transporter
  Pfam module annotation: Pfam domain module=AAA::ABC_tran; Domain location=143-299::141-325
SNLTGNVNREGTLRPAGIGMAIVMVLLFCGYSLGIWYGAKLILEKGYSGAQVMNVIFAVLTGSLALGQASPSMKAFAAGQAAAYKMFETINREPEIDAYSATGRKLDDIQGDIEFREVHFSYPTRPDEQIFRGFSLAVQSGTTVALVGQSGSGKSTVISLIERFYDPQLGEVLIDGVDLKEFQLRWIRSKIGLVSQEPVLFAASIRDNIAYGKDNATDEEIRAAAELANASKFIDKMPQGLSTSVGEHGTQLSGGQKQRIAIARAILKNPRILLLDEATSALDTESERIVQEALDRVMTNRTTVIVAHRLSTVRNADTIAVIHRGSVVRKGSHHELV

SEQ ID NO: 83972 - protein, 117 aa, Setaria italica
  Transcript Sequence Number=SeqID_17998
  Gene Ontology: Mol. function=oxidoreductase activity, acting on the aldehyde or oxo group of donors, disulfide as acceptor; Cellular component=mitochondrial matrix; Biological process=oxidation reduction
  Homolog annotation: Hit_ID=Q4JIY3; Match level="QueryCoverage=84%, HitCoverage=25%, E-value=1e-45, Identity=84%"; Hit description =Pyruvate dehydrogenase (Fragment)
  Pfam annotation: Domain name=E1_dh; Domain location=1-117; Score= -75.5; E_value=8.9e-06; Accession=PF00676.12; Description =Dehydrogenase E1 component
LYGDGAANQGARKWQCPPSCTSALYGDGAANQGQLFEALNISALWKLPAILVCENNHYGMGTAEWRAAKSPAYYKRGDYVPGLKVDGMDVLAVKQACKFAKEHAVANGPNCPGGKRN

SEQ ID NO: 83973 - protein, 89 aa, Setaria italica
  Transcript Sequence Number=SeqID_17999
PPDNASLYRFLSHEKFEQCLRSSSSILFLLPISCLQGMTVSFPAYGREALNSFLSGPNDCTINEPGQNWQACHQNKICSWSMLCELLVC

SEQ ID NO: 83974 - protein, 129 aa, Setaria italica
  Transcript Sequence Number=SeqID_18000
  Gene Ontology: Mol. function=aminoacyl-tRNA ligase activity; Cellular component=cytoplasm; Biological process=tRNA aminoacylation for protein translation
  Homolog annotation: Hit_ID=Q7EZJ3; Match level="QueryCoverage=84%, HitCoverage=11%, E-value=5e-42, Identity=79%"; Hit description =Putative valyl-tRNA synthetase
  Subcellular localization annotation: CTP_CleavageSite=46; ConfidenceScore=5.67e-01
MALAGPSSALLSSSSSACLRRLNPLLLSAACRRSAWGQRRAARRFCAAVASEADVFTSPEVAKSFDFTNEERIYKWWESQGFFKPNFDRGGDPFVIPMPPPNVTGSLHMGHAMFVTLEDIMVRYFRMER

SEQ ID NO: 83975 - protein, 93 aa, Setaria italica
  Transcript Sequence Number=SeqID_18001
  Gene Ontology: Mol. function=ATP-dependent helicase activity; Cellular component=nucleus; Biological process=mRNA processing
  Homolog annotation: Hit_ID=Q6K4U8; Match level="QueryCoverage=100%, HitCoverage=7%, E-value=4e-27, Identity=68%"; Hit description =Putative RNA helicase
VSKVCSELETHIGVGDKVLAEFITELGRDSATVAEFDARLKEKGADFPDYFVRTLLTIIHAILPPSSNPSSAAVAAGPAGAEASKFPGLARPD

SEQ ID NO: 83976 - protein, 312 aa, Setaria italica
  Transcript Sequence Number=SeqID_18002
  Gene Ontology: Mol. function=acetylglucosaminyltransferase activity; Cellular component=membrane
  Homolog annotation: Hit_ID=B6Z261; Match level="QueryCoverage=100%, HitCoverage=73%, E-value=1e-155, Identity=83%"; Hit description=Beta- 1-3-galactosyl-o-glycosyl-glycoprotein
  Pfam annotation: Domain name=Branch; Domain location=1-191; Score =252.0; E_value=1.4e-72; Accession=PF02485.13; Description=Core-2I -Branching enzyme
DRRDLAAALAAHPVIAAADNVRVVDRANLITYRGPTMVANTLHAAAAFLWGHAGDGGSDWDWFINLSASDYPLVTQDDLIHVFSKLPRDLNFIDHTSDIGWKEFQRAKPVIIDPGLYMKKKADVFWIPQRRSVPTAFKLFTGSAWMALSRPFVEYCIWGWDNLPRTVLMYYSNFISSPEGYFHTVVCNAEEFKNTTVNHDLHYISWDNPPKQHPHYLTVEDLDRMVASDAPFARKFHADDPVLDRIDGEILSRSVDMPTPGGWCAGTRENGSDPCSVIGDTSLLRPGRGAVRLQRLMTSLLSEEKFHPRQCK

SEQ ID NO: 83977 - protein, 103 aa, Setaria italica
  Transcript Sequence Number=SeqID_18003
  Homolog annotation: Hit_ID=B9SDG1; Match level="QueryCoverage=97%, HitCoverage=11%, E-value=1e-19, Identity=43%"; Hit description =Pentatricopeptide repeat-containing protein, putative
  Pfam annotation: Domain name=PPR; Domain location=40-74; Score=32.7; E_value=1.5e-06; Accession=PF01535.12; Description=PPR repeat
  Pfam annotation: Domain name=PPR; Domain location=5-39; Score=40.6; E_ value=6.4e-09; Accession=PF01535.12; Description=PPR repeat
  Pfam module annotation: Pfam domain module=PPR::PPR; Domain location =40-74::5-39
YPKASTYNSLISDFAKAGMMNQAKEMFKEMKRRGVLHTSSTYDILLNGWSKLRNGIEVRKLFKDMKEIGFRPSKGTLSFVSRAFSKPGMTWEARRLLKTLFKD

SEQ ID NO: 83978 - protein, 80 aa, Setaria italica
  Transcript Sequence Number=SeqID_18004
  Gene Ontology: Mol. function=nucleic acid binding
  Homolog annotation: Hit_ID=Q53KL9; Match level="QueryCoverage=87%, HitCoverage=8%, E-value=2e-10, Identity=42%"; Hit description =Retrotransposon protein, putative, unclassified
KCEVVLAARQVVFRCGDAKEAELLACQEGLSLAIQWRHSPLILESDCQNVCNALNLTLEDRSRLAFLIQEVKFLTEEHMF

SEQ ID NO: 83979 - protein, 79 aa, Setaria italica
  Transcript Sequence Number=SeqID_18005
ILLLPPIQVGHIYSSMPILSSPLIKCYMLPSVHWFPQRYLQCLPAFQLDKSKSWYLVICLGKEFSQYAELYGCYLFKVN

SEQ ID NO: 83980 - protein, 197 aa, Setaria italica
  Transcript Sequence Number=SeqID_18006
  Homolog annotation: Hit_ID=B8BAA3; Match level="QueryCoverage=85%, HitCoverage=41%, E-value=1e-59, Identity=71%"; Hit description =Ubiquitin carrier protein
MESLPLTAEAIAFTEKKMDMTLEDIIKMSKKKNPGGKKPPRQPIKKHPFQSGNSNQGNAKVQRFMESRSAIRQGFLAQRRSNLGGNQFPVTKQAAKKAAAMPMRNKAVRWNKPSASTLVQRRPVGDAFQNGKAKETQNQGAPRTMDALFAQMKAQRMRTVPQQQANPAPGCQFNQQRRVQQQQRRGRGYGGRNVGNQ

SEQ ID NO: 83981 - protein, 65 aa, Setaria italica
  Transcript Sequence Number=SeqID_18007
RMRSSEDRLPVLKGGRDPVQVSSLLSYWQFAYIYAAVLIGKITANLEELVSIRDVDSIAPSYGAV

SEQ ID NO: 83982 - protein, 106 aa, Setaria italica
  Transcript Sequence Number=SeqID_18008
QKYMRNHLALMGPLDRRDLYFGLFMVCDMLRDKDDRGYKPLYGKKDAPEWRSNAKKFHPYHSVYYHDVSEEDKNNPDYQPYWNNYWELLRFLRNYGRNASNYSLNY

SEQ ID NO: 83983 - protein, 123 aa, Setaria italica
  Transcript Sequence Number=SeqID_18009
  Gene Ontology: Mol. function=RNA binding; Cellular component =mitochondrion
  Homolog annotation: Hit_ID=Q8W3E4; Match level="QueryCoverage=100%, HitCoverage=38%, E-value=1e-39, Identity=37%"; Hit description =Putative membrane-associated protein
  Pfam annotation: Domain name=PPR; Domain location=22-56; Score=53.7; E_value=7.2e-13; Accession=PF01535.12; Description=PPR repeat
  Pfam annotation: Domain name=PPR; Domain location=57-91; Score=44.0; E_value=5.7e-10; Accession=PF01535.12; Description=PPR repeat
  Pfam module annotation: Pfam domain module=PPR::PPR; Domain location =22-56::57-91
EALELLRMMADDGGGSCPPDVVAYNTVINGFFREGQVDKAYGLFHEMLDRGILPDVVTYTTVVDGLCKAGAVSRAKGVLQEMIHKGVKPNMNTYNCLINGYCTSGQWKEVVRILKEMSTQGQR

SEQ ID NO: 83984 - protein, 207 aa, Setaria italica
  Transcript Sequence Number=SeqID_18010
  Gene Ontology: Cellular component=chloroplast
  Homolog annotation: Hit_ID=B6SU36; Match level="QueryCoverage=100%, HitCoverage=89%, E-value=1e-66, Identity=66%"; Hit description =Thylakoid lumenal 16.5 kDa protein
  Subcellular localization annotation: CTP_CleavageSite=46; ConfidenceScore=5.12e-01
KLPAQQHPPAAACRAKFRGVSINGGQDRREAAVVVGRRSGLASCVLAALAASFSPLAADRPARALVLEEDDDIELLERVKEDRKKRLEKQGIISASGTETGYLQDLIYKLSKVGQAIDKDDLPAASSVLGPSTDAQWVQNINAAFSKFSSSPEERSTVDSFNASLASLFTSVNKLDAESSKSAFVSSATALEKWIALAGLSGQLKGF

SEQ ID NO: 83985 - protein, 58 aa, Setaria italica
  Transcript Sequence Number=SeqID_18011
  Gene Ontology: Mol. function=protein binding; Biological process=cell cycle
  Homolog annotation: Hit_ID=Q7XT80; Match level="QueryCoverage=100%, HitCoverage=6%, E-value=8e-26, Identity=89%"; Hit description =OSJNBa0029H02.9 protein
  Pfam annotation: Domain name=ER; Domain location=3-58; Score=47.9; E _value=3.8e-11; Accession=PF01133.9; Description=Enhancer of rudimentary
MAGRHTIILMQPSQNRATRTFLDFDSVNHALDGICGLYERKIRNINPMVRNLTYDISD

SEQ ID NO: 83986 - protein, 54 aa, Setaria italica
  Transcript Sequence Number=SeqID_18012
  Gene Ontology: Mol. function=hydrolase activity
  Homolog annotation: Hit_ID=B6SJE4; Match level="QueryCoverage=100%, HitCoverage=22%, E-value=3e-21, Identity=87%"; Hit description =Receptor protein kinase-like protein
MRIFVLSGQSNMAGRGGVHHRRWDGVVPPEAAPDPSIQRLSAALDWEEAREPLH

SEQ ID NO: 83987 - protein, 82 aa, Setaria italica
  Transcript Sequence Number=SeqID_18013
  Subcellular localization annotation: CTP_CleavageSite=53; ConfidenceScore=5.81e-01
RASSSRPWIACAMRSPDSPPRATPTARPCSDRSGTSQTISVPGLATPCGTSPLARQGRSRRLPRTTPIQMWPSLLLLHVLSR

SEQ ID NO: 83988 - protein, 469 aa, Setaria italica
  misc_feature (192)..(192): Xaa can be any naturally occurring amino acid
  Transcript Sequence Number=SeqID_18014
  Gene Ontology: Mol. function=DNA binding; Biological process =regulation of transcription, DNA-dependent
  Pfam annotation: Domain name=B3; Domain location=241-334; Score=31.8; E_value=2.7e-06; Accession=PF02362.13; Description=B3 DNA binding domain
EDEEKGKLCNANNKKKMQICDDEEGKNRKESTTISERKDKEKMNKTHKEKMRAANSKERKILSGHDGVKKSVEVSTAFFGKEKKGKRLNKTINLELQSDEDEEEGVWNYDGKVKNGKVATAFSEEEKRKRRPNNNTEKETAALTPAVKEKRMRPSESTEMMMLHDKPNGRNVASNVSKEKKMDTSSGSNYKXRKREEPDSLSKKEKRVWCNASDKKIYSGTVQEKKICGSGKEKNRQAPFTFFKFIYNYFEEFLLIPPAVAPKLEDLTNRDVYLEDSEKRRSKVRLSVVDGSLAFHQGWDIFVSDHLIKLGEFLLFEYTARKRFSVRIFGIDSCERLDFKKDPKRVEQGIGYGPPQDNNNGSLIDRQCKTKGTSPLHSKKKTVILISDSGISADNEDTLNITSDADSTHHVTINTNKDLKRVQSGVGNLPDGVCRTKCISPPCSEGKTSSEIIVTGAAPLMHENDGRVG

SEQ ID NO: 83989 - protein, 82 aa, Setaria italica
  Transcript Sequence Number=SeqID_18015
  Gene Ontology: Mol. function=aspartic-type endopeptidase activity; Cellular component=extracellular region; Biological process =proteolysis
  Homolog annotation: Hit_ID=Q69IP6; Match level="QueryCoverage=97%, HitCoverage=17%, E-value=1e-12, Identity=50%"; Hit description =Putative aspartic proteinase nepenthesin I
GTPPQELSAVADTGSDLVWVKCGACAHCAPQGSPSYYPNTSSSFSKLPCSSGLCGNLKANSLATCGAGGAECDYKYLYGLAA

SEQ ID NO: 83990 - protein, 213 aa, Setaria italica
  Transcript Sequence Number=SeqID_18016
  Gene Ontology: Mol. function=sugar binding; Cellular component =intrinsic to membrane; Biological process=innate immune response
  Homolog annotation: Hit_ID=B6TCM3; Match level="QueryCoverage=99%, HitCoverage=84%, E-value=1e-72, Identity=62%"; Hit description =Lectin-like protein
  Subcellular localization annotation: CTP_CleavageSite=29; ConfidenceScore=5.41e-01
MGASPSRHEASSDSSRAGNGRAVAVATSSAASGTGSNSNQAQSKRAPAPHMFHEIVAQEKTATTAAELEDQVHGAGIYLAGKTKKYWVHEKTRCNCFMLFPRGLSVTWSEDPNYWSWHPLKETSDSEIEAVSLQNVCWLEIHGKLELSHLTPGVTYDVVFEAMLTEPTYGWTAPVNLRLKLPDGAVQERKEKLQEKPRNQWLELKAGELTAQP

SEQ ID NO: 83991 - protein, 140 aa, Setaria italica
  Transcript Sequence Number=SeqID_18017
MAAAEARAAWQRAANRCLVQEDAKRAPKLACCPQSVQQHDMSGANPTNPQDPHIPNFMPINWNLMSSNLPTDTQWWLQLQPNFGCQMALAREHLSYIGGEAGEKKMEGLVPVSKPDDVRAKKDADPCEPPWIVSTAFMKQ

SEQ ID NO: 83992 - protein, 364 aa, Setaria italica
  Transcript Sequence Number=SeqID_18018
GFIVPVSKPDDVRAKKDADPCEPPWIVSTAFMKQSSETGLEELKNLAGYTPTSLKCKGNANNCVYEDKEFTEFKAFDPLFPKQQQKVYCEMGAPWEENKKSQPWWQVADVDGLASLVAERAMESIVNNDLPRPTQTVRVHGAELNSPGNKVDYELPLPPSGKEPDPVHDTMTCSYSVSSNTNETNSSDGGGWEQQRRNNVPGGAQDSYSSTNSTPGSKPTYQNASERAKLLDALRHSQTRAREAEIAAKKAYDEKEHVIKLLFRQASHLFACKQWLKMLQLENICLQLRFKEHQIATMFPELPWMTMKEKVAPGQEHKDGTRKRGRRPNRKGGLHNAFAVAVGVGIVGAGLLLGWTLGWLLPML

SEQ ID NO: 83993 - protein, 159 aa, Setaria italica
  Transcript Sequence Number=SeqID_18019
  Gene Ontology: Mol. function=transferase activity, transferring glycosyl groups; Cellular component=cell wall
  Homolog annotation: Hit_ID=B9RHH2; Match level="QueryCoverage=99%, HitCoverage=15%, E-value=2e-65, Identity=72%"; Hit description =Synaptotagmin, putative
  Pfam annotation: Domain name=PRT_C; Domain location=120-159; Score= -65.4; E_value=0.0034; Accession=PF08372.2; Description=Plant phosphoribosyltransferase C-ter
VNMLHLYTQPLLPRMHYLHPFTVTQLDALRHQAMGIVAARLGRAEPPLRREVVEYMLDVESHMWSMRRSKANFFRAVSLFSGAAAAARWFGDVCRWRNVATTALVHVLLLILVWYPELILPTVFLYMFLIGLWNYRRRPRHPPHMDTKMSWAEAAHPDE

SEQ ID NO: 83994 - protein, 74 aa, Setaria italica
  Transcript Sequence Number=SeqID_18020
ISLLMVLRCNSSTSGLFHDTRGGWRSRRRVRGGREASELNAQWAVEEAPLATRHADLTGGRALGSEGTGGASAA

SEQ ID NO: 83995 - protein, 76 aa, Setaria italica
  Transcript Sequence Number=SeqID_18021
  Homolog annotation: Hit_ID=B6TUC1; Match level="QueryCoverage=88%, HitCoverage=12%, E-value=1e-09, Identity=55%"; Hit description =Histone-arginine methyltransferase CARM1
GGVEQDGILQTSTGKLELKEPYYRLSQPQSYMLQQDQQQQQQQLPSLKPQGSEQHMQEGLSPGITIDQVDQECGLH

SEQ ID NO: 83996 - protein, 227 aa, Setaria italica
  misc_feature (210)..(210): Xaa can be any naturally occurring amino acid
  Transcript Sequence Number=SeqID_18022
  Gene Ontology: Mol. function=protein serine/threonine kinase activity; Cellular component=cytoplasm; Biological process=protein amino acid phosphorylation
  Homolog annotation: Hit_ID=B6SYP5; Match level="QueryCoverage=100%, HitCoverage=46%, E-value=1e-106, Identity=82%"; Hit description =MPK17-2-putative MAPK
  Pfam annotation: Domain name=Pkinase; Domain location=1-185; Score =34.9; E_value=1.4e-10; Accession=PF00069.17; Description=Protein kinase domain
  Pfam annotation: Domain name=Pkinase_Tyr; Domain location=1-183; Score=-172.9; E_value=0.031; Accession=PF07714.9; Description =Protein tyrosine kinase
  Pfam module annotation: Pfam domain module=Pkinase::Pkinase_Tyr; Domain location=1-185::1-183
LYQLLRALKYIHAAHVFHRDLKPRNILANSDSKLKICDFGLARASFNDSPSSIFWTDYVATRWYRAPELCGSFYSSYTPAIDIWSIGCIFAEVLTGTPLFPGKNVVHQLDLITDLLGTPSSESLSRIHSDRARQYLIDMRMKHPIPFSHKFHDADPLALRLLERLLAFDPKDRPTAEEALADQYFRGLAKLECEPSAQPISKLDFEFEGXITKDDVREMIYREILEY

SEQ ID NO: 83997 - protein, 45 aa, Setaria italica
  misc_feature (12)..(12): Xaa can be any naturally occurring amino acid
  Transcript Sequence Number=SeqID_18023
  Gene Ontology: Mol. function=two-component response regulator activity; Biological process=two-component signal transduction system (phosphorelay)
  Homolog annotation: Hit_ID=Q9FRY8; Match level="QueryCoverage=100%, HitCoverage=18%, E-value=2e-15, Identity=93%"; Hit description =Response regulator 7
VLTDYCMPSSTXGYDLLKAIKALSSPNPIPVVVMSSENEPQRISR

SEQ ID NO: 83998 - protein, 212 aa, Setaria italica
  Transcript Sequence Number=SeqID_18024
  Gene Ontology: Mol. function=two-component response regulator activity; Cellular component=nucleus; Biological process=two -component signal transduction system (phosphorelay)
  Homolog annotation: Hit_ID=Q9FRY8; Match level="QueryCoverage=80%, HitCoverage=73%, E-value=1e-74, Identity=80%"; Hit description =Response regulator 7
  Pfam annotation: Domain name=Response_reg; Domain location=10-126; Score=36.9; E_value=8.1e-08; Accession=PF00072.16; Description =Response regulator receiver domain
GERERDGGGVDDSVAEEKEGCWECWWPSTRREAVELLGPKGQGRLDSSAADANELTVDIVLTDYCMPEMTGYDLLKAIKALSSPNPIPVVVMSSENEPQRISRCLTAGAEDFILKPLKSKDVQRLRNCSNSAKPKGADDAHQCKSLSSRRKITSEQRSQITRLAMVLNASSIELSHYFQFLFKFILLAYAVLCLGELLHRWSNGSFLSLWSS

SEQ ID NO: 83999 - protein, 266 aa, Setaria italica
  misc_feature (104)..(104): Xaa can be any naturally occurring amino acid
  misc_feature (200)..(200): Xaa can be any naturally occurring amino acid
  Transcript Sequence Number=SeqID_18025
  Gene Ontology: Mol. function=two-component response regulator activity; Cellular component=nucleus; Biological process=two -component signal transduction system (phosphorelay)
  Homolog annotation: Hit_ID=Q9FRY8; Match level="QueryCoverage=95%, HitCoverage=95%, E-value=9e-91, Identity=72%"; Hit description =Response regulator 7
  Pfam annotation: Domain name=Response_reg; Domain location=16-148; Score=81.9; E_value=2.2e-21; Accession=PF00072.16; Description =Response regulator receiver domain
MGAGGEGKAAAAAVRVLVVDDSPIDRKVVELLLRNHKGGAAPFHVTAVDSGKKAMELLGPKGQGRLDSSAADANELTVDIVLTDYCMPEMTGYDLLKAIKALSXSPNPIPVVVMSSENEPQRISRCLTAGAEDFILKPLKSKDVQRLRNCSNSAKPKGADDAHQCKSLSSRRKITSEQRSQITRLAMARLTIPCCSFKCXTHQLIMTLMKRCFVLFSLQVLNASSIELSHYFQFLFKFILLAYAVLCLGELLHRWSNGSFLSLWSS

SEQ ID NO: 84000 - protein, 74 aa, Setaria italica
  Transcript Sequence Number=SeqID_18026
  Homolog annotation: Hit_ID=B6TF70; Match level="QueryCoverage=82%, HitCoverage=15%, E-value=3e-13, Identity=65%"; Hit description =Macrophage erythroblast attacher
  Subcellular localization annotation: CTP_CleavageSite=19; ConfidenceScore=5.32e-01
MEMAIDTPSPAPPTPPTPSAAAGRQTRAAESVRLEHQLVRVPLEALRSTVRSNNRLAEKEIAAALSSASAAPAR

SEQ ID NO: 84001 - protein, 126 aa, Setaria italica
  Transcript Sequence Number=SeqID_18027
  Gene Ontology: Mol. function=hydrolase activity, hydrolyzing O -glycosyl compounds; Cellular component=cell wall; Biological process= carbohydrate metabolic process
  Homolog annotation: Hit_ID=B6SWK9; Match level="QueryCoverage=93%, HitCoverage=18%, E-value=4e-59, Identity=89%"; Hit description=Auxin- induced beta-glucosidase
  Pfam annotation: Domain name=Glyco_hydro_3; Domain location=1-126; Score=-74.2; E_value=0.00014; Accession=PF00933.13; Description =Glycosyl hydrolase family 3 N terminal domain
ASSRPPPGDSLKLAACCKHFTAYDLDRWGGTDRFHFNAVVAAQDLEDTFNVPFRACVANGNAASVMCSYNQVNGVPTCADEGFLKGTIRGKWGLDGYIVSDCDSVDVFFRDQHYTRTTEDAVAATL

SEQ ID NO: 84002 - protein, 88 aa, Setaria italica
  Transcript Sequence Number=SeqID_18028
KTKEDKAAEIALLCVPSSFSLCLFLGWLFGIGAGVREWVTIWWIGLLVGYRLVGSVLFNAGALYRRKRARVVMVLSSFPSFLDATKKR

SEQ ID NO: 84003 - protein, 79 aa, Setaria italica
  Transcript Sequence Number=SeqID_18029
DRRSRHKRRRRERDRRRSPSDDDGYSSTSSYESDREASGRSRKHKKSSRSRKSRERERSKDRHHRRDKSKHKEEKESEG

SEQ ID NO: 84004 - protein, 174 aa, Setaria italica
  Transcript Sequence Number=SeqID_18030
  Subcellular localization annotation: CTP_CleavageSite=26; ConfidenceScore=5.51e-01
MMAFKSMASHALMFLAMALMLAVSVRAQGSSPPRAPTPAPPRGPPPTPSRAPPSRAPPSRAPPAPSNPPTVAPTPAPTPAPTPAPMSAPTRSPPAPTNPPMLAPAPTPTRAPTPAPTPAPTPAPTPVPTPSPTPAPTPAPTPAPTPAPTPVPTPSPTPAPTPAPTPAPTPAPTP

SEQ ID NO: 84005 - protein, 267 aa, Setaria italica
  Transcript Sequence Number=SeqID_18031
  Subcellular localization annotation: CTP_CleavageSite=20; ConfidenceScore=5.58e-01
PTSKPIHHIVTHSRTPSPTPAPTPAPTPAPTPAPTPLPTPSPTPAPTPAPTPAPTPASAPAPTPAPTPVPTPAPTPVPTPSPTPAPTTAPAPALTPAPTPVPTPAPTPVPTPAPTPAPTPAPAPTPTPAPAPTPVPTPAPTPASIVAPTQAPTLTPTPSPIPAPTPTPTSTLTPTPTPAPAPAPTPAPVPPPSTPRPPPPPQAVCPAGFSNLEAFNSAVLPYALRRTILLLVSKPSIALFPPTIKTTCLCYFSTSTTIGIITVPSVR

SEQ ID NO: 84006 - protein, 165 aa, Setaria italica
  Transcript Sequence Number=SeqID_18032
  Homolog annotation: Hit_ID=B6T8W4; Match level="QueryCoverage=36%, HitCoverage=37%, E-value=1e-25, Identity=98%"; Hit description =Splicing factor, arginine/serine-rich 12
  Subcellular localization annotation: CTP_CleavageSite=51; ConfidenceScore=5.40e-01
TATASSRRKEGASSSSSALKARKDRRSRHKRRRRERDRRRSPSDDDGYSSTSSYESDREASGRSRKHKKSSRSRKSRERERSKDRHHSWVGSLALELGFKKESEGGDGPVQLSKFLGRDKEKEEGTQRSAISGKKIMMKLEKTKEDKAAESKRNELLKFLNASYD

SEQ ID NO: 84007 - protein, 120 aa, Setaria italica
  misc_feature (18)..(18): Xaa can be any naturally occurring amino acid
  misc_feature (37)..(37): Xaa can be any naturally occurring amino acid
  misc_feature (85)..(85): Xaa can be any naturally occurring amino acid
  Transcript Sequence Number=SeqID_18033
  Gene Ontology: Cellular component=mitochondrion
  Subcellular localization annotation: CTP_CleavageSite=74; ConfidenceScore=5.77e-01
MLLGSERKLVMLSATGLXPSRVRHSTASPSSTTLVLXPTTPFSRFRLLPFRSPLLRESLLLSFPLATKMFQFTRLSLACSWIQQXQFKRLTYLGISGSMLIFNSPKHFVACYALTYVLLG

SEQ ID NO: 84008 - protein, 85 aa, Setaria italica
  misc_feature (50)..(50): Xaa can be any naturally occurring amino acid
  Transcript Sequence Number=SeqID_18034
MFQSSSPLLRKSEPPVQVQDTIITAWTIRQPTRNRNDPIARAELYQLSYXPPRAKWSMHERVRCFFYSFPWRSWAILDLNQRPRP

SEQ ID NO: 84009 - protein, 97 aa, Setaria italica
  Transcript Sequence Number=SeqID_18035
FRRCAGCPQPHLPELSLDALPGGGRRTPREFKSHPKIFQAEATTAASLSTPPPRLPPKLESNLANLPHTKSPKSGGIRRSPGPMKTAGEEAAAAGEE

SEQ ID NO: 84010 - protein, 77 aa, Setaria italica
  Transcript Sequence Number=SeqID_18036
  Gene Ontology: Mol. function=hydrolase activity; Biological process =ubiquitin-dependent protein catabolic process
  Homolog annotation: Hit_ID=Q0D6M1; Match level="QueryCoverage=100%, HitCoverage=77%, E-value=5e-31, Identity=87%"; Hit description =Ubiquitin-related modifier 1 homolog
  Pfam annotation: Domain name=Urm1; Domain location=1-77; Score=128.1; E_value=2.8e-35; Accession=PF09138.3; Description=Urm1 (Ubiquitin related modifier)
VDVPIMDGEGKVAMKGLLSWVKANLIKERPEMFVDGDSVRPGVLVLINDCDWELCGGLDAELEEKDVVVFISTLHGG

SEQ ID NO: 84011 - protein, 100 aa, Setaria italica
  misc_feature (92)..(92): Xaa can be any naturally occurring amino acid
  Transcript Sequence Number=SeqID_18037
  Gene Ontology: Mol. function=hydrolase activity; Biological process =ubiquitin-dependent protein catabolic process
  Homolog annotation: Hit_ID=Q0D6M1; Match level="QueryCoverage=83%, HitCoverage=83%, E-value=8e-35, Identity=87%"; Hit description =Ubiquitin-related modifier 1 homolog
  Pfam annotation: Domain name=Urm1; Domain location=2-100; Score =199.1; E_value=1.2e-56; Accession=PF09138.3; Description=Urm1 (Ubiquitin related modifier)
MHLTLEFGGGLELLLENSTKVHKVDVPIMDGEGKVAMKGLLSWVKANLIKERPEMFVKGDSVRPGVLVLINDCDWELCGGLDAELEEKDVVXFISTLHGG

SEQ ID NO: 84012 - protein, 156 aa, Setaria italica
  Transcript Sequence Number=SeqID_18038
LLRINGYYLLQCPSGSLTCTTEGCGCLEGGKVSLDSQDKIWSIAITFDGNISIKGTIGNQSVRVTSAEVDEPFPRNIIRDELKLVQSWNDFYCNSYFHLDFSCEAMSTKMEEYNTVCHVLNQLRASSTEVLSVSSCIDIMMPKEASGSANLKLKKR

SEQ ID NO: 84013 - protein, 64 aa, Setaria italica
  Transcript Sequence Number=SeqID_18039
  Homolog annotation: Hit_ID=B9RFQ6; Match level="QueryCoverage=73%, HitCoverage=6%, E-value=4e-11, Identity=63%"; Hit description =Nucleic acid binding protein, putative
SRYQAATILKRSCLQHCALGDILQVLHIVIVRKKWIVPHSSGWQPLSINTTDIATTDATAKVKS

SEQ ID NO: 84014 - protein, 599 aa, Setaria italica
  misc_feature (367)..(367): Xaa can be any naturally occurring amino acid
  Transcript Sequence Number=SeqID_18040
  Homolog annotation: Hit_ID=B9RFQ6; Match level="QueryCoverage=27%, HitCoverage=24%, E-value=5e-36, Identity=47%"; Hit description =Nucleic acid binding protein, putative
  Subcellular localization annotation: CTP_CleavageSite=53; ConfidenceScore=5.11e-01
IEIDQASVSSSPTSTPSHSSAKKPVASAHLHQVKAPHESILGKKPSTSLEQVKASHESILGKPSTPVEQARVTHESILGKKPSTSAEYASRTVTHDFNVSTTNCHPACQQSHPSEAQNKLPCYSYMGDSGGKVGNEHKLNKDQVYVRCINVSSASASNEMNPFNGLIDNSKGITLSYPSQSLTAIPSSKSLESAKANDSIPLLSAHKSLKTDHLHQDGAASAFGNKISTSFQCTGKDETFVFGVSSGQYHPTYPQAQSSLLPEQHNSGTHPHIESPRGSSASQSVVHNGVSSAQIQTWSSGSPFDGLDYMCIGFSRLNISECPRGTAETTSFQGAPTNDPSMKMPDISGHLTGFHDSRSCFHLGSNXSCYLNHSSDPIGSHPPCSDNCGAGHQPNLSIDMQSYRHSGDKPEYLPDSPRNEGTIGIILHALGILKTEKIFPTESNIADCICYGEMNLTGFDVKKALELAIRHEAVVMKKLLHDMPLFVAKDESLWKCVNVTNSKAKNPIEELERVHKYISSPDGYSAVKNSQSRYQAATILKRSCLQHCALGDILQVLHIVIVRKKWIVPHSSGSATVHKPYCNFWYVIIISFSILECKS

SEQ ID NO: 84015 - protein, 102 aa, Setaria italica
  Transcript Sequence Number=SeqID_18041
  Gene Ontology: Mol. function=electron carrier activity; Cellular component=cytoplasm; Biological process=oxidation reduction
  Homolog annotation: Hit_ID=B6T7V0; Match level="QueryCoverage=100%, HitCoverage=15%, E-value=1e-44, Identity=87%"; Hit description=NADPH reductase TAH18
  Pfam annotation: Domain name=Flavodoxin_1; Domain location=1-101; Score=1.1; E_value=0.0023; Accession=PF00258.17; Description =Flavodoxin
ASQTGKRPWTPPERVGREAERGGCPAVDVLSMDSFDPSRLPSERFVVFVVSTTGQGDPPDSMKGFWRYLLRKDLGAQWLEGVRHAVFGLGDSGYQKYNFADK

SEQ ID NO: 84016 - protein, 285 aa, Setaria italica
  Transcript Sequence Number=SeqID_18042
  Gene Ontology: Mol. function=structural constituent of ribosome; Cellular component=intracellular; Biological process=translation
  Homolog annotation: Hit_ID=B9RXF3; Match level="QueryCoverage=88%, HitCoverage=85%, E-value=1e-113, Identity=78%"; Hit description=50S ribosomal protein L4, putative
  Pfam annotation: Domain name=Ribosomal_L4; Domain location=88-278; Score=171.0; E_value=3.6e-48; Accession=PF00573.14; Description =Ribosomal protein L4L1 family
  Subcellular localization annotation: CTP_CleavageSite=57; ConfidenceScore=5.31e-01
LLRRAAAGPAPAPVAPRHSLPGAGPSLAKNLPAFCFNGYSTLLAPANEVLIPPELLSSKTVWTPDRELGQYEDLVARVTNFHNEDKGFMVLDGDVFDVPIRKDIVHRVVRWQLAKRQQGTHSTKTISEVSGTGRKPYAQKGTGRARHGTLRGCQFRGGATMHGPKPRSHAIKLQKKVRRLGLKIALSARTAEGKLLVFEDLEVPSHKTKNIVQYISQMDDTKKVLLVDGGDIDKKLKLATQNLHYVNVLPSIGLNVYSILQHDTLVMTRAAINRIVERMHTPINR

SEQ ID NO: 84017 - protein, 112 aa, Setaria italica
  Transcript Sequence Number=SeqID_18043
  Gene Ontology: Mol. function=hydrolase activity, acting on glycosyl bonds; Cellular component=extracellular region; Biological process =cell wall organization and biogenesis
  Homolog annotation: Hit_ID=B6U5Y4; Match level="QueryCoverage=100%, HitCoverage=26%, E-value=2e-54, Identity=87%"; Hit description =Polygalacturonase
DPMKWLYIYGVDGLSVSGGGTIDGSGQQWWASTCKRKKTPPCYSGPRPKTVHFEECRGVSVQGVTLQNGQQFHLTFTRCSDVKASFLRVIAPGDSPNTDGVHLNSSSHVQIT

SEQ ID NO: 84018 - protein, 91 aa, Setaria italica
  Transcript Sequence Number=SeqID_18044
  Gene Ontology: Mol. function=hydrolase activity, acting on glycosyl bonds; Cellular component=extracellular region; Biological process =cell wall organization and biogenesis
  Homolog annotation: Hit_ID=B6U5Y4; Match level="QueryCoverage=91%, HitCoverage=19%, E-value=3e-39, Identity=89%"; Hit description =Polygalacturonase
IWPVQLYGPCKRKLKLLISGSIVAPASPDEWAGRDPMKWLYIYGVDGLSVSGGGTIDGSGQQWWASTCKRKKTPPCYSGPRPKVNALLAPV

SEQ ID NO: 84019 - protein, 129 aa, Setaria italica
  misc_feature (109)..(110): Xaa can be any naturally occurring amino acid
  Transcript Sequence Number=SeqID_18045
  Gene Ontology: Cellular component=integral to membrane
  Homolog annotation: Hit_ID=Q10QI5; Match level="QueryCoverage=70%, HitCoverage=37%, E-value=3e-41, Identity=90%"; Hit description =Possible metal-binding domain in RNase L inhibitor, RLI family protein, expressed
  Pfam annotation: Domain name=DUF367; Domain location=88-129; Score= -65.5; E_value=0.028; Accession=PF04034.5; Description=Domain of unknown function (DUF367)
  Pfam annotation: Domain name=RLI; Domain location=50-84; Score=42.2; E_value=2e-09; Accession=PF04068.7; Description=Possible metal -binding domain in RNase L inhibitor, RLI
  Pfam module annotation: Pfam domain module=DUF367::RLI; Domain location=88-129::50-84
MGYNRHRRGRGSSSSSSRRAKQEASMDDGPGTSLPRQEEDTEEEFKGSRIQLAMWDFGQCDVKRCTGRKLSRFGLLKELRVTNGFGGVVLSPVGTQCVSKADHSIVQRXXLAVVDCSWARLSDVPFVKL

SEQ ID NO: 84020 - protein, 130 aa, Setaria italica
  misc_feature (16)..(16): Xaa can be any naturally occurring amino acid
  misc_feature (44)..(44): Xaa can be any naturally occurring amino acid
  Transcript Sequence Number=SeqID_18046
  Gene Ontology: Cellular component=cytoplasm
  Homolog annotation: Hit_ID=Q10QI5; Match level="QueryCoverage=93%, HitCoverage=49%, E-value=2e-33, Identity=63%"; Hit description =Possible metal-binding domain in RNase L inhibitor, RLI family protein, expressed
  Pfam annotation: Domain name=DUF367; Domain location=1-90; Score =96.9; E_value=6.8e-26; Accession=PF04034.5; Description=Domain of unknown function (DUF367)
MELVILTFAVPWLVAXNPVNYGRPCELSCVEALSAALINYCWGXEDTAHLLLGKFKWGHAFLSLNRDLLKAYSQCESGSEIINVQNSWLSSNSSVPKPPVNEKSRRSTEEGSEGDSDDDLPPLVENLNHL

SEQ ID NO: 84021 - protein, 278 aa, Setaria italica
  Transcript Sequence Number=SeqID_18047
  Gene Ontology: Cellular component=integral to membrane
  Homolog annotation: Hit_ID=Q10QI5; Match level="QueryCoverage=79%, HitCoverage=91%, E-value=2e-95, Identity=78%"; Hit description =Possible metal-binding domain in RNase L inhibitor, RLI family protein, expressed
  Pfam annotation: Domain name=DUF367; Domain location=88-215; Score =287.0; E_value=4.3e-83; Accession=PF04034.5; Description=Domain of unknown function (DUF367)
  Pfam annotation: Domain name=RLI; Domain location=50-84; Score=42.2; E_value=2e-09; Accession=PF04068.7; Description=Possible metal -binding domain in RNase L inhibitor, RLI
  Pfam module annotation: Pfam domain module=DUF367::RLI; Domain location=88-215::50-84
MGYNRHRRGRGSSSSSSRRAKQEASMDDGPGTSLPRQEEDTEEEFKGSRIQLAMWDFGQCDVKRCTGRKLSRFGLLKELRVTNGFGGVVLSPVGTQCVSKADHSIVQRKGLAVVDCSWARLSDVPFVKLRCGAPRLLPWLVAANPVNYGRPCELSCVEALSAALIICGEEDTAHLLLGKFKWGHAFLSLNRDLLKAYSQCESGSEIINVQNSWLSSNSSVPKPPVNEKSRRSTEEGSEGDSDDDLPPLVENLNHLNHNQDEESEEGSEGDSDNDLPPL

SEQ ID NO: 84022 - protein, 331 aa, Setaria italica
  Transcript Sequence Number=SeqID_18048
  Gene Ontology: Mol. function=thioredoxin-disulfide reductase activity; Cellular component=cytoplasm; Biological process=removal of superoxide radicals
  Homolog annotation: Hit_ID=Q6ZFU6; Match level="QueryCoverage=100%, HitCoverage=100%, E-value=1e-158, Identity=81%"; Hit description =Thioredoxin reductase
  Pfam annotation: Domain name=Pyr_redox; Domain location=159-254; Score=88.9; E_value=1.7e-23; Accession=PF00070.19; Description =Pyridine nucleotide-disulphide oxidore
  Pfam annotation: Domain name=Pyr_redox_2; Domain location=12-299; Score=177.9; E_value=2.9e-50; Accession=PF07992.6; Description =Pyridine nucleotide-disulphide oxidore
  Pfam module annotation: Pfam domain module=Pyr_redox::Pyr_redox_2; Domain location=159-254::12-299
MEGSAAAPLRTRVCIIGSGPAAHTAAIYAARAELKPVLFEGWMANDIAAGGQLTTTTDVENFPGFPDGIMGADLMDRCRAQSARFGTNILSETVTAVDFAARPFRVASDSTTVLADAVVVATGAVARRLHFPGSDTYWNRGISACAVCDGAAPIFRNKPIAVIGGGDSAMEEANFLTKYGSHVYIIHRRNTFRASKIMQARALENPKIQVIWDSEVVEAYGGAGGGPLAGVKVKNLVSGEVSDLQVSGLFFAIGHEPATKFLGGQLELDSDGYVATKPGSTHTSVKGVFAAGDVQDKKYRQAITAAGSGCMAALDAEHYLQEVGAQEGKSD

SEQ ID NO: 84023 - protein, 107 aa, Setaria italica
  Transcript Sequence Number=SeqID_18049
YGYVVSWQFSSLHLNLMTQANCSSAMLGEVFTAASFFQALDHFCSFFECFHLSNWSTVQWGWGLGLLSCCLAYINSGTTFFGLTVNTNAGILFVISITIAVMDGPIA

SEQ ID NO: 84024 - protein, 95 aa, Setaria italica
  Transcript Sequence Number=SeqID_18050
WQEEADSTGKRLGFSVEQGCWGDLVAPTFLSLAGAGLARSGRRPRASIPKEDYAWHWEWRKEMQNRSLQLMRRQREWLWEFWWRERGRVTCEAIQ

SEQ ID NO: 84025 - protein, 178 aa, Setaria italica
  misc_feature (104)..(104): Xaa can be any naturally occurring amino acid
  Transcript Sequence Number=SeqID_18051
  Gene Ontology: Mol. function=acid-amino acid ligase activity; Cellular component=intracellular; Biological process=ubiquitin -dependent protein catabolic process
  Homolog annotation: Hit_ID=B9SMZ3; Match level="QueryCoverage=92%, HitCoverage=4%, E-value=2e-44, Identity=58%"; Hit description=E3 ubiquitin protein ligase upl2, putative
LLRHVQSLRSTGVDIIIEIINKLCSSQEYRSNEPAISEEEKTDMETDVEGRDLVSAMDSSAEGMHDEQFSHLSIFHVMVLVHRTMENSETCRLFVEKGGLQALXALLLRPSITQSSGGMPIALHSTMVFKGFTQHHSTPLARAFCSSLREHLKSALEELDKVSSSVEMGLLLFLTWTS

SEQ ID NO: 84026 - protein, 396 aa, Setaria italica
  Transcript Sequence Number=SeqID_18052
  Gene Ontology: Mol. function=acid-amino acid ligase activity; Cellular component=intracellular; Biological process=ubiquitin -dependent protein catabolic process
  Homolog annotation: Hit_ID=B9SMZ3; Match level="QueryCoverage=100%, HitCoverage=10%, E-value=1e-114, Identity=51%"; Hit description=E3 ubiquitin protein ligase upl2, putative
ALHSTMVFKGFTQHHSTPLARAFCSSLREHLKSALEELDKVSSSVEMSKLEKGAIPSLFVVEFLLFLAASKDNRWMNALLSEFGDASREVLEDIGRVHREVLYKISLFEENKIDSEASSSSLASEAQQPDSSASDIDDSRYTSFRQYLDPLLRRRGSGWNIESQVSDLINIYRDIGRAASDSQRVDSDRYSNQGLPSSSQDQSSSSSDANASTRSEEDKKKSEHSSCCDMMRSLSYHISHLFMELGKAMLLTSRRENSPVNLSPSVISVAGSIASIVLEHLNFEGRSVSSEKEINVTTKCRYLGKVVEFVDGILLDRPESCNPIMVNSFYCRGVIQAILTTFQATSELLFTMSRPPSSPMDTDSKTGKDGKETDSSWIYGPLSSYGAVMDHLVTSS

SEQ ID NO: 84027 - protein, 647 aa, Setaria italica
  misc_feature (18)..(18): Xaa can be any naturally occurring amino acid
  Transcript Sequence Number=SeqID_18053
  Gene Ontology: Mol. function=transferase activity, transferring glycosyl groups; Cellular component=plastid outer membrane; Biological process=biosynthetic process
  Homolog annotation: Hit_ID=B6UFC8; Match level="QueryCoverage=95%, HitCoverage=77%, E-value=0.0, Identity=77%"; Hit description =Digalactosyldiacylglycerol synthase 1
  Pfam annotation: Domain name=Glycos_transf_1; Domain location=389 -549; Score=2.0; E_value=0.00044; Accession=PF00534.12; Description =Glycosyl transferases group 1
AEGDGAEGWTLARRKGEXSEEGRKEWEVVRMIRSGLKEFERRSLSSDMFAGLHGRGEFVEKFKLRLKSLNKDYQESKVVPPLDLSEILAYLVRQSGPFLDQLGIRRDLCDKLVEMLYSKRNGRLMYHSLSEDRTLAENINEDLDLRIARVLESTGYHADEGFWNDPAKYKISDNRRHVAIVTTASLPWMTGTAINPLFRAAYLARSAKQKVTLVVPWLCKSDQELVYPNNITFSSPEEQEIYIRNWLQERVGFEADFKISFYPSKFSKERRSIIPAGDTSQFISSKEADIAILEEPEHLNWYHHGKRWTDKFNHVIGVVHTNYLEYIKREKNGAIQSFLVKHINNWVTRAYCHKVLRLSAATQDLPRSVVCNVHGVNPKFLNIGEKIAADRERGQKVFFKGAYFLGKMVWAKGYRELIDLLSKHKKDLEGFKIDVYGNGEDSEAVQTAARKFDLSINFFKGKDHADNSLHGYKVFINPSVSDVLCTATAEALAMGKFVVCADHPSNDFFKSFPNCLTYKTSEEFVARVKEAMVSEPQPLTPEQRYSLSWEAATERFMEYSELDKVLNNTNGHPGRGGKINKLRKIPLLPKLSDVVDGGLAFAHHCLTGNEILRLATGAIPGTRDYDKQQCMDLNLLPPQVQHPVYGW

SEQ ID NO: 84028 - protein, 111 aa, Setaria italica
  Transcript Sequence Number=SeqID_18054
  Gene Ontology: Cellular component=cytoskeleton; Biological process =phagocytosis
  Homolog annotation: Hit_ID=B6TBE5; Match level="QueryCoverage=100%, HitCoverage=41%, E-value=1e-50, Identity=86%"; Hit description=ELMO domain-containing protein 2
MDQNAGSFLAVRRLSGAGIVHHHHSHSSPAEVVGLSTAWIGRGLSCVCAQRRDSDARLSFDLSPIQEECLQRLQNRIEVQYDSSNLEHQKALKALWRASFPGTELLGLVSD

SEQ ID NO: 84029 - protein, 298 aa, Setaria italica
  Transcript Sequence Number=SeqID_18055
  Gene Ontology: Cellular component=plastoglobule
  Homolog annotation: Hit_ID=Q8S9M1; Match level="QueryCoverage=82%, HitCoverage=82%, E-value=1e-82, Identity=60%"; Hit description =Probable plastid-lipid-associated protein 13, chloroplastic
  Pfam annotation: Domain name=PAP_fibrillin; Domain location=62-275; Score=-33.8; E_value=0.00044; Accession=PF04755.4; Description=PAP _fibrillin
  Subcellular localization annotation: CTP_CleavageSite=41; ConfidenceScore=5.61e-01
MAAAVALAPASPALLPSFRGCRDGRVRLSPRRPRYSSGRCRAMAQTFQGGPAASYAREMERLSAKESLLLAFKDAGGFEALVSGKTTEMQRIDVNERIVGLERLNPTLRPTTSPFLEGRWNFEWFGDSSPGAFAARLLFERSPTTVAHFTGLDVLIKDGYSKLSSNLKFLNTIQSKFLLTTQLSVEGPIRMKEESVEGLIEIPKISEETLPEQLKGLLGQTAGALQQLPSPIRDAVAEGLKLPLSGTFQRLFMISYLDEEILIIRDAAGAPDVLTRLEGPQPNPIDGTADAVISEYES

SEQ ID NO: 84030 - protein, 205 aa, Setaria italica
  Transcript Sequence Number=SeqID_18056
  Gene Ontology: Cellular component=cytosolic ribosome
  Homolog annotation: Hit_ID=B6SXN2; Match level="QueryCoverage=100%, HitCoverage=38%, E-value=1e-108, Identity=90%"; Hit description=GTP binding protein
  Pfam annotation: Domain name=PPR; Domain location=120-154; Score =39.1; E_value=1.8e-08; Accession=PF01535.12; Description=PPR repeat
  Pfam annotation: Domain name=PPR; Domain location=155-189; Score =27.2; E_value=6.5e-05; Accession=PF01535.12; Description=PPR repeat
  Pfam annotation: Domain name=PPR; Domain location=16-50; Score=12.7; E_value=0.28; Accession=PF01535.12; Description=PPR repeat
  Pfam annotation: Domain name=PPR; Domain location=85-119; Score=23.2; E_value=0.0011; Accession=PF01535.12; Description=PPR repeat
  Pfam module annotation: Pfam domain module=PPR::PPR::PPR::PPR; Domain location=120-154::155-189::16-50::85-119
FDEIPNERWEVVVTNRTFAVLLNRYAGAHKVQEAIEVFYLRKDYGFELDLVGFQILLMSLCRYKHVEEAEVLFREKKDEFPHVIKSWNIILNGWCVKGSMRDAQRIWNDIIASKVERDLFTYGTFIKALTKDGRIGSAVKLFNSMWEKGINPDVAICNCIIDQLCFKKRIPEALEIFGEMNDRRCQADVATYNTLIKYLCNIKRM

SEQ ID NO: 84031 - protein, 117 aa, Setaria italica
  misc_feature (80)..(80): Xaa can be any naturally occurring amino acid
  Transcript Sequence Number=SeqID_18057
  Homolog annotation: Hit_ID=Q9SYL7; Match level="QueryCoverage=60%, HitCoverage=13%, E-value=2e-17, Identity=59%"; Hit description =T30F21.2 protein
QNLEEARQAFKDSCSVQVYSIQASIPKDTAVLWNPEFVQAEELFNQPFDEENCLRDNRFCGVFNSFVKRTSSGKHVSSLXPPKPVNGAAVAAQSKPSVTPKEQSGTARQQDLPGVSS

SEQ ID NO: 84032 - protein, 274 aa, Setaria italica
  misc_feature (134)..(134): Xaa can be any naturally occurring amino acid
  Transcript Sequence Number=SeqID_18058
  Homolog annotation: Hit_ID=Q9SYL7; Match level="QueryCoverage=26%, HitCoverage=14%, E-value=4e-14, Identity=50%"; Hit description =T30F21.2 protein
  Pfam annotation: Domain name=CDC27; Domain location=2-274; Score= -101.1; E_value=0.003; Accession=PF09507.2; Description=DNA polymerase subunit Cdc27
LVAKIGADLQVIYSVSGWLKNNPQNYCVKLTSGPKLEEARQAFKDSCSVQVYSIQASIPKDTAVLWNPEFVQAEEHFDFSDDEEDDNIVSIASPELPKPQAPDPVTQTAEDTEADQKNMENKEDIPSNVKGCSXGVDFELTSECKSKSVNTINYSGITLKEKSSDPPINDNKQDSTAEPASTSPKRRKVLKTRIDERGREVTEVVWEGEASAGDKTEKNANTTTASRAAPSSKPQPAANADKSKAPSKAAGSKKPAKAGTGTKQGSIMSFFKKA

SEQ ID NO: 84033 - protein, 98 aa, Setaria italica
  Transcript Sequence Number=SeqID_18059
  Gene Ontology: Mol. function=isomerase activity; Biological process =tRNA processing
  Homolog annotation: Hit_ID=Q7XUR7; Match level="QueryCoverage=100%, HitCoverage=19%, E-value=2e-47, Identity=88%"; Hit description =OSJNBa0084K11.16 protein
HNISVTKDMEIVQKTPIRVLHRRSPLERKRIIHWMEIEKVKGSSNYYLLHLCTQAGTYIKEFVHGDLGRTHPSIGAIFGCRAEILQLDVTDVKMDFLQ

SEQ ID NO: 84034 - protein, 219 aa, Setaria italica
  misc_feature (83)..(83): Xaa can be any naturally occurring amino acid
  misc_feature (196)..(196): Xaa can be any naturally occurring amino acid
  Transcript Sequence Number=SeqID_18060
  Gene Ontology: Mol. function=isomerase activity; Cellular component =cellular_component; Biological process=tRNA processing
  Homolog annotation: Hit_ID=Q7XUR7; Match level="QueryCoverage=83%, HitCoverage=40%, E-value=1e-72, Identity=69%"; Hit description =OSJNBa0084K11.16 protein
FFLFCFCFILFLLFYCSIPLIIIIWLEGYLKLSRNVSQSCWIIDDERMGEASVEEIIGENIRVICRGDSCKFHAAGREDIDVXVMIWILELCLLIFAMLNISYMQVRVRNLKLVGNEIWTMMREGESEKQKQYTALIWTSRELAENDLHNISVTKDMEIVQKTPIRVLHRRSPLERKRIIHWMEIEKVKGSSNYYXLHLCTQVGTATSCHFPQIISLYI

SEQ ID NO: 84035 - protein, 190 aa, Setaria italica
  Transcript Sequence Number=SeqID_18061
  Gene Ontology: Mol. function=isomerase activity; Biological process =tRNA processing
  Homolog annotation: Hit_ID=Q7XUR7; Match level="QueryCoverage=100%, HitCoverage=38%, E-value=4e-92, Identity=84%"; Hit description =OSJNBa0084K11.16 protein
KGIQDQELCNLIQLPPEKVSKPCHLVISCMRSPIYIGGRYLKLSRNVSQSCWIIDDERMGEASVEEIIGENIRVICRGDSCKFHAAGREDIDVRMLGSGRPFLVELLNVRSIPSEIEVQQIEDRINNSEKKYVRVRNLKLVGNEIWTMMREGESEKQKQYTALIWTSRELAENDLHNISVTKDMEIVQKT

SEQ ID NO: 84036 - protein, 422 aa, Setaria italica
  Transcript Sequence Number=SeqID_18062
  Gene Ontology: Mol. function=binding; Cellular component=nucleus; Biological process=apoptosis
  Homolog annotation: Hit_ID=B6SWH5; Match level="QueryCoverage=100%, HitCoverage=82%, E-value=0.0, Identity=78%"; Hit description=Beta -catenin-like protein 1
PRPVPIGLASSLASLLTHDNADLAAAAASLLADLTDSDDPDDLAAVQALADALVEANALDLLVHNLSRFSEADPDEAEAVHNTLAVLENLLDLRPHLADKVCDGTKLLRWLLSRLKAREFDANKQYASEILAILLHNSPANQKRLGQINGVDGLLQAVAMYKSRDPKTSDEEEMLENLFDCLCCVLMPLENKERFVKAEGVELMIIIMKQKKLAYSSAIRTLDFAMTRFPPACERFVDVLGLKTAFAAFMGKIPVNKKNKKESYQEELEERIISIIASLFGGIIKGSRRMRLLGKFVENECEKIDRLMEFYTRYSDRVKEETERLDSLDLEDLEMDDDERYNRKLEAGLYTLQLIALILGHIWHSGNSQMRARVELLLRQNKLTKQDVKDILEEYHDNIGDLDGPEEKERAQARAKEIIAVL

SEQ ID NO: 84037 - protein, 108 aa, Setaria italica
  Transcript Sequence Number=SeqID_18063
GKKENLASPQKCIFFKQSGLLQGFKTPKEEIHKEINLIVNTSETEDLPSQLPKIEQNQLPADCGHPLKTPGIPAVNKSVTRIESAVGEIEGILLAHGRCILLGQLRCY

SEQ ID NO: 84038 - protein, 171 aa, Setaria italica
  Transcript Sequence Number=SeqID_18064
  Gene Ontology: Mol. function=hydrolase activity, hydrolyzing O -glycosyl compounds; Cellular component=cell wall; Biological process= carbohydrate metabolic process
  Homolog annotation: Hit_ID=B6TH17; Match level="QueryCoverage=98%, HitCoverage=61%, E-value=5e-89, Identity=91%"; Hit description =Xyloglucan endotransglucosylase/hydrolase protein 15
  Pfam annotation: Domain name=Glyco_hydro_16; Domain location=8-171; Score=264.5; E_value=2.5e-76; Accession=PF00722.13; Description =Glycosyl hydrolases family 16
AAAAAGRMDDGLEVTWGDGRGSVSPDGQTLTLSLDHTSGSGFRSRDTYLFARADMQIKLVPNNSAGTVTTFYFISEGPWDVHDEVDLEFLGNVSGQPYTLHTNVFGNGNGGKEQQFHLWFDPTTDFHTYSIEWTQHHILVLVDGTPIREFKNHADRGVPYPSSQRMRLYGS

SEQ ID NO: 84039 - protein, 282 aa, Setaria italica
  Transcript Sequence Number=SeqID_18065
  Gene Ontology: Mol. function=hydrolase activity, hydrolyzing O -glycosyl compounds; Cellular component=cell wall; Biological process= carbohydrate metabolic process
  Homolog annotation: Hit_ID=B6TH17; Match level="QueryCoverage=89%, HitCoverage=89%, E-value=1e-125, Identity=85%"; Hit description =Xyloglucan endotransglucosylase/hydrolase protein 15
  Pfam annotation: Domain name=Glyco_hydro_16; Domain location=32-215; Score=346.8; E_value=4.1e-101; Accession=PF00722.13; Description =Glycosyl hydrolases family 16
  Pfam annotation: Domain name=XET_C; Domain location=227-279; Score =91.8; E_value=2.4e-24; Accession=PF06955.4; Description=Xyloglucan endo-transglycosylase (XET)
  Pfam module annotation: Pfam domain module=Glyco_hydro_16::XET_C; Domain location=32-215::227-279
ATTAMAFSSGARALAVALLLGLCTAAAAAGRMDDGLEVTWGDGRGSVSPDGQTLTLSLDHTSGSGFRSRDTYLFARADMQIKLVPNNSAGTVTTFYFISEGPWDVHDEVDLEFLGNVSGQPYTLHTNVFGNGNGGKEQQFHLWFDPTTDFHTYSIEWTQHHILVLVDGTPIREFKNHADRGVPYPSSQRMRLYGSLWDAEDWATQGGRVKTDWSQAPFMAQYRKFTAADASSSSTSASGYGQELDAAAQQAMKWARDNYMVYDYCADSKRFPQGVPPECSMP

SEQ ID NO: 84040 - protein, 43 aa, Setaria italica
  Transcript Sequence Number=SeqID_18066
  Gene Ontology: Mol. function=DNA binding; Cellular component=nucleus; Biological process=regulation of transcription
NANSSDTKCGSSIEEQEENRDDQAEGQVQFIDFLEVGAASHRQ

SEQ ID NO: 84041 - protein, 431 aa, Setaria italica
  Transcript Sequence Number=SeqID_18067
  Gene Ontology: Mol. function=phosphoinositide phospholipase C activity; Biological process=intracellular signaling cascade
  Homolog annotation: Hit_ID=B6U694; Match level="QueryCoverage=87%, HitCoverage=94%, E-value=1e-164, Identity=75%"; Hit description =Hydrolase/ protein serine/threonine phosphatase
  Pfam annotation: Domain name=PMD; Domain location=1-200; Score=27.7; E_value=4.3e-10; Accession=PF10536.1; Description=Plant mobile domain
FPDTMRGFVSPRYLPLLADFRKIREYAWGAAALAHLYRGLSVAVTPNATTQFLGSATLLMAWIYEYLPITQPQQKNQSTLLPRACRWNFGGATRGQRKKVMEWRKVFEQLQLSEVNWNPYKDMNPAIVPEYCIAADNICYSRTWLISFNIKEVYVPDRFARQFGREQGRLHGVPMWARRTWSKWKDWRVEYAREIEEFHQLVGCRFTPSAETNINSLPPDEPVAGQNATGCNRNTSHDISSMVEDLKNDLPVIDRYLEGHLLPAEVASFLERVGTMIKNYSPPQGNRRKHQAAQRPTGPVRSKNPRKRGKPSLFQDPSNPHQYPGALVPYQASKCDTVFDGTVPLLNGGEEFKEHEAMEPWQISHLTMTPSSSSLDSSSPESMKQGQQDGDETQIPRDTDDLRRSGRLCVQLKMFKHRDGVDVEAANPIFL

SEQ ID NO: 84042 - protein, 75 aa, Setaria italica
  Transcript Sequence Number=SeqID_18068
FFLNNVCNKRFGGREFRYLQEVKASSSTLLNSTTPAVLTTAVITRFTSNSSIDQHHPKSTPPRSVPSQISTSVFI

SEQ ID NO: 84043 - protein, 476 aa, Setaria italica
  Transcript Sequence Number=SeqID_18069
  Gene Ontology: Biological process=ubiquitin-dependent protein catabolic process
  Homolog annotation: Hit_ID=Q5VMP0; Match level="QueryCoverage=99%, HitCoverage=65%, E-value=0.0, Identity=82%"; Hit description=F -box/LRR-repeat MAX2 homolog
HAAELGAIAGSCPSLRKLVAPCVFNPRYVDFVGDEALLAIATRCSKLTVLRLREPFEPASTSQGEDVAITVAGLVSFFAALPALEDFTLDLRHNVLETAPAMEALARRCPRIKFLTLGGFQGLCKASWLHLDGVAVCGSLESLCIKRCLDLTDASLAAIGRGCGRLAKFAIHGCDLVTSAGIRRLAMALRPTIKEVSILHCRLLDTATCLTALSPIRDRIERLELNCVWREVEQPESVANGTTGCNHEDDDLGEVSYESASKKCRYMELDDLVSWEMLRSLSLWFPAGELLSPLISAGLDSCPVLEEISIKVEGDCRTCARPGPRVFFGLSDLAGFPVLAKMKLDLSEAVGYALTAPAGQMDLSLWERFYLQGIDSLITLYELDYWPPQDKEVNQRSLTLPAVGLLQRCIGLRKLFVHGTTHAHFLSFFLMMPNLRDMQLREDYYPAPENDMMITEMRAESWLRFEMQLNSRLVED

SEQ ID NO: 84044 - protein, 146 aa, Setaria italica
  Transcript Sequence Number=SeqID_18070
  Homolog annotation: Hit_ID=O04530; Match level="QueryCoverage=62%, HitCoverage=14%, E-value=1e-24, Identity=59%"; Hit description =F20P5.12 protein
DIFPVFVGAALAGAPGAAPGSDSGGEVRWKGACFYENEAWLVLHNESGSKYGGGTLHIKTTKAHSWTCIDLYVFATPYRVTWDYYFLGREHTLDFKEWESEAEYEYVKRNGVSIFLMPSGTIGTLRALWEVFPLFTNTAWGENANL

SEQ ID NO: 84045 - protein, 94 aa, Setaria italica
  Transcript Sequence Number=SeqID_18071
  Homolog annotation: Hit_ID=O04530; Match level="QueryCoverage=86%, HitCoverage=14%, E-value=2e-23, Identity=58%"; Hit description =F20P5.12 protein
HHFFQGLDLPEIIVESERRGITFDKLLTVPEKDNWVYEDGQSASCIAFVLMMYKEAGLFGPITNSVEVTEFTIKDAYTLNFFEDNYKYIVNLYC

SEQ ID NO: 84046 - protein, 386 aa, Setaria italica
  Transcript Sequence Number=SeqID_18072
  Homolog annotation: Hit_ID=O04530; Match level="QueryCoverage=99%, HitCoverage=67%, E-value=1e-157, Identity=66%"; Hit description =F20P5.12 protein
GYKSRESEAEYEYVKRNGVSIFLMPSGTIGTLRALWEVFPLFTNTAWGENANLNFLKKHMGATFEERPKPWVSELNTDDIHSGDFLVLSKIRGRWGGFETLEKWVTGAYAGHTAVCLRDSDGKLWVGESGNENEKGEDVIAILPWEEWWEFEVTKDDSNPQIALLPLHPDLRAKFNETAAWNYAKNMSGKPYGYHNMIFSWIDTISDNYPPPLDAHVVASVMTVWTKLQPEYAANLWKEALNKRLGTKGLDLPEIIVESERRGITFDKLLTVPEKDNWVYEDGQSASCIAFVLMMYKEAGLFGPITNSVEVTEFTIKDAYTLNFFEDNSTRLPEWCNKGDSVKLPFCQIKGRYRMELPGYNTMKPYAHMNERCPSLPPDYKRTKGC

SEQ ID NO: 84047 - protein, 155 aa, Setaria italica
  misc_feature (29)..(29): Xaa can be any naturally occurring amino acid
  Transcript Sequence Number=SeqID_18073
  Gene Ontology: Mol. function=serine-type peptidase activity; Cellular component=chloroplast; Biological process=proteolysis
  Homolog annotation: Hit_ID=B6U4F7; Match level="QueryCoverage=100%, HitCoverage=19%, E-value=6e-68, Identity=86%"; Hit description =Acylamino-acid-releasing enzyme
MATTQASEAEADKGLPLGMDATMVDEYAXSQSKLLQEFVKIPSCGKAWIFNSKDENTSRAVVSIGQSDLLGNKRRKFLLNSHISKSASKSVDFHWSPFPTEISGVSAVIPSPSGEKLLLVRNSEDDSPTKLEIWGSCQLKNEIHIAKSVHGSLYT

SEQ ID NO: 84048 - protein, 215 aa, Setaria italica
  misc_feature (67)..(67): Xaa can be any naturally occurring amino acid
  Transcript Sequence Number=SeqID_18074
  Gene Ontology: Mol. function=amine oxidase activity; Biological process=cellular amine metabolic process
  Homolog annotation: Hit_ID=B9N3N0; Match level="QueryCoverage=95%, HitCoverage=33%, E-value=6e-54, Identity=53%"; Hit description =Copper amine oxidase (Fragment)
  Pfam annotation: Domain name=Cu_amine_oxidN3; Domain location=38-138; Score=144.1; E_value=4.2e-40; Accession=PF02728.8; Description=Copper amine oxidase, N3 domain
AASRHAVAVVRFRGEASVLAVDLAGSAVTPLPSRLGYPTMTMDEQVSLCFAPFADPKFNATIRRRGXSGMSDVACLPISLGWYGPTEENRRLIKVQCFSAEGTANFYMRPIEGLTVLVDMDTSEVVHISDRGAGIPIPDAANTDYRLARHMQERQDAGLGYQKVRAPSMEPAPSGPGVELVDGHTVRWGGWELHLKADARAGMVVSRASGCLGTR

SEQ ID NO: 84049 - protein, 150 aa, Setaria italica
  Transcript Sequence Number=SeqID_18075
  Gene Ontology: Mol. function=metal ion binding; Cellular component =intracellular
  Homolog annotation: Hit_ID=Q7F9L7; Match level="QueryCoverage=86%, HitCoverage=22%, E-value=2e-43, Identity=65%"; Hit description =OSJNBa0006A01.7 protein
  Pfam annotation: Domain name=RWD; Domain location=20-150; Score=51.3; E_value=3.8e-12; Accession=PF05773.14; Description=RWD domain
HELAEAGGEEVALTEEEVHANDQRQEDEICALEAIFEDAVVILDRKGGQRCFQVHVHIEIPDAIDVSTRLSYGDGTLKYGAASDAGADADDLVYKFRVEHLPPILLTCLLPASYPSHRPPFFTISTYWLDKGMISSLCRMLDMLWEEQLG

SEQ ID NO: 84050 - protein, 107 aa, Setaria italica
  Transcript Sequence Number=SeqID_18076
  Gene Ontology: Mol. function=metal ion binding
  Homolog annotation: Hit_ID=Q6L4G5; Match level="QueryCoverage=98%, HitCoverage=10%, E-value=5e-50, Identity=87%"; Hit description =Putative zinc finger protein
  Pfam annotation: Domain name=Hemerythrin; Domain location=39-100; Score=32.3; E_value=2e-06; Accession=PF01814.15; Description =Hemerythrin
EGVAALEARCRFLFAVYRHHCHAEDAVIFPALDIRVKNVAGTYSLEHKGENDLFAHLFALLQLDVQNDDAIRRELASCTGAIQTSVTQHMSKEEEQVFPLLVKKFSH

SEQ ID NO: 84051 - protein, 88 aa, Setaria italica
  Transcript Sequence Number=SeqID_18077
  Gene Ontology: Mol. function=hydrolase activity, acting on ester bonds; Cellular component=plasma membrane; Biological process =metabolic process
  Homolog annotation: Hit_ID=Q9S816; Match level="QueryCoverage=100%, HitCoverage=16%, E-value=2e-35, Identity=76%"; Hit description =Phosphatidylglycerol specific phospholipase C
  Pfam annotation: Domain name=Phosphoesterase; Domain location=1-86; Score=-130.2; E_value=0.033; Accession=PF04185.6; Description =Phosphoesterase family
HPSHDVAHGQRLVKEVYEALRSSPQWHETLLVITYDEHGGFFDHVPTPTEGVPSPDGIVSAPPIGFAFDRLGVRVPAMFISPWIEPST

SEQ ID NO: 84052 - protein, 86 aa, Setaria italica
  Transcript Sequence Number=SeqID_18078
  Subcellular localization annotation: CTP_CleavageSite=36; ConfidenceScore=5.47e-01
LLLFVLCFPCNSASASSVGSMFQISPTPALFRFRLLVGLVWLVGSVPGLGYSPEAYIHSLDLETHTHRSFLGLFDTVSIKKNHLPH

SEQ ID NO: 84053 - protein, 141 aa, Setaria italica
  Transcript Sequence Number=SeqID_18079
  Homolog annotation: Hit_ID=Q9LMU3; Match level="QueryCoverage=36%, HitCoverage=12%, E-value=2e-13, Identity=66%"; Hit description =F2H15.8 protein
SGILLLWGYRYRRSQDSVKAMASAVHHLLALLLRPLPPPAYHPRHSFSPRPARLHSFFPAPGCRLGTHAVALAEPDLVPPDEEEEDDDARFVVVTFYKFVPLEDPRAEVASHLHFLQGRDIHGRIYLNEQGINAQYSGPRK

SEQ ID NO: 84054 - protein, 95 aa, Setaria italica
  Transcript Sequence Number=SeqID_18080
GAEPQRDGEEQRRPLLSSTSSSSPAASAAEQHQQQYQFLGRSSSSVLRGGGLAWGGPEVSADEVRSAASFSPAAGFYPPPQALAAHGDNLYPYPP

SEQ ID NO: 84055 - protein, 144 aa, Setaria italica
  Transcript Sequence Number=SeqID_18081
  Gene Ontology: Cellular component=extracellular region; Biological process=plant-type cell wall organization and biogenesis
  Homolog annotation: Hit_ID=B6T5Z7; Match level="QueryCoverage=79%, HitCoverage=43%, E-value=8e-61, Identity=95%"; Hit description=Alpha- expansin 1
  Pfam annotation: Domain name=DPBB_1; Domain location=74-144; Score =80.0; E_value=8.8e-21; Accession=PF03330.10; Description=Rare lipoprotein A (RlpA)-like double
DLSSLTAMEATGSFTRVIALLAAASLLWKEAACFSASGLNKAFATFYGGSDASGTMGGACGYGNLYSTGYGTNTAALSTALFNDGASCGQCYRITCDYQADPRFCIIGTSVTITATNLCPPNYALPNDNGGWCNPPRQHFDIGP

SEQ ID NO: 84056 - protein, 223 aa, Setaria italica
  Transcript Sequence Number=SeqID_18082
MADSTAMTVDFLRARLLSERSVSRAAKERADELAKRVAELEEQVRAVTAQRRQAERAAAEVVAILESQGFGGHLSDDVADDSDSDQDGERQEDDAKGRGDTPSAPGEEEPVAVKVEAEDALSGTAQPGGLSWKGRSVSPRKATQLKHKHGRRYFYLLSSSDSSPKYRMGQSCRKNKRRIELMSNGSRSAAPEDNGGRAGSQKRRQDGSDCTEDGQADMGGEVG

SEQ ID NO: 84057 - protein, 89 aa, Setaria italica
  Transcript Sequence Number=SeqID_18083
  Gene Ontology: Mol. function=metal ion binding
QMPLSIGQSGWNGQHLIHQEGFQRNVRARHNHNVSLEPRPAPTYTANTIHLPSFGSAASASLGTSVERNQAPVSVPARTVPSGLYSVLN

SEQ ID NO: 84058 - protein, 523 aa, Setaria italica
  Transcript Sequence Number=SeqID_18084
  Gene Ontology: Mol. function=metal ion binding
  Homolog annotation: Hit_ID=Q40221; Match level="QueryCoverage=89%, HitCoverage=87%, E-value=2e-35, Identity=31%"; Hit description =Protein containing C-terminal RING-finger
  Pfam annotation: Domain name=PHD; Domain location=477-521; Score= -0.2; E_value=0.028; Accession=PF00628.21; Description=PHD-finger
  Pfam annotation: Domain name=zf-C3HC4; Domain location=478-518; Score= 49.5; E_value=1.3e-11; Accession=PF00097.17; Description=Zinc finger, C3HC4 type (RING finger)
  Pfam module annotation: Pfam domain module=PHD::zf-C3HC4; Domain location=477-521::478-518
LLFLLARSNHSHIQLPEMDHIQPKNVPHNESLPLGQKLLVHRRSDAPLRIDPSSHGNMTVRSNDLPSSSHAVQPVGYRVGNQGTAHASFVHCPAGSSSSHLAEPAVSYPHRSEEGFPPVSSHMDNRRTAMKRKNPIINPVGFSANGYYVGSSSNTQLSNSVQPNPAPPAEPFLPQMPLSIGQSGWNGQHLIHQEGFQRNVRARHNHNVSLEPRPAPTYTANTIHLPSFGSAASASLGTSVERNQAPVSVPARTVPSGAPGLTSRALERTYYPAIGSINLSVGAVPTVPSSGSATFANGGYAPRTVHGGSVPIYPHPAPAASSGSRAMPHGAVIRSYPPATSAATSTSMRIAQPLPARTAASSRHGRHVSVGHASNGRNRRARSSYYALHPLMLEAERFMMLDQLVFYESRAAAADPHRNMRLDIDNMSYEELLALGEFMGNVNTGLADEKIAKCVREVVCCSSDLTQNDQDDQDDGSCVICLEGYKDKDVLGTLKCNHDFHADCIKKWLQTKNSCPVCKAAAA

SEQ ID NO: 84059 - protein, 100 aa, Setaria italica
  misc_feature (23)..(23): Xaa can be any naturally occurring amino acid
  Transcript Sequence Number=SeqID_18085
  Gene Ontology: Mol. function=binding; Cellular component=protein complex
  Homolog annotation: Hit_ID=Q5Z876; Match level="QueryCoverage=83%, HitCoverage=4%, E-value=6e-33, Identity=82%"; Hit description =Proteasome activator subunit 4-like
  Subcellular localization annotation: CTP_CleavageSite=43; ConfidenceScore=5.11e-01
MQAAHSGADSTDGIRYAVTGKKXGTRAPVLRQKVLECLCSPVPQSMATSVLAKRYAFLSVALIEISAPKMSPAEKQYHVKILDELLDNMNHSSAQMELMN

SEQ ID NO: 84060 - protein, 143 aa, Setaria italica
  misc_feature (100)..(100): Xaa can be any naturally occurring amino acid
  misc_feature (115)..(115): Xaa can be any naturally occurring amino acid
  misc_feature (119)..(119): Xaa can be any naturally occurring amino acid
  misc_feature (123)..(123): Xaa can be any naturally occurring amino acid
  Transcript Sequence Number=SeqID_18086
  Gene Ontology: Mol. function=binding; Cellular component=protein complex
  Homolog annotation: Hit_ID=Q5Z876; Match level="QueryCoverage=85%, HitCoverage=6%, E-value=7e-51, Identity=78%"; Hit description =Proteasome activator subunit 4-like
QHIECHLWNQLLNGQLALPSVESAPEWAACIRYAVTGKERSGTRAPVLRQKVLECLCSPVPQSMATSVLAKRYAFLSVALIEISAPKMSPAEKQYHVKIXDELLDNMNHSSAQVXEAIXVAMXVTCSNIRLSESFGTGCSPEE

SEQ ID NO: 84061 - protein, 1730 aa, Setaria italica
  misc_feature (822)..(822): Xaa can be any naturally occurring amino acid
  Transcript Sequence Number=SeqID_18087
  Gene Ontology: Mol. function=binding; Cellular component=protein complex; Biological process=multicellular organismal development
  Homolog annotation: Hit_ID=Q5Z876; Match level="QueryCoverage=100%, HitCoverage=95%, E-value=0.0, Identity=81%"; Hit description =Proteasome activator subunit 4-like
  Pfam annotation: Domain name=HEAT; Domain location=1073-1109; Score =4.7; E_value=13; Accession=PF02985.14; Description=HEAT repeat
  Pfam annotation: Domain name=HEAT; Domain location=1360-1396; Score =16.0; E_value=0.15; Accession=PF02985.14; Description=HEAT repeat
  Pfam annotation: Domain name=HEAT; Domain location=1532-1568; Score =18.5; E_value=0.027; Accession=PF02985.14; Description=HEAT repeat
  Pfam annotation: Domain name=HEAT; Domain location=1574-1610; Score =14.4; E_value=0.48; Accession=PF02985.14; Description=HEAT repeat
  Pfam annotation: Domain name=HEAT; Domain location=892-928; Score =9.5; E_value=3.3; Accession=PF02985.14; Description=HEAT repeat
  Pfam module annotation: Pfam domain module=HEAT::HEAT::HEAT::HEAT::HEA T; Domain location=1073-1109::1360-1396::1532-1568::1574-1610::892-928
NKFVVQIKWGGLLVRLLRKHGKRLSLAVQWRPLYDTLIKTHFKRNMGPEGWKVRKQHFETVTSLVRASRNFFPEGAAAEIWSEFRPLLDNPWHNSAFEGVGFLRLFLPVNSRNQDHFTIDWIAQCLDIWDSVTNCNFWDIQWASIIARCIKKFKSVNWDDFLPLLFTRYLNMFEVPISSRNGSYPFPVEVPGNTRFLFSSKTRTLSKAIAKSIVYLMKPKSLAFEYFEKLINLLEQFYHPSNGGRWTYSLERFLRHLVVYFEKRLQQEQFDTTVEEHDQTYLGKEERVVFIKAILKLLDRGQYSKDNSLAETVSIAISILSYVEPTLVLPFVATNFQLALETTTATHQLKNAVTSVAFSGRPLLLCSLCSSQSDDSSVVDSFSDLIVTSLSNALLGMDANDPPKTIATMQLIGSIFSNLATVGDNDDVPAFLQSTSLSNWLDEFFSRLFSVLQNLESSSPINEGYQTSFMSGTFLVEDSSYYFCMLEILLGKLSKPLFNQSLKRITKFVNANILPGATSEVGLLCCACVHSYPEEASVHLVKPILMTIMSSFEGTPTTGYVGRAVPDKMSKKAALSPALETALDYYLRVLAIAITYAGPVSLKYKEELNHIITAAFQAPSWKVNGAGDHLLRSLLGTLVSYYSTDQHKPFTCQPIGNIIEPWGCSKAHQDREVEMLNFPPKWHDPSQDELSFANELLQFHFQSALEDLLTICQTKVNSETGDEKEHLKVTLLRILSALHGVMSCLPEMRPSYKDGRSKEVEPIFFIAGSYGSNVGSSEMREKAAEFVHVACRYLLKERTDDSILLALVVRVIDALVNYGSLXYLEWSSHVQAWKLESASIIEPPCNFIVPFHAQGKKRPRWALVDKANLHSTWRCSQSSYHRYRTNADVSPSVLMTDLMSDLIDLSLHNYETVRSYAGRSLTKLLKRWPSLISNCVPTLTGYLRDPKAPEHVVLGSCSILSSRTVLRHLTTDSVSLSSFIMGILESSHHESLKCQKAITELFVMYNICFSGISRSFFKNSESQVDKPVFLSLVPQINALGFETNSLHWRYNLMANRVLLLLILASRNESGIYSQMLAETAGHFLKNLKSQLPHSRMLAISALNTLLQGSPHKACPQGSQQSLDHPEYCNTSSTGEILNQIIQEEGFMNETLNSLSNVHIISDNDGSSKASYGASSFQSGSDKAITNFYFDFSASWPRTPSWISLVGGHTFYSSFARIFKRLIQQCGMPVMSSLQTALEDFLSSKERSRQCVAAEAMAGMLHSDITGNLESEKNWLMVQLQKIMLVPSVESAPEWAACIRYAVTGKERSGTRAPVLRQKVLECLCSPVPQSMATSVLAKRYAFLSVALIEISAPKMSPAEKQYHVKILDELLDNMNHSSAQVREAIGVAMCVTCSNIRLSESFGTGCSPEELCGDVRMIEQTGNEYWSKCLTDGANELAVSIQNSIQSKQPELTSDSAAENSMDHGEQADAKRMETIFHFMIASLKSGRSSVLLDIIIELLYAVLSLQETSNKDLSLLAKSAFELLKWRILHRPFLETAISSILSSVNDPNWRTRSALLSYLRTFTYRHTFILSGSEKSQIWQTIEKLLVDNQVEVREHAAGVLASLMKGVDEDLSKDFRDRSYAQAQRIIVARRRNSKSGHSVASIHGAVLALTASVLSVPYDMPSWLPAHVTLLARFISEPSPIKSTVTKAVAEFKRTHADTWGIQKDAFTEDELEVLRDTSSSSSYFA

SEQ ID NO: 84062 - protein, 93 aa, Setaria italica
  Transcript Sequence Number=SeqID_18088
GPLLPRWWRNCSFKIFINCALHQSRGQLGLIRWPRLDFKVSAASEVELLGASSTSSSSSLLALSTVCTRGVASQISSDPGRGAEQCKLTSSCT

SEQ ID NO: 84063 - protein, 201 aa, Setaria italica
  misc_feature (20)..(20): Xaa can be any naturally occurring amino acid
  Transcript Sequence Number=SeqID_18089
  Homolog annotation: Hit_ID=Q259K5; Match level="QueryCoverage=95%, HitCoverage=27%, E-value=1e-54, Identity=54%"; Hit description =H0402C08.8 protein
VLLCVILEIEDEDEGSIFYXNSTNLAVQVDDKKTVGLNAFARIAPSCPIIADLVTVHNLFDVLTSSSGGRLHFLVYDKYLKSLDRELRSVKGIMQSPLASSLHLDAGECILAIDGDKPIHPVLQHIGISAWPGRLVLTTHALYFQSIRVGYGDNIVKYDLATDSNQVIKRDLTGPLGVRLFDKAVMYKSSTLTDPILFRFP

SEQ ID NO: 84064 - protein, 176 aa, Setaria italica
  misc_feature (22)..(22): Xaa can be any naturally occurring amino acid
  Transcript Sequence Number=SeqID_18090
MLLSCRSLATWVRRLVACMGAXGCFGCCAKPTPITAVDEPSKRLRIQGRSVRKASLSEDFWSTSAHEVENSGIQSQRSMSSISTVAQSSDQHGAGSSSNPNEFVNQGLMLWNQTRQQWVGNKKRHSRSQQLREPKLSWNATCESLLGSNKPFSQPIPLGEMVDLLVDAWEQEGLYD

SEQ ID NO: 84065 - protein, 137 aa, Setaria italica
  Transcript Sequence Number=SeqID_18091
  Gene Ontology: Mol. function=sequence-specific DNA binding; Cellular component=nucleus; Biological process=regulation of transcription, DNA-dependent
  Homolog annotation: Hit_ID=Q2RAA7; Match level="QueryCoverage=38%, HitCoverage=7%, E-value=9e-26, Identity=98%"; Hit description =Associated with HOX family protein, expressed
  Pfam annotation: Domain name=Homeobox; Domain location=46-97; Score =7.2; E_value=0.0024; Accession=PF00046.21; Description=Homeobox domain
  Subcellular localization annotation: CTP_CleavageSite=40; ConfidenceScore=5.30e-01
SRARHVGPASPTSNSIARSLALCISCSLSCPWRLATYACNATGLASSCRTLIGPQLSLYFLHPYPKDSDKIMLAKQTGLTRSQVSNWFINARVRLWKPMVEEMYLEETKDQDGGNDEGKSGGGTKSGDTSNGVDGVT

SEQ ID NO: 84066 - protein, 272 aa, Setaria italica
  Transcript Sequence Number=SeqID_18092
  Gene Ontology: Mol. function=sequence-specific DNA binding; Cellular component=nucleus; Biological process=regulation of transcription, DNA-dependent
  Homolog annotation: Hit_ID=Q2RAA7; Match level="QueryCoverage=100%, HitCoverage=39%, E-value=8e-29, Identity=60%"; Hit description =Associated with HOX family protein, expressed
VSNWFINARVRLWKPMVEEMYLEETKDQDGGNDEGKSGGGTKSGDTSNGVDGVTPRADGGSGAAMSKAAGRVGAEGASSAKGVGGVVHGSTLLELAGDQHTAHPGFYEDEGDDADDVERRLKKARGDEPGAPFHSHHVHDMAALHAQAAAAARQQHEEVSHRELLMKFMESGGGGAGARDQHHQDGGGYSLFAPGPYGQFGSEPFAFAGNGGVSLTLGLPHGAGGGAEQTASFLMGSSAGGDGGSHGGAGGYDMNMQSTKSFAAQLMRDFVA

SEQ ID NO: 84067 - protein, 32 aa, Setaria italica
  Transcript Sequence Number=SeqID_18093
PHGGSHGGAGGYDMNMQSTKSFAAQLMRDFVA

SEQ ID NO: 84068 - protein, 74 aa, Setaria italica
  Transcript Sequence Number=SeqID_18094
  Subcellular localization annotation: CTP_CleavageSite=52; ConfidenceScore=5.23e-01
KLHRPNFFILLIAGPFISTTPSHYSNRNCIILIRNSNLPRMLLGNCLTESTSAMIVWTSTQPSLVGGDNSLSVG

SEQ ID NO: 84069 - protein, 112 aa, Setaria italica
  Transcript Sequence Number=SeqID_18095
RASELWQKQHKSSIVEITVSLPCRECCWELPNGEHVGNDSVDEYQPLCGGDNSLSWDFLEMSTALPRRSSRGDLCPSSLDLGDEHRVGPSQRCAGSWSHSAAATATAAVSQS

SEQ ID NO: 84070 - protein, 155 aa, Setaria italica
  Transcript Sequence Number=SeqID_18096
  Gene Ontology: Mol. function=receptor activity
  Homolog annotation: Hit_ID=B9SZQ8; Match level="QueryCoverage=63%, HitCoverage=20%, E-value=3e-17, Identity=53%"; Hit description =Hydrolase, acting on glycosyl bonds, putative
  Subcellular localization annotation: CTP_CleavageSite=56; ConfidenceScore=5.44e-01
MRKWTKKLGHTLSRLITSKPAFAFSRPRPTPPAPPPPPPVSSIPPQPPELLPFPTSAMPHHGSHRPPPHAPGGHVFPRATSTVLPDPSRFFAPPLLAAPLPTNSFFQNFVLKNGDQPEYFHPYSIRSPGGAALDVCYPTRNHSPSFVIQTFVPDL

SEQ ID NO: 84071 - protein, 96 aa, Setaria italica
  Transcript Sequence Number=SeqID_18097
FRIPLPNQEEGRKRIVFASAIPSAPPCPILNSPTRHRPSQASDPHPIQVQGTSLFPAAPPPGRIPLAMKITALLVLKSPGDSSASSSSASGGGEQR

SEQ ID NO: 84072 - protein, 98 aa, Setaria italica
  Transcript Sequence Number=SeqID_18098
PDPIRQLRTSTKKQVKQPLRLTQVRKDRGSRTEPLRLAPADPVRCERSAKWIRRLLDFEGPGVLLANLLLLLLCEVILDVEYLADLSGGLVFHHVGEL

SEQ ID NO: 84073 - protein, 70 aa, Setaria italica
  Transcript Sequence Number=SeqID_18099
ACGQLHVPLRRHGILRRFWPQLVPQDRCRRRPPPAGARFSIQAPAATNHPRPKLRRPIRARTSVGRHPSI

SEQ ID NO: 84074 - protein, 131 aa, Setaria italica
  Transcript Sequence Number=SeqID_18100
  Homolog annotation: Hit_ID=Q10F47; Match level="QueryCoverage=90%, HitCoverage=4%, E-value=1e-53, Identity=88%"; Hit description=SABRE, putative, expressed
  Subcellular localization annotation: CTP_CleavageSite=32; ConfidenceScore=5.36e-01
FFSVFLAVSVVGWVVFTFAARLLAWFLSRVLSASVGFRVAGFNCLRDVTIKFHKGTIESVSIGEIKLSFRKSLVKLSFSFISKDPKLQLLINDLEIVTRSSQNKKIRKSARPRSTGKGKWLVTSSMARLLQ

SEQ ID NO: 84075 - protein, 72 aa, Setaria italica
  Transcript Sequence Number=SeqID_18101
  Gene Ontology: Mol. function=pyrroline-5-carboxylate reductase activity; Cellular component=cytoplasm; Biological process=amino acid biosynthetic process
  Homolog annotation: Hit_ID=Q4TZJ2; Match level="QueryCoverage=100%, HitCoverage=26%, E-value=4e-27, Identity=85%"; Hit description =Pyrroline-5-carboxylate reductase
  Subcellular localization annotation: CTP_CleavageSite=36; ConfidenceScore=5.06e-01
MAAPPLQPVPTPAASNGDAFRLGFIGAGNLAESIARGVAASGVLPASAIRTAPHRRPERGAAFASIGACLLD

SEQ ID NO: 84076 - protein, 68 aa, Setaria italica
  Transcript Sequence Number=SeqID_18102
  Gene Ontology: Mol. function=oxidoreductase activity, acting on the aldehyde or oxo group of donors, disulfide as acceptor; Biological process=oxidation reduction
  Homolog annotation: Hit_ID=Q2QWT6; Match level="QueryCoverage=91%, HitCoverage=12%, E-value=1e-23, Identity=80%"; Hit description=2 -oxoisovalerate dehydrogenase alpha subunit, mitochondrial, putative, expressed
FAPLILQAIDFPGGKVSFMAEMNFLPESHGKTIKCYRVLDDDGKAISGSRFQEVSKEVAVKMYSEMVT

SEQ ID NO: 84077 - protein, 74 aa, Setaria italica
  misc_feature (12)..(12): Xaa can be any naturally occurring amino acid
  Transcript Sequence Number=SeqID_18103
  Gene Ontology: Mol. function=oxidoreductase activity, acting on the aldehyde or oxo group of donors, disulfide as acceptor; Cellular component=mitochondrial matrix; Biological process=oxidation reduction
  Homolog annotation: Hit_ID=Q2QWT6; Match level="QueryCoverage=91%, HitCoverage=13%, E-value=9e-30, Identity=89%"; Hit description=2 -oxoisovalerate dehydrogenase alpha subunit, mitochondrial, putative, expressed
CFFISLEGRPIXVEALTYRVGHHSTSDDSTKYRPVDEIEHWRTARDPISRYRKWVQGNDWWSDAEESELRSRVR

SEQ ID NO: 84078 - protein, 111 aa, Setaria italica
  Transcript Sequence Number=SeqID_18104
  Homolog annotation: Hit_ID=Q2QWT6; Match level="QueryCoverage=81%, HitCoverage=17%, E-value=1e-09, Identity=49%"; Hit description=2 -oxoisovalerate dehydrogenase alpha subunit, mitochondrial, putative, expressed
  Subcellular localization annotation: CTP_CleavageSite=67; ConfidenceScore=5.13e-01
MAAMWLARRAARRLPPLLSRQGGEPTRPWFLGSTAPPPVLGSPPLPAVERIFRRGFCSVRRFAGESSAAAAADADEEEPENGFAGGDQAIDFPGGKVSFMAEMNFLPESHG

SEQ ID NO: 84079 - protein, 154 aa, Setaria italica
  misc_feature (136)..(136): Xaa can be any naturally occurring amino acid
  Transcript Sequence Number=SeqID_18105
  Gene Ontology: Mol. function=oxidoreductase activity, acting on the aldehyde or oxo group of donors, disulfide as acceptor; Cellular component=mitochondrion; Biological process=metabolic process
  Homolog annotation: Hit_ID=Q2QWT6; Match level="QueryCoverage=89%, HitCoverage=28%, E-value=1e-61, Identity=83%"; Hit description=2 -oxoisovalerate dehydrogenase alpha subunit, mitochondrial, putative, expressed
  Pfam annotation: Domain name=E1_dh; Domain location=1-149; Score= -50.4; E_value=3.6e-07; Accession=PF00676.12; Description =Dehydrogenase E1 component
GVLIAHPLLRQKKITGASITAEQFRSDGVVIRGQAYGIRGIRVDGNDALAVYSAVHAAREMAIAEGRPILVEALTYRVGHHSTSDDSTKYRPVDEIEHWRTARDPISRYRKWVQGNDWWSDAEESELRSRVRKELXQAIQVAERMQKNHQVAEL

SEQ ID NO: 84080 - protein, 152 aa, Setaria italica
  misc_feature (82)..(82): Xaa can be any naturally occurring amino acid
  Transcript Sequence Number=SeqID_18106
  Gene Ontology: Mol. function=oxidoreductase activity, acting on the aldehyde or oxo group of donors, disulfide as acceptor; Cellular component=mitochondrial matrix; Biological process=oxidation reduction
  Homolog annotation: Hit_ID=Q2QWT6; Match level="QueryCoverage=96%, HitCoverage=23%, E-value=2e-48, Identity=66%"; Hit description=2 -oxoisovalerate dehydrogenase alpha subunit, mitochondrial, putative, expressed
LFNFQAVALVVGHHSTSDDSTKYRPVDEIEHWRTARDPISRYRKWVQGNDWWSDAEESELRSRVRKEVYCCYAKIYLSRALXYIIHGIFNHLLTSVQLLQAIQVAERMQKPPVAELFTDVYDQVPSNLREQEQLLRDTIMKHPADYPTDVPV

SEQ ID NO: 84081 - protein, 148 aa, Setaria italica
  misc_feature (133)..(133): Xaa can be any naturally occurring amino acid
  Transcript Sequence Number=SeqID_18107
  Gene Ontology: Mol. function=nucleic acid binding
  Homolog annotation: Hit_ID=Q1G1I8; Match level="QueryCoverage=100%, HitCoverage=53%, E-value=3e-81, Identity=39%"; Hit description =Pentatricopeptide repeat protein
  Pfam annotation: Domain name=PPR; Domain location=107-141; Score =36.5; E_value=1.1e-07; Accession=PF01535.12; Description=PPR repeat
  Pfam annotation: Domain name=PPR; Domain location=2-36; Score=32.9; E_ value=1.3e-06; Accession=PF01535.12; Description=PPR repeat
  Pfam annotation: Domain name=PPR; Domain location=37-71; Score=42.3; E_value=1.9e-09; Accession=PF01535.12; Description=PPR repeat
  Pfam annotation: Domain name=PPR; Domain location=72-106; Score=29.6; E_value=1.2e-05; Accession=PF01535.12; Description=PPR repeat
  Pfam module annotation: Pfam domain module=PPR::PPR::PPR::PPR; Domain location=107-141::2-36::37-71::72-106
NKTYSMLINGFIHLHDFANAFSIFEDMLKSGLQPDRAIYNLLIEAFCKMGNMDRAIRIFEKMQKERMQPSNRTFRPIIEGFAVSGDMKRALDTLDLMRRSGCAPTVMTYNALIHGLIRKHQVERAVSVLDKMXIAGIAPNEHTYTIIM

SEQ ID NO: 84082 - protein, 103 aa, Setaria italica
  Transcript Sequence Number=SeqID_18108
  Subcellular localization annotation: CTP_CleavageSite=43; ConfidenceScore=5.70e-01
MEMASASAPSTSSSHNISLSLAQAVLTLSVHAVIVFLTAVKKSSSASSSRRHEAAPAPAAIAAPSPTTKPAAASAIDMDVVLGVMGAGGAAVSVGFEEAAALF

SEQ ID NO: 84083 - protein, 55 aa, Setaria italica
  Transcript Sequence Number=SeqID_18109
MIGRGGGRGMQRKDAGEEWPNLVDVVLSWSLKDVMNEGLFKDKVKKIPSTFSHLK

SEQ ID NO: 84084 - protein, 94 aa, Setaria italica
  Transcript Sequence Number=SeqID_18110
  Subcellular localization annotation: CTP_CleavageSite=40; ConfidenceScore=5.55e-01
DSTRRRKLLLFPVDHHKPKSPSRDSLAARRRRRRSRPTLAASNRLASLSLAIRRPAAALFLIPTNCACFLIHTAGKLPKSPSPSPSIPFAAALG

SEQ ID NO: 84085 - protein, 67 aa, Setaria italica
  Transcript Sequence Number=SeqID_18111
  Gene Ontology: Cellular component=extracellular region
  Homolog annotation: Hit_ID=B6T629; Match level="QueryCoverage=71%, HitCoverage=17%, E-value=3e-18, Identity=93%"; Hit description=Beta -expansin 1a
MAFSTKVAALAALIFLLLVTYGSCARPVSFNASDFTADPNWEAARATWYGAPTGAGPYDDGGACGFK

SEQ ID NO: 84086 - protein, 137 aa, Setaria italica
  misc_feature (129)..(129): Xaa can be any naturally occurring amino acid
  Transcript Sequence Number=SeqID_18112
  Gene Ontology: Cellular component=extracellular region; Biological process=sexual reproduction
  Homolog annotation: Hit_ID=B4FR82; Match level="QueryCoverage=83%, HitCoverage=36%, E-value=6e-61, Identity=96%"; Hit description=Beta -expansin 1a
  Pfam annotation: Domain name=DPBB_1; Domain location=81-137; Score =35.1; E_value=2.9e-07; Accession=PF03330.10; Description=Rare lipoprotein A (RlpA)-like double
MASMIASSKVIALGALIFLLLVLYGSCTRIVNFNASHITADPYWVAARATWYGAPTGAGPYDNGGACGFKNVNLPPFSAMTSCGNQPLFKDGKGCGSCYQIRCLNHPACSGNPETVAITDMNYYPVAKXYHFDLSGT

SEQ ID NO: 84087 - protein, 265 aa, Setaria italica
  misc_feature (182)..(182): Xaa can be any naturally occurring amino acid
  misc_feature (187)..(187): Xaa can be any naturally occurring amino acid
  Transcript Sequence Number=SeqID_18113
  Gene Ontology: Cellular component=extracellular region; Biological process=sexual reproduction
  Homolog annotation: Hit_ID=B6T629; Match level="QueryCoverage=92%, HitCoverage=91%, E-value=1e-108, Identity=78%"; Hit description=Beta- expansin 1a
  Pfam annotation: Domain name=DPBB_1; Domain location=78-157; Score =96.4; E_value=9.9e-26; Accession=PF03330.10; Description=Rare lipoprotein A (RlpA)-like double
  Pfam annotation: Domain name=Pollen_allerg_1; Domain location=169 -250; Score=89.8; E_value=9.3e-24; Accession=PF01357.13; Description =Pollen allergen
  Pfam module annotation: Pfam domain module=DPBB_1::Pollen_allerg_1; Domain location=78-157::169-250
  Subcellular localization annotation: CTP_CleavageSite=45; ConfidenceScore=5.03e-01
MASSSKAAAFAALLFSLLVTYGSCTRPVNFNESDFTADPNWEAARATWYGAPTGAGPDDDGGACGFKNVNLPPFSAMTSCGNEPLFKDGKGCGSCYQIRCTNHAACSGNPETVAITDMNYYPVAKYHFDLSGTGVWCLGKAGRNDELRHAGIIDIQFKRVPCIYPGQMVTFHNEHRQVVRVXAVLDXFEHGDGDVVQVDLMEANSGYWTPMRESWGSIWRMDSNHRLQAPFSLRITNESGRKLVANRVIPANWAPNTYYRSIIQY

SEQ ID NO: 84088 - protein, 175 aa, Setaria italica
  Transcript Sequence Number=SeqID_18114
  Gene Ontology: Cellular component=extracellular region; Biological process=sexual reproduction
  Homolog annotation: Hit_ID=B4FR82; Match level="QueryCoverage=87%, HitCoverage=48%, E-value=2e-71, Identity=83%"; Hit description=Beta -expansin 1a
  Pfam annotation: Domain name=Pollen_allerg_1; Domain location=30-111; Score=138.9; E_value=1.6e-38; Accession=PF01357.13; Description =Pollen allergen
QAGRNDELRHAGIIDIQFKRVPCIYPGQMVTFHIEHGSNPNYLAVLVEFEDGDGDVVQVDLMEANSGWWTPMRESWGSIWRLDTRRPLTAPFSLRITNESGQKLVAYQVIPANWAPNTYYRSNIQYQAFSSDDGLDIGSAAGLVISSAAGLDTKILGVIGLICLVLSRLHGTDVP

SEQ ID NO: 84089 - protein, 112 aa, Setaria italica
  Transcript Sequence Number=SeqID_18115
  Gene Ontology: Cellular component=extracellular region; Biological process=sexual reproduction
  Homolog annotation: Hit_ID=B6T629; Match level="QueryCoverage=95%, HitCoverage=39%, E-value=3e-55, Identity=94%"; Hit description=Beta -expansin 1a
  Pfam annotation: Domain name=Pollen_allerg_1; Domain location=16-97; Score=138.6; E_value=1.9e-38; Accession=PF01357.13; Description =Pollen allergen
MACSCRVPCNYPGQKVTFHVEEGSNPVYLAVLVEFEDGDGDVVQVDLMEANSGSWTPMRESWGSIWRLDSNHRLQAPFSVRITNESGRMLVANQVIPANWVPNTYYRSIIQY

SEQ ID NO: 84090 - protein, 269 aa, Setaria italica
  misc_feature (53)..(53): Xaa can be any naturally occurring amino acid
  Transcript Sequence Number=SeqID_18116
  Gene Ontology: Cellular component=extracellular region; Biological process=sexual reproduction
  Homolog annotation: Hit_ID=B6T629; Match level="QueryCoverage=91%, HitCoverage=90%, E-value=1e-137, Identity=95%"; Hit description=Beta- expansin 1a
  Pfam annotation: Domain name=DPBB_1; Domain location=82-161; Score =127.9; E_value=3.4e-35; Accession=PF03330.10; Description=Rare lipoprotein A (RlpA)-like double
  Pfam annotation: Domain name=Pollen_allerg_1; Domain location=173 -254; Score=143.9; E_value=4.9e-40; Accession=PF01357.13; Description= Pollen allergen
  Pfam module annotation: Pfam domain module=DPBB_1::Pollen_allerg_1; Domain location=82-161::173-254
ASTMIASSKVVALGALIFLLLVSYGSCTRPVSFNASDFTADPNWEAARATWYXGAPTGAGPYDDGGACGFKNVNLPPFSAMTSCGNEPLFKDGKGCGSCYQIRCVNHAACSGNPETVIITDMNYYPVAKYHFDLSGTAFGAMAKPGRNDELRHAGIIDIQFKRVPCNYPGQKVTFHVEEGSNPVYLAVLVEFEDGDGDVVQVDLMEANSGSWTPMRESWGSIWRLDSNHRLQAPFSLRITNESGKTLVANQVIPANWVPNTYYRSIVQY

SEQ ID NO: 84091 - protein, 64 aa, Setaria italica
  Transcript Sequence Number=SeqID_18117
LGKWLTEATSHGKELLLVPFNAQLQLMLQVLSASQKLTFQRPRRGRCKRNHGPLEWPWAGGYCC

SEQ ID NO: 84092 - protein, 137 aa, Setaria italica
  Transcript Sequence Number=SeqID_18118
  Gene Ontology: Mol. function=nucleotide binding
  Homolog annotation: Hit_ID=Q1EP28; Match level="QueryCoverage=100%, HitCoverage=16%, E-value=2e-65, Identity=80%"; Hit description =Dynamin family protein
LQQSSVEWCSSIWLDTLKEIDPTFRRTMVVISKFDNRLKEFTERWEVDTFLSASGYLGDNIHPFFVALPKDRGTISNEEFRRQICQVDIDVLRHLRDNVKGGFNEEKYGSHIGFSCLRKYLESELQKRYKEAAPATL

SEQ ID NO: 84093 - protein, 88 aa, Setaria italica
  Transcript Sequence Number=SeqID_18119
RKGTKERGRDRYATSTTPMSIEVSFPPSLFVPPHTHTHIHVLHNLSMVGVCLNSQKASRRPLKNDLMSSNLIHHPLQRSSACKAYSVV

SEQ ID NO: 84094 - protein, 110 aa, Setaria italica
  Transcript Sequence Number=SeqID_18120
  Gene Ontology: Mol. function=glutathione peroxidase activity; Cellular component=cytoplasm; Biological process=response to oxidative stress
  Homolog annotation: Hit_ID=B6T5N2; Match level="QueryCoverage=91%, HitCoverage=60%, E-value=2e-48, Identity=91%"; Hit description =Glutathione peroxidase
  Pfam annotation: Domain name=GSHPx; Domain location=1-63; Score=30.3; E_value=1.1e-10; Accession=PF00255.11; Description=Glutathione peroxidase
MLLPKLLDFEILAFPCNQFLRQEPGTADQIKDFACTRFKAEYPVFQKVRVNGPDAAPVYKFLKASKPGLFGSRIKWNFTKFLVDKNGKVIDRYATSTTPMSIEKDIQKDP

SEQ ID NO: 84095 - protein, 169 aa, Setaria italica
  Transcript Sequence Number=SeqID_18121
  Gene Ontology: Mol. function=glutathione peroxidase activity; Cellular component=cytoplasm; Biological process=response to oxidative stress
  Homolog annotation: Hit_ID=B6T5N2; Match level="QueryCoverage=100%, HitCoverage=100%, E-value=5e-89, Identity=93%"; Hit description =Glutathione peroxidase
  Pfam annotation: Domain name=AhpC-TSA; Domain location=8-149; Score= -16.9; E_value=0.02; Accession=PF00578.13; Description=AhpCTSA family
  Pfam annotation: Domain name=GSHPx; Domain location=12-120; Score =211.5; E_value=2.2e-60; Accession=PF00255.11; Description =Glutathione peroxidase
  Pfam annotation: Domain name=Redoxin; Domain location=2-167; Score =2.5; E_value=0.0031; Accession=PF08534.2; Description=Redoxin
  Pfam module annotation: Pfam domain module=AhpC-TSA::GSHPx::Redoxin; Domain location=8-149::12-120::2-167
MGAAESVPETSIHEFTVKDCNGKEVSLETYKGKVLLVVNVASKCGFTEVNYTQLTELYQKYRDKDFEILAFPCNQFLRQEPGTADQIKDFACTRFKAEYPVFQKVRVNGPDAAPVYKFLKASKPGLFGSRIKWNFTKFLVDKNGKVIDRYATSTTPMSIEKDIQKALEK

SEQ ID NO: 84096 - protein, 84 aa, Setaria italica
  misc_feature (9)..(9): Xaa can be any naturally occurring amino acid
  Transcript Sequence Number=SeqID_18122
  Pfam annotation: Domain name=AT_hook; Domain location=20-32; Score =14.9; E_value=0.07; Accession=PF02178.11; Description=AT hook motif
  Pfam annotation: Domain name=AT_hook; Domain location=59-71; Score =13.4; E_value=0.13; Accession=PF02178.11; Description=AT hook motif
  Pfam module annotation: Pfam domain module=AT_hook::AT_hook; Domain location=20-32::59-71
  Subcellular localization annotation: CTP_CleavageSite=12; ConfidenceScore=5.59e-01
AASPKPKGXKAKAAAPAAAPKPRGRPPKAAKTSAKASPAKAAKKPAPATPKKEKAAATPKKAGRPKKAAAASPARKGAARKAKK

SEQ ID NO: 84097 - protein, 123 aa, Setaria italica
  Transcript Sequence Number=SeqID_18123
  Gene Ontology: Mol. function=transferase activity, transferring groups other than amino-acyl groups; Cellular component=membrane; Biological process=fatty acid biosynthetic process
  Homolog annotation: Hit_ID=B4FQN3; Match level="QueryCoverage=71%, HitCoverage=18%, E-value=5e-42, Identity=94%"; Hit description =Acyltransferase
  Pfam annotation: Domain name=FAE1_CUT1_RppA; Domain location=1-115; Score=-96.7; E_value=3e-09; Accession=PF08392.4; Description =FAE1Type III polyketide synthase-like
RGMEEMDETFHAVLDELFARSAAPGGVGIRPADVDILVVNVSMFSPAPSLAARVVRRYGLREDVKVYNLTGMGCSATLIALDLVNNFFRCVLISLYFYWSILLILNMFSFPLPHYFLDLFPSY

SEQ ID NO: 84098 - protein, 308 aa, Setaria italica
  Transcript Sequence Number=SeqID_18124
  Gene Ontology: Mol. function=transferase activity, transferring groups other than amino-acyl groups; Cellular component=membrane; Biological process=fatty acid biosynthetic process
  Homolog annotation: Hit_ID=B4FQN3; Match level="QueryCoverage=95%, HitCoverage=63%, E-value=1e-152, Identity=88%"; Hit description =Acyltransferase
  Pfam annotation: Domain name=FAE1_CUT1_RppA; Domain location=24-308; Score=539.8; E_value=3.3e-159; Accession=PF08392.4; Description =FAE1Type III polyketide synthase-like
MELVAMLTLTLLACSAAMLARLLVARARRRRCYLLDYVCYKATDDRKLPTDLCGEIIQRNKLLGLEEYKFLLKVIVNSGIGEETYGPRNIIEGGEARPDRLKEGMEEMDETFHAVLDELFARSAAPGGVGIRPADVDILVVNVSMFSPAPSLAARVVRRYGLREDVKVYNLTGMGCSATLIALDLVNNFFRTHAGQVALVMTSESIAPNWYAGNKRSFMLGNCLFRSGGCAYFLTNDPRLRPHAKLRLRHVVRTHTGSSEEAYNCALQMEDDAGRPGFHLGKELPRAAVHAFVHNLRVLAPRVLPLPE

SEQ ID NO: 84099 - protein, 98 aa, Setaria italica
  Transcript Sequence Number=SeqID_18125
  Gene Ontology: Mol. function=heat shock protein binding; Biological process=protein folding
  Homolog annotation: Hit_ID=O49288; Match level="QueryCoverage=84%, HitCoverage=23%, E-value=9e-28, Identity=69%"; Hit description =F22K20.12 protein
WYGTVVFTLLFGSELFEDYVGHLAMATMASTEMTSDNDNPEKLQDRLRNVQREREEKLARFLKEFLSQYVRGDKEGFANRAEAEAKEALHHFIVGWIF

SEQ ID NO: 84100 - protein, 169 aa, Setaria italica
  Transcript Sequence Number=SeqID_18126
  Gene Ontology: Mol. function=heat shock protein binding; Biological process=protein folding
  Homolog annotation: Hit_ID=B9S2N8; Match level="QueryCoverage=88%, HitCoverage=38%, E-value=6e-53, Identity=67%"; Hit description =Chaperone protein dnaJ, putative
WYCSTSYFGAVLLVSLYFIVIKNVQREREEKLARFLKEFLSQYVRGDKEGFANRAEAEAKRLSTTSSGLDILRTIGYVYSRQAAKELGKKAMYLGVPFVAEWVRNKGHLWKSQITAAKGALQLLQLQEEACRQSSKDGIATEQDVDLQMRMNKDLMMSSLWKLNVVDIE

SEQ ID NO: 84101 - protein, 483 aa, Setaria italica
  Transcript Sequence Number=SeqID_18127
  Homolog annotation: Hit_ID=Q9C824; Match level="QueryCoverage=94%, HitCoverage=56%, E-value=1e-133, Identity=53%"; Hit description=BZIP protein, putative; 48652-45869
  Pfam annotation: Domain name=DUF632; Domain location=43-352; Score =513.6; E_value=2.5e-151; Accession=PF04782.4; Description=Protein of unknown function (DUF632)
KPIVRKPPKAPGRPLAVHYQHASSMGAVETRKGKIMVASGTASLLQIVSQLDDHFLRASESAHDVSKKLEATRMHYHSNHADSRGHIDHSTKIMHVITWNRSFKNLPDHDDLNDNFEIDDRFETHAAVLDRMLAWEKKLYDEVKAGELMKIDYQKKVTLLQKQKKRGVKLETLEKTKAAVSHLHTRYIVDMQSMDSTVSEINRLRDTQLFPKLKDLVEGMAKMWSAMHRHHRSQFMIISGIRGFEIPPVTSERTDLHYNQTCELRDIVREWHMQFEKLMNNQKAYIRALNAWLKLNLIPIESNIKEKVSSPPRLVDPPIKNLLHAWHDELERLPIELAKTAIKTFAEVISNIVHLQEEEVNLRRRCDETRRDLTRKRAQFEDWHQKYMERRAALGENGNPEAAEVQNIDPVEDRKRVIEELEIRLREEEGHHLRQARQVREKSLANLRTHLPELFRNMADFSYFCHDMYNNLRKAAAPAKDEV

SEQ ID NO: 84102 - protein, 114 aa, Setaria italica
  Transcript Sequence Number=SeqID_18128
  Gene Ontology: Cellular component=chloroplast
  Homolog annotation: Hit_ID=B9SPX9; Match level="QueryCoverage=98%, HitCoverage=32%, E-value=3e-29, Identity=53%"; Hit description =Electron transporter, putative
  Pfam annotation: Domain name=DUF179; Domain location=3-99; Score= -43.3; E_value=4.8e-05; Accession=PF02622.7; Description =Uncharacterized ACR, COG1678
FLMRSTEGKPIKGFEEVVPGICFCFRTDLEKASALMNNGTVKPEDLKFYVGYSAWDHDQLLSEIDAGYWVVTSCSSGLITDALTTDPSCLWTEILQLMGGQYSELSQKPKQDGV

SEQ ID NO: 84103 - protein, 103 aa, Setaria italica
  misc_feature (30)..(30): Xaa can be any naturally occurring amino acid
  Transcript Sequence Number=SeqID_18129
  Homolog annotation: Hit_ID=B5SVV3; Match level="QueryCoverage=88%, HitCoverage=13%, E-value=9e-18, Identity=56%"; Hit description =Mutant low phytic acid protein 1
MAEEAPPPAPPPKLLYIAVADGGGRRGFRXYTRPVLQSTLHLMGCKPRHAFKISKRVFNVMKSELLAASTSDGLTKQENYPALGDSTHTSKNLERSSSSIPFE

SEQ ID NO: 84104 - protein, 46 aa, Setaria italica
  Transcript Sequence Number=SeqID_18130
TRRDSSFEVWWKKSLEENSETALLWTPSSGRSSSAGISPGSQGVLR

SEQ ID NO: 84105 - protein, 151 aa, Setaria italica
  Transcript Sequence Number=SeqID_18131
  Gene Ontology: Mol. function=2 iron, 2 sulfur cluster binding; Cellular component=chloroplast; Biological process=electron transport chain
  Homolog annotation: Hit_ID=P27788; Match level="QueryCoverage=100%, HitCoverage=100%, E-value=6e-75, Identity=92%"; Hit description =Ferredoxin-3, chloroplastic
  Pfam annotation: Domain name=Fer2; Domain location=62-137; Score =116.2; E_value=1e-31; Accession=PF00111.19; Description=2Fe-2S iron -sulfur cluster binding domain
  Subcellular localization annotation: CTP_CleavageSite=52; ConfidenceScore=5.77e-01
MSTSTFASSCALLGNVRTQASQTAVKSPSSLSFFSQGMKVPSLKASKKLDVSAMAVYKVKLVSPEGVEHEFEAPDDTYILDAAETAGVELPYSCRAGACSTCAGKIEAGSVDQSDGSFLDDGQQAEGYVLTCVSYPKSDCVIHTHKEGDLY

SEQ ID NO: 84106 - protein, 67 aa, Setaria italica
  Transcript Sequence Number=SeqID_18132
  Pfam annotation: Domain name=tify; Domain location=1-26; Score=40.4; E_value=7.1e-09; Accession=PF06200.6; Description=tify domain
FYGGKMVVFDDFPAEKAEELMHLAGSGNAAAAGQNALGQPSLTGRNAYTQSSVFTHIPAHDKRKKKP

SEQ ID NO: 84107 - protein, 199 aa, Setaria italica
  Transcript Sequence Number=SeqID_18133
  Homolog annotation: Hit_ID=B6T038; Match level="QueryCoverage=100%, HitCoverage=100%, E-value=3e-55, Identity=63%"; Hit description=PnFL- 2
  Pfam annotation: Domain name=CCT_2; Domain location=144-170; Score =56.6; E_value=9.6e-14; Accession=PF09425.2; Description=Divergent CCT motif
  Pfam annotation: Domain name=tify; Domain location=89-124; Score =76.8; E_value=7.6e-20; Accession=PF06200.6; Description=tify domain
  Pfam module annotation: Pfam domain module=CCT_2::tify; Domain location=144-170::89-124
MAAEHQQQPVVVAGGSRFAVTCGLLRQYMKEQGGNGARRLAPAVAMGLVPGADAAAAVAEEPEERKPVLELFPQQAGTLKDEQQRKMKEPAERAPLTIFYGGKMVVFDDFPAEKAEELMHLAGSGNAAAAGQNALGQPSLTDMPIARKASLKRFLEKRKNRLTAGDPYPVAATESMSSKAAVKEEGAPWLGVNSALSLS

SEQ ID NO: 84108 - protein, 226 aa, Setaria italica
  misc_feature (185)..(185): Xaa can be any naturally occurring amino acid
  Transcript Sequence Number=SeqID_18134
  Gene Ontology: Cellular component=plasma membrane
  Homolog annotation: Hit_ID=C4CZ22; Match level="QueryCoverage=63%, HitCoverage=43%, E-value=3e-14, Identity=39%"; Hit description =Gluconolactonase
APRRRLLLVYADRLPRLGYAALAAYDLGSWRRLFLTRLDVPGESTFPDDVAADEDGNGYVTDARGSKIWKVSPDGALLGVIRNATFTQRPGARHNLIGLNGIVHHPNGYLLVIHTSGGDLFKVDPKTETVRVVKVQGSLRRGDGLELLSATRLVVAGMPSRLVESSDDWETASVTGQYVGPIHRXGASATVKDGDVYINHIFGFGLGKKKTHVLAKAVFTPLVAAS

SEQ ID NO: 84109 - protein, 101 aa, Setaria italica
  Transcript Sequence Number=SeqID_18135
  Gene Ontology: Mol. function=nucleotide binding; Cellular component =chromosome; Biological process=chromosome organization and biogenesis
  Homolog annotation: Hit_ID=B9H079; Match level="QueryCoverage=100%, HitCoverage=8%, E-value=3e-33, Identity=69%"; Hit description =Condensin complex components subunit
  Pfam annotation: Domain name=SMC_hinge; Domain location=1-89; Score =12.3; E_value=0.0022; Accession=PF06470.5; Description=SMC proteins Flexible Hinge Domain
VVDTEDTGKKLIEKIGDLRKRVTIIPLNKIQTYMIPDRVQQAARRLVGPDNVTLALELVGYGEEVKNAVAYVFGSTFVCRNTEAAKEVAFNREVGSTSVTL

SEQ ID NO: 84110 - protein, 573 aa, Setaria italica
  Transcript Sequence Number=SeqID_18136
  Gene Ontology: Mol. function=nucleotide binding; Cellular component =chromosome; Biological process=chromosome organization and biogenesis
  Homolog annotation: Hit_ID=B9H079; Match level="QueryCoverage=96%, HitCoverage=47%, E-value=0.0, Identity=65%"; Hit description =Condensin complex components subunit
  Pfam annotation: Domain name=ABC_tran; Domain location=323-553; Score= -49.6; E_value=0.024; Accession=PF00005.19; Description=ABC transporter
  Pfam annotation: Domain name=SMC_N; Domain location=15-563; Score =50.7; E_value=2.1e-15; Accession=PF02463.11; Description=RecFRecNSMC N terminal domain
  Pfam annotation: Domain name=Tup_N; Domain location=256-324; Score= -12.0; E_value=0.038; Accession=PF08581.2; Description=Tup N-terminal
  Pfam annotation: Domain name=YkyA; Domain location=52-270; Score= -98.5; E_value=0.054; Accession=PF10368.1; Description=Putative cell -wall binding lipoprotei
  Pfam module annotation: Pfam domain module=ABC_tran::SMC_N::Tup _N::YkyA; Domain location=323-553::15-563::256-324::52-270
  Subcellular localization annotation: CTP_CleavageSite=30; ConfidenceScore=5.21e-01
GWIWRGSSSPYPTNSRANVFGSTFVCRNTEAAKEVAFNREVGSTSVTLEGDTYQPSGLLTGGSKGGRGDLLRKLDKLAKAETDLSDHQKKLSVIEQQIGALLPLQERYTKLKSQFELKSYDLSLFQKRVEQNEHHKLGELVKKIEQELQESKQELTEKQVQYEKCVSMVSELEQTIRTYGTEREGRLKALEKMIKSLKSEMQSMSKQLKAYESERERLIMEKDAVANELATLEEQLSTSKAQITSLSETLEKQRDKVTAIKQEYDQAEGELNVGRSKLKECDSQINRMAKEQQKLQQKLSDSNVERKKMENEVKRMEIEQKDCSSVVDKLVEKYSWIATEKQLFGKSGTDYDFESCEPHKAREELENLQAQQSSLEKRVNKKVMAMFEKAEDEYNDLMSKKNIIENDKAKIKKVIEELDEKKKETLKVTWLKVNKDFGSIFSTLLPGTMAKLDPPEGGTFLDGLEVRVAFGTVWKQSLSELSGGQRSLLALSLILALLLFKPAPLYILDEVDAALDLSHTQNIGRMIKAHFPHSQFIVVSLKEGMFNNANVIFRTKFVDGVSTVTRTVPSKQK

SEQ ID NO: 84111 - protein, 71 aa, Setaria italica
  misc_feature (4)..(4): Xaa can be any naturally occurring amino acid
  Transcript Sequence Number=SeqID_18137
FFFXFFYFFFLLRSNTETVRQIIYHQDSGIITLLITTTLHHSRKHKLLEQFNSNDMHAVKQIISMHHVVRR

SEQ ID NO: 84112 - protein, 248 aa, Setaria italica
  misc_feature (20)..(20): Xaa can be any naturally occurring amino acid
  Transcript Sequence Number=SeqID_18138
  Gene Ontology: Mol. function=phosphoric diester hydrolase activity; Cellular component=anchored to membrane; Biological process =intracellular signaling cascade
  Homolog annotation: Hit_ID=B4FNL7; Match level="QueryCoverage=97%, HitCoverage=58%, E-value=1e-131, Identity=91%"; Hit description =MAP3K-like protein kinase
MLDTYDFNNDVWLCHSFGGXCYNITAFQPLINVFKEIQTFLDANPSEVITIFLEDYTATGSLPKVFNASGLTKYWFPVAKMPKSGGNWPLLKDMISQNQRLLVFTSKKSKEASEGIAFEWNYVVENQYGNDGMVAGKCPNRAESPAMDSKSQSLVLMNFFTTDPSQTGVCGNNSAPLVSMLKTCHAASGNRWPNYIAVDFYMRSDGGGAPLATDVANGHMVCGCDNIAYCKANSTFGTCVIPPPPPPS

SEQ ID NO: 84113 - protein, 124 aa, Setaria italica
  Transcript Sequence Number=SeqID_18139
RPSEFLAGFIVCLETSRAWREVPRLRMTHPASQQSLTHVLRVKTAGYSRSDLKAGHLSARTSRRISGTLPSSPPPTRPALPTRPPSLARSPPPSSSSPRPSPSTPNTTVPTTDLPTNLTLPYPL

SEQ ID NO: 84114 - protein, 183 aa, Setaria italica
  Transcript Sequence Number=SeqID_18140
  Gene Ontology: Mol. function=nucleotidyltransferase activity; Cellular component=cytoplasm; Biological process=metabolic process
  Homolog annotation: Hit_ID=O64765; Match level="QueryCoverage=64%, HitCoverage=23%, E-value=5e-39, Identity=64%"; Hit description =Probable UDP-N-acetylglucosamine pyrophosphorylase
MTEMVVAARAPAPAAGRWGAAPPQELLERLKDYGQEGAFAFWDELGPEERDHLIRDIESLDLPRIDRIVRCSLRSQGAPVPTVEPVPESSVSTVDDRTPEDKERWWRRGLRAISEGKLAVVLLAGGQGTRLGSSDPKGCFSKSLCPSPLILLLLCATNAMRLDIQIHSIFYAEFLVYRFLCFR

SEQ ID NO: 84115 - protein, 158 aa, Setaria italica
  Transcript Sequence Number=SeqID_18141
  Gene Ontology: Cellular component=chloroplast envelope
  Homolog annotation: Hit_ID=Q186J8; Match level="QueryCoverage=86%, HitCoverage=34%, E-value=3e-10, Identity=35%"; Hit description =Putative membrane protein
  Pfam annotation: Domain name=DUF819; Domain location=1-158; Score= -117.9; E_value=4.2e-05; Accession=PF05684.4; Description=Protein of unknown function (DUF819)
TTGDLLKAFLIGSVATIIGTTVAYLLVPMRSLGHDSWKIAAALMGSYIGGAVNFVAVSEALGITPSVVAAGVAADNLISALYFMILFSLASKIPAEPKNAATDGRKDGGEPEGDGRFSVLNGGAAIALSFVICKAGSAIADRLGFQGGTLPCVTALVV

SEQ ID NO: 84116 - protein, 98 aa, Setaria italica
  Transcript Sequence Number=SeqID_18142
  Gene Ontology: Cellular component=integral to membrane
  Homolog annotation: Hit_ID=Q2HTM6; Match level="QueryCoverage=69%, HitCoverage=13%, E-value=1e-09, Identity=53%"; Hit description =Sodium/calcium exchanger membrane region
  Subcellular localization annotation: CTP_CleavageSite=10; ConfidenceScore=5.32e-01
RFRSACFTPAAMSRLAAHLRLSPSMATITLLVLGNGTPDMFASAAAPGGLGGMPRVGLAAVLSAGAFIPMGAFALISAPWEPVSSLQPRRVGPAWRVG

SEQ ID NO: 84117 - protein, 65 aa, Setaria italica
  Transcript Sequence Number=SeqID_18143
  Gene Ontology: Mol. function=binding
  Homolog annotation: Hit_ID=Q8S912; Match level="QueryCoverage=100%, HitCoverage=3%, E-value=3e-20, Identity=69%"; Hit description =Microtubule bundling polypeptide TMBP200
QIDELKIDLFKHFREDVSLRLWNSDFKRQIDGIELLQKALPSSGKEVIELLDILLRWFVLRFCES

SEQ ID NO: 84118 - protein, 910 aa, Setaria italica
  Transcript Sequence Number=SeqID_18144
  Gene Ontology: Mol. function=binding; Cellular component=centrosome; Biological process=establishment or maintenance of microtubule cytoskeleton polarity
  Homolog annotation: Hit_ID=B9GIF2; Match level="QueryCoverage=99%, HitCoverage=45%, E-value=0.0, Identity=64%"; Hit description =Microtubule organization protein
  Pfam annotation: Domain name=HEAT; Domain location=205-241; Score =16.5; E_value=0.11; Accession=PF02985.14; Description=HEAT repeat
  Pfam annotation: Domain name=HEAT; Domain location=246-281; Score =2.9; E_value=22; Accession=PF02985.14; Description=HEAT repeat
  Pfam module annotation: Pfam domain module=HEAT::HEAT; Domain location=205-241::246-281
  Subcellular localization annotation: CTP_CleavageSite=53; ConfidenceScore=5.58e-01
PSKAGLKSSKHGPNDRGSNVGKPVSQRGLPARASVTMVSSQDHLQSQALFNIRDSNKEERERRVLVRKFKFEEPRREQIDELKIDLFKHFREDVSLRLWNSDFKRQIDGIELLQKALPSSGKEVIELLDILLRWFVLRFCESNTTCLLKVLDFLPELFDLLKDQSYMLTEAEAAIFLPCLMEKSGHNIEKVREKMGELIKQMVNIYSLPKLLPYVLEGLRSKNNRTRIECVDIIGYFMDHHGTEVGGLMKNLPSVAALTAERDGEIRKAALNTLATAYKNLGDDVWRYVGKLSDAQRSMLDDRFKWKAREMEKRREGRPGDARAALRRSVRENGSDVAEQSGEVVSRSVAGSMISRDNFGYADAHMNRHMVPRQMPAATGPADWREALEIVALGLPEQSVEGMKVICHELTQAADPESSVLEDLIKEADRLVSCLAVMVPKTFNFSLSGASSRSCKYVLNTLMQTFQIKRLAHAVKEGTLDNLITELLLWLLDERVPLMDDGSQLLKALNVLMLKILDNAERTSSFVVLITLLRPLDPSRWPSPTPTESLAVKNQKFSDLVVKCLIKLTKVLQSTIYEVDLDRILQSIHIYLQELGMEEIRKRAGADDKPLRMVKTVLHELVKLRGTAIKGHLSMVPIDAEPQPIILAYIDLNLQTLAAARMLTPSGPMGQTHWGDAASNSPNPSTHSADAQLKQELAAVFKKIGDKQTCTIGLYELYRITQLYPKVDIFSQLQNASEAFRTYIRDGLAQVEKNAAAGRTPSSLPLSTPPPIAAIPSPKFAPSPVHTKSISGKTESNEDDASAEAQQAFRGDDSRLHSMDQQTDRYQTSAGTLDALRERMKSIQAAAVGHFDGSQARPLASMNGSNMLHAGTQLDGEPQQQSNIPPMDERALSGLQARMERLKSGSMEPL

SEQ ID NO: 84119 - protein, 242 aa, Setaria italica
  Transcript Sequence Number=SeqID_18145
  Gene Ontology: Mol. function=binding
  Homolog annotation: Hit_ID=B9GIF2; Match level="QueryCoverage=99%, HitCoverage=12%, E-value=2e-57, Identity=49%"; Hit description =Microtubule organization protein
KSSKGILADVLKCLGDNKKHMRECTLTALDSWVAAAQLDKMVPYIIVTLGDQKTGSEGRKDLFDWLSKHVSKMGDPSEALPLLKPSASSLMDKSSEVRKAAESFMNEILKICGQEVVGRNLKDLPSPTLAIVAERLKLTTVHEGFSESVKMVTTSMSLPSKAGLKSSKHGPNDRGSNVGKPVSQRGLPARASVTMVSSQDHLQSQALFNIRDSNKEERERRVLVRKFKFEEPRREQIDELKI

SEQ ID NO: 84120 - protein, 753 aa, Setaria italica
  misc_feature (62)..(62): Xaa can be any naturally occurring amino acid
  misc_feature (500)..(500): Xaa can be any naturally occurring amino acid
  Transcript Sequence Number=SeqID_18146
  Gene Ontology: Mol. function=binding; Cellular component=centrosome; Biological process=establishment or maintenance of microtubule cytoskeleton polarity
  Homolog annotation: Hit_ID=B9GIF2; Match level="QueryCoverage=100%, HitCoverage=37%, E-value=0.0, Identity=66%"; Hit description =Microtubule organization protein
  Pfam annotation: Domain name=HEAT; Domain location=123-159; Score =27.5; E_value=5.5e-05; Accession=PF02985.14; Description=HEAT repeat
  Pfam annotation: Domain name=HEAT; Domain location=358-396; Score =0.9; E_value=38; Accession=PF02985.14; Description=HEAT repeat
  Pfam annotation: Domain name=HEAT; Domain location=4-39; Score=13.6; E_value=0.85; Accession=PF02985.14; Description=HEAT repeat
  Pfam annotation: Domain name=HEAT; Domain location=436-473; Score =2.3; E_value=25; Accession=PF02985.14; Description=HEAT repeat
  Pfam annotation: Domain name=HEAT; Domain location=533-569; Score =23.0; E_value=0.0013; Accession=PF02985.14; Description=HEAT repeat
  Pfam annotation: Domain name=HEAT; Domain location=576-611; Score =8.1; E_value=5; Accession=PF02985.14; Description=HEAT repeat
  Pfam annotation: Domain name=HEAT; Domain location=616-652; Score =4.4; E_value=14; Accession=PF02985.14; Description=HEAT repeat
  Pfam annotation: Domain name=HEAT; Domain location=693-728; Score =10.9; E_value=2.2; Accession=PF02985.14; Description=HEAT repeat
  Pfam module annotation: Pfam domain module=HEAT::HEAT::HEAT::HEAT::HEA T::HEAT::HEAT::HEAT; Domain location=123-159::358-396::4-39::436 -473::533-569::576-611::616-652::693-728
IAPGDFHEICRTLKKLITDVNLAVSVEATQAIGNLAKGLRAHFSGNARMLLPVLLEKLKEKXPTMTEALSQTLQAMHTSGCFTLIDVIEDVRVAVKNKVPLVRSLTLTWVAFCIETSNKANVLKLHKEYVPICMECLNDGTPEVRDASFSVLTAIAKMVGMKPLERSLEKLDDVRKKKLSDMIGSASETVLSSGTAPIPTSGAATSARGAADSLSMKRSAASMLSGKKPVQAAVAAKKSGPSKSTASKKTDGGSQSKTSAAPEIEDVEPAEMSLEEIEERLGSVVKAETISQLKSTVWKERLEAIGMLKQEVESLTELDKSAELLIRLLCAVPGWSEKNVQVQQQVIEVIAHISSTVNKFPKRCVVLCLLGISERVADIKTRAHAMKCLTAFCEAVGPGFVFERLYKITKEHKNPKVLSEGILWMVSAVEDFGISNLKLKDMIDFCKDIGLQSSAAATRNATIKLIGMLHKFVGPDIKGFLSDVKPALLSALDAEYEKNXPFEGAAAPPKRTVRVLDTASSTSAGPSDGLPREDISAKITPTLLKNLGSPDWKVRLESIDSVNKIVEEAHKRIQPTGTVDLFTALRGRLYDSNKNLVMATLSTIGGLASAMGPSVEKSSKGILADVLKCLGDNKKHMRECTLTALDSWVAAAQLDKMVPYIIVTLGDQKTGSEGRKDLFDWLSKHVSKMGDPSEALPLLKPSASSLMDKSSEVRKAAESFMNEILKICGQEVVGRNLKDLPSPTLAIVAERLK

SEQ ID NO: 84121 - protein, 70 aa, Setaria italica
  Transcript Sequence Number=SeqID_18147
DDRCIIKILKPVKKKKVRKVCNALYGGCCISTHRNHKIGNAVAAMHEVGVYEWPPVSACFCVRFEHYLVD

SEQ ID NO: 84122 - protein, 145 aa, Setaria italica
  Transcript Sequence Number=SeqID_18148
  Gene Ontology: Mol. function=magnesium ion binding; Cellular component=chloroplast; Biological process=photosynthesis, light harvesting
  Homolog annotation: Hit_ID=B7SB30; Match level="QueryCoverage=91%, HitCoverage=45%, E-value=8e-45, Identity=76%"; Hit description=LHCB4
  Subcellular localization annotation: CTP_CleavageSite=44; ConfidenceScore=5.47e-01
MASSVAAAASTFLGTRLADPAPQNGRIVARFGFGGGKKTAAPKKAAKTSSVSDRPLWFPGAVAPDYLDGSLVGDYGFDPFGLGKPVEYLQFELDSLDQNLAKNEAGGIIGTRFESSDVKSTPFQPYSEVFGLQRFRRVVVVFYSY

SEQ ID NO: 84123 - protein, 211 aa, Setaria italica
  Transcript Sequence Number=SeqID_18149
  Gene Ontology: Mol. function=chaperone activator activity; Cellular component=cytosol; Biological process=regulation of mitotic cell cycle
  Homolog annotation: Hit_ID=B6TSH1; Match level="QueryCoverage=59%, HitCoverage=59%, E-value=1e-53, Identity=84%"; Hit description=Co -chaperone protein SBA1
  Pfam annotation: Domain name=CS; Domain location=5-79; Score=62.8; E _value=1.3e-15; Accession=PF04969.8; Description=CS domain
  Pfam annotation: Domain name=GRP; Domain location=63-169; Score= -29.1; E_value=0.083; Accession=PF07172.3; Description=Glycine rich protein family
  Pfam module annotation: Pfam domain module=CS::GRP; Domain location=5- 79::63-169
MSRHPEVKWAQRIDKVYITVQLPDAKDAKVNLEPDGVFTFSGSAGTNLYELKLDLNDKVNVEASKISVGVRSIFCIVEKAEAKWWKKLVRDDQRAPHFVKVDWDKWVDEDDDGGDVNLDGMDFSNFGGMGGMGDMAGLGGMGGMGGLGGMGGMGGLGGMGGLGGMGGMGMDEFEDESDDEEEVSKPQAAEKAGEAEKTEAAEAKTETAQSS

SEQ ID NO: 84124 - protein, 448 aa, Setaria italica
  Transcript Sequence Number=SeqID_18150
  Gene Ontology: Mol. function=transferase activity, transferring nitrogenous groups; Cellular component=mitochondrial matrix; Biological process=amino acid metabolic process
  Homolog annotation: Hit_ID=Q0DBN4; Match level="QueryCoverage=88%, HitCoverage=85%, E-value=0.0, Identity=94%"; Hit description =Aspartate aminotransferase
  Pfam annotation: Domain name=Aminotran_1_2; Domain location=75-441; Score=448.5; E_value=1e-131; Accession=PF00155.13; Description =Aminotransferase class I and II
  Subcellular localization annotation: CTP_CleavageSite=24; ConfidenceScore=5.35e-01
SSTPQRRRARPPPPSPSARMAMTRAAAAANGRHRRWGPAAAATTRAMASWFGHVEPAAKDPILGVTEAFLADPSPDKVNVGVGAYRDDNGRPVVLECVREAERRIAGSMNMEYLPMGGSVKMIEESLKLAYGEDSEFIKDKRIAAVQALSGTGACRLFADFQKRFLPDTQIYIPTPTWANHHNIWRDAHVPQRTFTYYHPESRGLDFSGLMDDIKNAPDGSFFLLHACAHNPTGVDPSEEQWREISQQFKVKKHFPFFDMAYQGFASGDPERDAKAIRIFLEDGHQIGCAQSYAKNMGLYGQRAGCLSILCDDEMQAVAVKSQLQQLARPMYSNPPLHGALIVSTILSDPELKTLWLKEVKGMADRIIGMRKSLKENLERLGSPLSWEHVTNQIGMFCYSGMTPEQVDRLTSEFHIYMTRNGRISMAGVTTGNVAYLANAIHEVTKPN

SEQ ID NO: 84125 - protein, 86 aa, Setaria italica
  Transcript Sequence Number=SeqID_18151
MRVHGHVSDDGRAIVPASSYARAHIDMDAQVHHLELGTDGDDDPPPPYSNSRDMRGSGHVCGDGRAIVTTSSHARAPTDMEAQIHQ

SEQ ID NO: 84126 - protein, 89 aa, Setaria italica
  misc_feature (73)..(74): Xaa can be any naturally occurring amino acid
  Transcript Sequence Number=SeqID_18152
  Pfam annotation: Domain name=F-box; Domain location=24-71; Score =25.3; E_value=0.00025; Accession=PF00646.25; Description=F-box domain
MSFSSMSKQQVLDAGEGAGEEVMELIPGLPEEVAEKCLLHLPFLYHRLFRTVSSTWNRFLTDAPAKPLLLAPXXAAAAPAGSVSFSLPF

SEQ ID NO: 84127 - protein, 99 aa, Setaria italica
  Transcript Sequence Number=SeqID_18153
  Gene Ontology: Mol. function=metal ion binding
  Homolog annotation: Hit_ID=B6SJ98; Match level="QueryCoverage=84%, HitCoverage=26%, E-value=3e-30, Identity=79%"; Hit description=S -ribonuclease binding protein SBP1
  Pfam annotation: Domain name=zf-C3HC4; Domain location=47-86; Score =6.7; E_value=0.017; Accession=PF00097.17; Description=Zinc finger, C3HC4 type (RING finger)
TLHAQLQQAAAVARASVEELGDAGPAESSSSAYVDPRRTGPSPDRACLGCRLRPASVVLLPCRHLSLCGECFAASDADAAMACPVCLCVRTGSVEAILC

SEQ ID NO: 84128 - protein, 189 aa, Setaria italica
  Transcript Sequence Number=SeqID_18154
  Gene Ontology: Cellular component=integral to membrane
  Homolog annotation: Hit_ID=B6U937; Match level="QueryCoverage=99%, HitCoverage=50%, E-value=2e-83, Identity=83%"; Hit description =Organic anion transporter
MISRQLVLTYLYLLIYVCLSSGVILFNKWVLSPKYFKFPFPITLTMIHMAFSAIVTFFLVRVFKVVPPVKMTFHIYATCVIPISAFFASSLWFGNTAYLYISVAFIQMLKALMPVATFIMAVLCGTDKLRWDLFLNMLLVSVGVVVSSYGEIHFDVIGTLYQVTGIFAEALRLVLTQVLLQKKGLNPVI

SEQ ID NO: 84129 - protein, 355 aa, Setaria italica
  misc_feature (176)..(176): Xaa can be any naturally occurring amino acid
  Transcript Sequence Number=SeqID_18155
  Homolog annotation: Hit_ID=B9RSM2; Match level="QueryCoverage=87%, HitCoverage=45%, E-value=1e-41, Identity=32%"; Hit description =Ubiquitin-protein ligase, putative
NARPSVCVKKGRKLQHSVKKNSADERSHDGDSGEPLLRDKSPVLNNNIALPRGTPVTNIAGAQLDDEDIGAAIQFLEFCRTFAEIFQIRKGQSERILQDVVGGRELRLVSSVVAEFHMNLLSVIQEGKGKKPLAYTRDGDAWVIDVGKYISECDFISKELPLDCLNQGVSGYKNLXPSCKLRVLNFLCDETLSTDKLRNWIDMQNDVAAEPMNAAREKARAAKEKEKELKERLKGNMDKTMLSSNEAAALSSEENKDLISQIKEAQEVKRTAINYMAAMEKQGSLWTKPLMVEKGLGYWKLDGYCNSTTILLQEYGDHELMANKDKWFMFTEDEEKVIEEHIARSRHQMRKRIRV

SEQ ID NO: 84130 - protein, 90 aa, Setaria italica
  Transcript Sequence Number=SeqID_18156
VLFFIFCFSDMAAMEKQGSLWTKPLMVEKGLGYWKLDGYCNSTTILLQEYGDHELMANKDKWFMFTEDEEKVIEEHIARSRHQMRKRIRV

SEQ ID NO: 84131 - protein, 199 aa, Setaria italica
  Transcript Sequence Number=SeqID_18157
  Homolog annotation: Hit_ID=B9RSM2; Match level="QueryCoverage=45%, HitCoverage=13%, E-value=2e-13, Identity=44%"; Hit description =Ubiquitin-protein ligase, putative
KKLKNLKNKKVKKLKRKLKKAEFHMNLLSVIQEGKGKKPLAYTRDGDAWVIDVGKYISESAFISKELPLDCLNQGVSGYKNLSPSCKLRVLNFLCDETLSTDKLRNWIDMQNDVAAEPMNAAREKARAAKEKEKELKERLKGNMDKTMLSSNEAAALSSEENKDLISQIKEAQEVKRTAINCQNNMTGYIEIFPLQVLS

SEQ ID NO: 84132 - protein, 287 aa, Setaria italica
  Transcript Sequence Number=SeqID_18158
  Gene Ontology: Mol. function=metal ion binding; Cellular component =cytoplasm; Biological process=regulation of transcription, DNA -dependent
  Homolog annotation: Hit_ID=Q9FXE1; Match level="QueryCoverage=43%, HitCoverage=24%, E-value=3e-45, Identity=69%"; Hit description =F12A21.9
  Pfam annotation: Domain name=zf-4CXXC_R1; Domain location=49-150; Score=204.7; E_value=2.4e-58; Accession=PF10497.1; Description=Zinc -finger domain of monoamine-oxida
MAASPERNGYLGKESVEVLEPQPLEVIVPEVKAKKRNPAPGVRVVGRRIYDPENGKTCHQCRQKTTDFAAACKQVKKKGPCPIKYCRKCLLNRYGENAEEVAEKEDWICPKCRGICNCSFCRKKKGEMPTGIMAHIAKASGCTSVHDLLEKGSDVVAAAQAILKVNGSDKHQGTKRSRDSDAADEVAAERDESAGIDLNTFPGDEGDENIGVDLNARPSVCVKKGRKLQHSVKKNSADERSHDGDSGEPLLRDKSPVLNNNIALPRGPNILIIKLCTCNVSDRSTPG

SEQ ID NO: 84133 - protein, 117 aa, Setaria italica
  Transcript Sequence Number=SeqID_18159
AEGGGASRPLRLARLRLRRGRPAAAAVAGDAELPLEEAEAAMRVAADDDSVTATVVSVLLTVAFVGLSILTLGVIYLAVQDFLQKREKEKFEKEEAEKQKEEARQKRAKSRKKRRNY

SEQ ID NO: 84134 - protein, 129 aa, Setaria italica
  Transcript Sequence Number=SeqID_18160
  Gene Ontology: Mol. function=transcription regulator activity; Cellular component=nucleus
  Homolog annotation: Hit_ID=Q6ZBT5; Match level="QueryCoverage=95%, HitCoverage=30%, E-value=6e-23, Identity=55%"; Hit description=BHLH transcription factor (BHLH123)-like protein
  Subcellular localization annotation: CTP_CleavageSite=51; ConfidenceScore=5.34e-01
SNNNGLMLQDPTHDPNHQFLSNLGLELLSSPTSPAGGFRSSSLLRTLTEPSAAVAKPSSLGLFQQYHQQQTVNQAPSSIREALQFTNNTPFWNPSTSFAAAAEGAASLGTAGPPSGQSRPANLAAKVHI

SEQ ID NO: 84135 - protein, 369 aa, Setaria italica
  Transcript Sequence Number=SeqID_18161
  Gene Ontology: Mol. function=peptidase activity
  Homolog annotation: Hit_ID=B9TA47; Match level="QueryCoverage=92%, HitCoverage=90%, E-value=1e-123, Identity=64%"; Hit description =Protein bem46, putative
  Pfam annotation: Domain name=Abhydrolase_1; Domain location=86-345; Score=-14.3; E_value=0.084; Accession=PF00561.12; Description =alphabeta hydrolase fold
  Pfam annotation: Domain name=Peptidase_S9; Domain location=80-253; Score=-66.1; E_value=0.012; Accession=PF00326.13; Description=Prolyl oligopeptidase family
  Pfam module annotation: Pfam domain module=Abhydrolase_1::Peptidase _S9; Domain location=86-345::80-253
TRRGEGERKKGRKGGGDGSRVVELTGVPRRGNVEARRLRTKRGTEVVAMHVRQAGAKLTLLYSHGNAADLGQMYELFVELSSHLNVNLMGYDYSGYGQSSGKPSEQNTYADIEAVYRCLIETYGASEDNIILYGQSVGSGPTLDLASRLTRLRAVVLHSPILSGLRVMYPVKHTYWFDIYKNIDKIPLVRCPVLVIHGTADEVVDCSHGRALWELAKVKYEPLWIKGGNHCNLELYPEYIRHLKKFVGAIEKSPPPPPIDESTESSGPSDRAPAEPECTAEVSRKSTDCRDKTRPSVDHRHSTDRREKPRGSTDRRDKSRKSVDHPDKPRASVDQSDRPRKSIDRFGGMMKSVRLCNIDCFKVTATSGS

SEQ ID NO: 84136 - protein, 318 aa, Setaria italica
  Transcript Sequence Number=SeqID_18162
  Gene Ontology: Mol. function=zinc ion binding
  Homolog annotation: Hit_ID=Q5JMV5; Match level="QueryCoverage=86%, HitCoverage=25%, E-value=2e-38, Identity=32%"; Hit description=Far -red impaired response-like
  Pfam annotation: Domain name=AFT; Domain location=88-154; Score= -38.6; E_value=0.012; Accession=PF08731.3; Description=Transcription factor AFT
  Pfam annotation: Domain name=FAR1; Domain location=74-156; Score =73.4; E_value=8.4e-19; Accession=PF03101.7; Description=FAR1 family
  Pfam module annotation: Pfam domain module=AFT::FAR1; Domain location= 88-154::74-156
RIADEAFIQELEQENGNPILNDEPDDDLNECQEDTAEVEVDCDEDYFFPSPDEVEQARPPEVGMVFATLDDAQRFVNVYGQVTGFVVYKGRNYKHRKITLQCNKSKKAKENEMRQRKRKRNTIERTGCPMRVTVKLVEGRWEIMAVQNEHNHPLSSSPSLTRFFLSHKYMSEEEKNFSRILQESKIKPAKIMEVFWRLRRKFKNIPVQKMAVNNLEQSDRLMKIENTDIESTLEHVRRLQKEQPGFYYAIKTDGDNTVRSIFWTDAQARLDYALYGDFISFDTSYSTIEYNMLFALLIGMNGHGKATVFGWALLEDER

SEQ ID NO: 84137 - protein, 236 aa, Setaria italica
  Transcript Sequence Number=SeqID_18163
  Gene Ontology: Mol. function=heat shock protein binding
  Homolog annotation: Hit_ID=B6U3I3; Match level="QueryCoverage=87%, HitCoverage=88%, E-value=1e-91, Identity=80%"; Hit description=DnaJ domain containing protein
  Pfam annotation: Domain name=DnaJ; Domain location=172-233; Score =26.1; E_value=1.2e-05; Accession=PF00226.23; Description=DnaJ domain
  Subcellular localization annotation: CTP_CleavageSite=34; ConfidenceScore=5.51e-01
MQTAAAARRGAAAWAASAFHSSAAALSKSTPRIRFAVREKRRDAKSALKNILLNGSPCQESINKQMRKQKGSGRPKVQHSCPGKNPYGKNKRGQNWKSFDDDECTDTPYGTFGGKRSFTWYWPGENDELGSSPSGFQWRDESQSAKSRKKFLNESDLDEEEVSGSGHDDLRSYRISLGLPILGPLKLAHIKAAFRASALKWHPDKHQGPSQAEAEEKFRRCVEAYNVLTCAFKSSG

SEQ ID NO: 84138 - protein, 79 aa, Setaria italica
  Transcript Sequence Number=SeqID_18164
  Homolog annotation: Hit_ID=B6TGL2; Match level="QueryCoverage=100%, HitCoverage=21%, E-value=8e-31, Identity=83%"; Hit description=SSE1
IHIGSDIILASIWSAKGGTGRLFVLGEVVHIFRPLVYVLLIRKFGIRSWTPWLVSLAVELTSLGIHSHATDLNHRGGKV

SEQ ID NO: 84139 - protein, 374 aa, Setaria italica
  Transcript Sequence Number=SeqID_18165
  Gene Ontology: Mol. function=protein C-terminus binding; Cellular component=integral to peroxisomal membrane; Biological process =protein import into peroxisome membrane
  Homolog annotation: Hit_ID=B6TGL2; Match level="QueryCoverage=100%, HitCoverage=100%, E-value=0.0, Identity=92%"; Hit description=SSE1
  Pfam annotation: Domain name=Pex16; Domain location=1-367; Score =294.9; E_value=1.7e-85; Accession=PF08610.2; Description=Peroxisomal membrane protein (Pex16)
MEAYKLWVRRNRDLVRSLESLANGLTWILPERFANSEIAPEAVYALLGIVSSVNQHIIDAPTENHSFASKEQSIPWGLVVSILKDVEAVVEVAAQHFVGDDRKWSFLAVTEAVKAGVRLAAFRESGYKMLLQGGEMANEEEMTVLEDNYGVNGNGVPVIYPMNGHSQNGHKAATNGLDGKNGVVSKSLERRAVAALNKFGENAKMMSDPMWMRRLQPTPEPTVMVVEKPTLASIWSAKGGTGRLFVLGEVVHIFRPLVYVLLIRKFGIRSWTPWLVSLAVELTSLGIHSHATDLNHRGGKVHQLSSAERDELKRRKMMWALYVMRDPFFTSYTKRHLQKAEQVLNPVPLIGFLTGKLMELLEGVQTRYTYTSGS

SEQ ID NO: 84140 - protein, 101 aa, Setaria italica
  misc_feature (20)..(20): Xaa can be any naturally occurring amino acid
  Transcript Sequence Number=SeqID_18166
  Gene Ontology: Mol. function=binding
  Homolog annotation: Hit_ID=Q10D20; Match level="QueryCoverage=100%, HitCoverage=2%, E-value=2e-47, Identity=89%"; Hit description=WD-40 repeat family protein, putative, expressed
DMSWRLRCCYLFEEVLTPGXAFCFMYILGQGYRGLFQDTDLLRFVPNWACGGEVMAILDSLEVDVPASSSSQRVDSSMKQGNSRLEISGIVWDMERLRNLS

SEQ ID NO: 84141 - protein, 150 aa, Setaria italica
  Transcript Sequence Number=SeqID_18167
  Homolog annotation: Hit_ID=B9ST76; Match level="QueryCoverage=100%, HitCoverage=10%, E-value=5e-32, Identity=51%"; Hit description=DNA binding protein, putative
SVSDSRREDGFVERAKDVNGIKISPVCTREILPEHEVSFTFSLYDRGYLISKSASMDPSQTSIQDGKTLHPYDRASEKLFSAIEAGRLPGDILDEIPSKYYNGSVVCEIRDYRKHVSNQVPASSSELGLPIINKVRLRMTFENVVKDITL

SEQ ID NO: 84142 - protein, 124 aa, Setaria italica
  Transcript Sequence Number=SeqID_18168
SYLCHQTTHKISEVTNTVYTIYYYRYNLIKTMFDDSPTPPLHQTKMEEECTPRTQPLLPADYIRRETHTCPHAPCTCTRVQRLLPRHRPAVDRSASIGFMQRADAGRCIRRRRRRRRRGSSAAA

SEQ ID NO: 84143 - protein, 719 aa, Setaria italica
  Transcript Sequence Number=SeqID_18169
  Homolog annotation: Hit_ID=Q01IG4; Match level="QueryCoverage=99%, HitCoverage=56%, E-value=5e-69, Identity=43%"; Hit description =H0805A05.2 protein
ESNIIENPNGDGKKKKRRRRHAESSKGVDPSQDLTKLSEFVTNESSMHFADVAPLDVKQTTPGGMEGATVVDHKELGENLVAKNVIDEVLADLRSKDSSSKDLDEDILAGQTHLGSNKNELDLPESTADKVGVSALLPPKYPTDAPASSPRLKKSKGGKLEVLSTMIDSSHHSRSVPKEDANGELNGSDSLRFSDKTSDPKDVLNGDVVAQADDKPKATKRRRKKVSLKQVPADNVKTLDEQVSQVDTLDLKGVNATQANDVMAIESASPNAQKARKKPSNSELQSWDPAREHDSGADLGNLRPEKSLIRPKNSADAAEQNYDSAVHPATDAINFLDHFGSNKMNAPSVSAEHKQDNGDETLREVKNKKKSKRKQGTDSIESNDVLESLLPTDKTSLTGHLDTSKVIVPFVAAENMNNEDENVKNGKEKKRKRKVNTEMPVAEKENPNSDNQGIDIGTQETLSVVQKGSMGRDNGKDRGSKVTQNDSIVQHKPEDATLEKKLHQNGVDDQNTLLAEDHVHISKDVRKSTSKLKPHAKSKHDDSIKGRVAPNPKPARNLVKDFSTSPLVSSDSTEGTPQNANRYRVAVRKVSSKRYEQASEKSKKENRKVGIGAIFNDANSEGSDDELDTKNDKAFMEASADNSATSGDSGISSAAYDESDVPDDDGTTSLSQKSLRDGLHIGSILRGSSSYRKARKKQSELLDDDTIVPDSQPADGLWD

SEQ ID NO: 84144 - protein, 63 aa, Setaria italica
  Transcript Sequence Number=SeqID_18170
  Gene Ontology: Cellular component=cytoskeleton
  Homolog annotation: Hit_ID=B6T4T9; Match level="QueryCoverage=100%, HitCoverage=21%, E-value=8e-24, Identity=83%"; Hit description =Protein ABIL1
MEAVAMSPSSVSSHIYDAASITDDMSLQEGLLFSDTLKDLRNLRSQLYSAAEYFEVFYRNNSQ

SEQ ID NO: 84145 - protein, 72 aa, Setaria italica
  misc_feature (25)..(25): Xaa can be any naturally occurring amino acid
  Transcript Sequence Number=SeqID_18171
  Gene Ontology: Mol. function=ammonia ligase activity; Cellular component=cytoplasm; Biological process=phenylpropanoid metabolic process
  Homolog annotation: Hit_ID=A2IBN5; Match level="QueryCoverage=86%, HitCoverage=10%, E-value=1e-23, Identity=74%"; Hit description =Phenylalanine ammonia-lyase
RVAVGAIAEDSGVSPCLPLRGTITXGRPNAQAVTVDGRKVDAAEAFKVAGIEGGFFKLNPKEGLAIVNGTSR

SEQ ID NO: 84146 - protein, 145 aa, Setaria italica
  Transcript Sequence Number=SeqID_18172
  Gene Ontology: Mol. function=ammonia ligase activity; Cellular component=cytoplasm; Biological process=phenylpropanoid metabolic process
  Homolog annotation: Hit_ID=A2IBN5; Match level="QueryCoverage=61%, HitCoverage=12%, E-value=1e-42, Identity=95%"; Hit description =Phenylalanine ammonia-lyase
PITNHVQSAEQHNQDVNSLGLVSARKTAEAIDILKLMSSTYMVALCQAIDLRHLEENIKTSVKNTVTQVAKKVLTMNPVGELSSARFSDFVREELGCVFLTGEKLKSPARSATRSSSASVRASSSTPSLECLEGVGRQAPANLLS

SEQ ID NO: 84147 - protein, 133 aa, Setaria italica
  misc_feature (24)..(24): Xaa can be any naturally occurring amino acid
  Transcript Sequence Number=SeqID_18173
  Gene Ontology: Mol. function=ammonia ligase activity; Cellular component=cytoplasm; Biological process=phenylpropanoid metabolic process
  Homolog annotation: Hit_ID=A2IBN5; Match level="QueryCoverage=100%, HitCoverage=24%, E-value=4e-55, Identity=68%"; Hit description =Phenylalanine ammonia-lyase
  Pfam annotation: Domain name=PAL; Domain location=1-133; Score= -229.3; E_value=7.3e-05; Accession=PF00221.11; Description =Phenylalanine and histidine ammonia-lyase
HTLPSEVTRAAMLVRINTLLQGYXSGIRFEILEAITKLLNSGVSPCLPLRGTITASGDLVPLSYIAGLITGRPNAQAVGSALAATVLYDANVLAVLSEVLSAVFCEVMNGKPEYTDHLTHKLKHHPGSIEAAA

SEQ ID NO: 84148 - protein, 80 aa, Setaria italica
  Transcript Sequence Number=SeqID_18174
  Gene Ontology: Mol. function=ammonia ligase activity; Cellular component=cytoplasm; Biological process=phenylpropanoid metabolic process
  Homolog annotation: Hit_ID=O04875; Match level="QueryCoverage=98%, HitCoverage=16%, E-value=1e-40, Identity=98%"; Hit description =Phenylalanine ammonia-lyase (Fragment)
PKQDRYALRTSPQWLGPQIEVIRAATKSIEREINSVNDNPLIDVSRGKALHGGNFQGTPIGVSMDNTRLAIAAIGKLMFD

SEQ ID NO: 84149 - protein, 27 aa, Setaria italica
  Transcript Sequence Number=SeqID_18175
IDLARMSCCGGNCGCGSGCKCGSGCGG

SEQ ID NO: 84150 - protein, 40 aa, Setaria italica
  Transcript Sequence Number=SeqID_18176
  Gene Ontology: Mol. function=glutamate-ammonia ligase activity; Cellular component=cytoplasm; Biological process=nitrogen compound metabolic process
  Homolog annotation: Hit_ID=P38559; Match level="QueryCoverage=100%, HitCoverage=11%, E-value=2e-15, Identity=100%"; Hit description =Glutamine synthetase root isozyme 1
INGEVMPGQWEFQVGPSVGISAGDEIWVARYILERITEMA

SEQ ID NO: 84151 - protein, 62 aa, Setaria italica
  Transcript Sequence Number=SeqID_18177
MAMSSIRSALARALVASKLCGPHRFAATAAAGDMQPERVAAKMVHYALGGVVHRSSPVSRSP

SEQ ID NO: 84152 - protein, 48 aa, Setaria italica
  Transcript Sequence Number=SeqID_18178
  Gene Ontology: Mol. function=glutamate-ammonia ligase activity; Cellular component=cytoplasm; Biological process=nitrogen compound metabolic process
  Homolog annotation: Hit_ID=P14654; Match level="QueryCoverage=81%, HitCoverage=10%, E-value=1e-13, Identity=92%"; Hit description =Glutamine synthetase cytosolic isozyme 1-2
  Pfam annotation: Domain name=Gln-synt_N; Domain location=4-48; Score=- 5.6; E_value=0.012; Accession=PF03951.11; Description=Glutamine synthetase, beta-Grasp domain
MFLTVVLLEQTVKGPITSASQLPKWNYDGSSTGQAPGEDSEVILYPQA

SEQ ID NO: 84153 - protein, 67 aa, Setaria italica
  Transcript Sequence Number=SeqID_18179
  Gene Ontology: Mol. function=ammonia ligase activity; Cellular component=cytoplasm; Biological process=phenylpropanoid metabolic process
  Homolog annotation: Hit_ID=Q7F929; Match level="QueryCoverage=100%, HitCoverage=9%, E-value=5e-30, Identity=95%"; Hit description =Phenylalanine ammonia-lyase
GTGDDGHVLPASATRAAMLVRINTLLQGYSGIRFEILETIASLLNANVTPCLPLRGTITASGDLVPL

SEQ ID NO: 84154 - protein, 77 aa, Setaria italica
  misc_feature (25)..(25): Xaa can be any naturally occurring amino acid
  Transcript Sequence Number=SeqID_18180
AKTSLEQHQTEVLAFSYGEYLHCVXDFPMATQVYESVLEAARMEDMSGNLLAAGNMVPEEVSLGATCSYGQLLSHSG

SEQ ID NO: 84155 - protein, 66 aa, Setaria italica
  Transcript Sequence Number=SeqID_18181
QQVAPSAAFRVAAWEALMGLHMEAGQEISNSVSPNDSVDLSIKRIEQDQVGTRIKDHLKIRVNAIK

SEQ ID NO: 84156 - protein, 78 aa, Setaria italica
  misc_feature (44)..(44): Xaa can be any naturally occurring amino acid
  misc_feature (56)..(56): Xaa can be any naturally occurring amino acid
  Transcript Sequence Number=SeqID_18182
  Gene Ontology: Mol. function=phenylalanine ammonia-lyase activity; Cellular component=cytoplasm; Biological process=phenylpropanoid metabolic process
  Homolog annotation: Hit_ID=Q7F929; Match level="QueryCoverage=85%, HitCoverage=9%, E-value=2e-26, Identity=89%"; Hit description =Phenylalanine ammonia-lyase
YEEPIAKLLNANVTPCLPLRGTITASGDLVPLSYIAGLITGRPXNSVAVAPDGRKXDAAEAFKIAGIEHWVLWSCSPR

SEQ ID NO: 84157 - protein, 60 aa, Setaria italica
  Transcript Sequence Number=SeqID_18183
  Subcellular localization annotation: CTP_CleavageSite=12; ConfidenceScore=5.11e-01
QKYSISRPLFFLCMEVFSPPVGSSAERQFSRAAGARVPQGVERRAPAALLNCPQEVFSPP

SEQ ID NO: 84158 - protein, 60 aa, Setaria italica
  misc_feature (44)..(44): Xaa can be any naturally occurring amino acid
  Transcript Sequence Number=SeqID_18184
MGMSSIRSALARALVAPKLRGPHRFAATAAAGDTQPERVAAEMXEAMRILEQGASNLQGG

SEQ ID NO: 84159 - protein, 76 aa, Setaria italica
  Transcript Sequence Number=SeqID_18185
ISRWEKGWMNIPLVGRRNARDDGLGGGGALLSHVRVHLAPADHASGRSASSEISLVEGAQQQHAHRFRESEFIRQE

SEQ ID NO: 84160 - protein, 51 aa, Setaria italica
  Transcript Sequence Number=SeqID_18186
GSCPSFSFCCTREISKLLCYMFKVLNLIAVPSLIVAASLQSSVLYLNYSIM

SEQ ID NO: 84161 - protein, 180 aa, Setaria italica
  misc_feature (66)..(66): Xaa can be any naturally occurring amino acid
  Transcript Sequence Number=SeqID_18187
  Gene Ontology: Mol. function=ammonia ligase activity; Cellular component=cytoplasm; Biological process=phenylpropanoid metabolic process
  Homolog annotation: Hit_ID=A2IBN5; Match level="QueryCoverage=97%, HitCoverage=22%, E-value=2e-67, Identity=76%"; Hit description =Phenylalanine ammonia-lyase
  Pfam annotation: Domain name=PAL; Domain location=1-178; Score= -177.2; E_value=3.3e-07; Accession=PF00221.11; Description =Phenylalanine and histidine ammonia-lyase
MDNARLAIVNGTSVGSALAATVLYDANVLAVLSEVLSAVFCEVMNGKPEYTDHLTHKLKHHPGSIXEAAAIMEHILEGSAFMKHAKKVNELDPLLKPKQDRYALRTSPQWLGPQIEVIRAATKSIEREVNSVNDNPVIDVHRRSKVVLSFTVFGFFFFLTFFFPRGTPIRGCPMDNARLA

SEQ ID NO: 84162 - protein, 69 aa, Setaria italica
  Transcript Sequence Number=SeqID_18188
MRGRARPRRGGPALRHLPRLHGRPRRLHPRHPDAFPGISQSAYEKLGVEPGSVPVCHFLPQDSMLWMRN

SEQ ID NO: 84163 - protein, 111 aa, Setaria italica
  Transcript Sequence Number=SeqID_18189
  Gene Ontology: Mol. function=protein serine/threonine kinase activity; Cellular component=plasma membrane; Biological process =protein amino acid phosphorylation
  Homolog annotation: Hit_ID=P53683; Match level="QueryCoverage=94%, HitCoverage=19%, E-value=4e-54, Identity=96%"; Hit description =Calcium-dependent protein kinase isoform 2
  Pfam annotation: Domain name=efhand; Domain location=42-70; Score =31.6; E_value=3.2e-06; Accession=PF00036.24; Description=EF hand
  Pfam annotation: Domain name=efhand; Domain location=6-34; Score =23.1; E_value=0.0011; Accession=PF00036.24; Description=EF hand
  Pfam annotation: Domain name=efhand; Domain location=77-105; Score =41.8; E_value=2.8e-09; Accession=PF00036.24; Description=EF hand
  Pfam module annotation: Pfam domain module=efhand::efhand::efhand; Domain location=42-70::6-34::77-105
EGYTKACEQLMEAADVDGNGSIDYVEFITATMHRHKLERDEHLFKAFQYFDKDNSGFITRDELESALIEHEMGDTSTIKEIISEVDTDNDGRINYEEFCAMMRGGMQQPMR

SEQ ID NO: 84164 - protein, 94 aa, Setaria italica
  misc_feature (72)..(72): Xaa can be any naturally occurring amino acid
  Transcript Sequence Number=SeqID_18190
  Gene Ontology: Mol. function=ammonia ligase activity; Cellular component=cytoplasm; Biological process=phenylpropanoid metabolic process
  Homolog annotation: Hit_ID=P14717; Match level="QueryCoverage=98%, HitCoverage=13%, E-value=3e-29, Identity=68%"; Hit description =Phenylalanine ammonia-lyase
AEMAGSHLDEVKRMVAQFREPLVKIEGSSLRVGQVAAVAAAKDASGVAVELDEDARPRVKASSEWILDCIAXHGGDIYGVTTGFGGARCRRSRW

SEQ ID NO: 84165 - protein, 160 aa, Setaria italica
  Transcript Sequence Number=SeqID_18191
  Gene Ontology: Mol. function=ammonia ligase activity; Cellular component=cytoplasm; Biological process=phenylpropanoid metabolic process
  Homolog annotation: Hit_ID=A2IBN5; Match level="QueryCoverage=43%, HitCoverage=9%, E-value=2e-30, Identity=91%"; Hit description =Phenylalanine ammonia-lyase
MEHILEGSAFMKHAKKVNELDPLLKPKQDRYALRTSPQWLGPQIEVIRAATKSIEREVNSVDDRPCARVPLPAPGQHALDAQLKIKLGFKVAHGHAPRLHAELLVRRLRDTRERVRVARREGLPLGRRPVGAGEAHRVHGGGGCVAREHGVRIGHAVAGN

SEQ ID NO: 84166 - protein, 99 aa, Setaria italica
  Transcript Sequence Number=SeqID_18192
  Gene Ontology: Mol. function=glutamate-ammonia ligase activity; Cellular component=cytoplasm; Biological process=nitrogen compound metabolic process
  Homolog annotation: Hit_ID=Q9AXD8; Match level="QueryCoverage=58%, HitCoverage=16%, E-value=3e-26, Identity=87%"; Hit description =Glutamine synthetase
IRPFGRDVVDAHYKACLYAGINISGINGEVMPGQWEFQVGPSVGISAGDEIWVARYILEVRFEASAWDKIIRILLSHSAPDQLDSFVPLVCYTLKLTVF

SEQ ID NO: 84167 - protein, 79 aa, Setaria italica
  Transcript Sequence Number=SeqID_18193
WCWHLILHIRRLAQTPTSPAVMVSVALAPASTVAELCASLKCQHHHDPVNKKRCVDFCIRWQLALLFDVKEEDGASSIL

SEQ ID NO: 84168 - protein, 68 aa, Setaria italica
  Transcript Sequence Number=SeqID_18194
ELSNIFCFCSLLFVCFVYVYVKKATVYGNKAILGHLPHCCQWNELPTVALMYKEESVRRFDIVLFIFN

SEQ ID NO: 84169 - protein, 102 aa, Setaria italica
  misc_feature (66)..(66): Xaa can be any naturally occurring amino acid
  Transcript Sequence Number=SeqID_18195
  Gene Ontology: Mol. function=ammonia ligase activity; Cellular component=cytoplasm; Biological process=phenylpropanoid metabolic process
  Homolog annotation: Hit_ID=A2IBN5; Match level="QueryCoverage=70%, HitCoverage=10%, E-value=6e-32, Identity=87%"; Hit description =Phenylalanine ammonia-lyase
  Subcellular localization annotation: CTP_CleavageSite=29; ConfidenceScore=5.55e-01
MGSTSLPWLIPTNTLLHSSPGDLSFSPVRNTHPSSSRIKDSRSFPLYRFVREELGCVFLTGEKLKXPGEECNKVFVGISQGKLVDPMLECLKEWDGKPLPIN

SEQ ID NO: 84170 - protein, 186 aa, Setaria italica
  Transcript Sequence Number=SeqID_18196
  Gene Ontology: Mol. function=nucleic acid binding; Cellular component= nucleus; Biological process=mRNA processing
  Homolog annotation: Hit_ID=B6UDT4; Match level="QueryCoverage=71%, HitCoverage=23%, E-value=4e-53, Identity=80%"; Hit description =Splicing factor U2AF 65 kDa subunit
  Subcellular localization annotation: CTP_CleavageSite=70; ConfidenceScore=5.03e-01
DRDRHRSLDSERRRDRDRDGHRRHRSRSRSPSKSRDRDRRSRSRSRSRSKSKRVSGFDQGPLQQTMPIVTAGAVPEGNLGLLFTPIPGMFPNLLMGPMNPLIQPQAMTQQATRHARRVYVGGLPPTANEQTVAIFFNGVMAAIGGNTAGPGDAVLNVYINHDKKFAFVEMRSVEEASNAMALDGIM

SEQ ID NO: 84171 - protein, 257 aa, Setaria italica
  misc_feature (68)..(68): Xaa can be any naturally occurring amino acid
  misc_feature (173)..(173): Xaa can be any naturally occurring amino acid
  Transcript Sequence Number=SeqID_18197
  Gene Ontology: Mol. function=protein serine/threonine kinase activity; Cellular component=plasma membrane; Biological process =protein amino acid phosphorylation
  Homolog annotation: Hit_ID=P53683; Match level="QueryCoverage=97%, HitCoverage=46%, E-value=1e-126, Identity=89%"; Hit description =Calcium-dependent protein kinase isoform 2
  Pfam annotation: Domain name=Pkinase; Domain location=1-107; Score= -76.6; E_value=0.00062; Accession=PF00069.17; Description=Protein kinase domain
  Pfam annotation: Domain name=efhand; Domain location=154-182; Score =34.6; E_value=3.9e-07; Accession=PF00036.24; Description=EF hand
  Pfam annotation: Domain name=efhand; Domain location=190-218; Score =27.5; E_value=5.4e-05; Accession=PF00036.24; Description=EF hand
  Pfam annotation: Domain name=efhand; Domain location=226-254; Score =32.4; E_value=1.9e-06; Accession=PF00036.24; Description=EF hand
  Pfam module annotation: Pfam domain module=Pkinase::efhand::efhand::ef hand; Domain location=1-107::154-182::190-218::226-254
EEGKMYRDIVGSAYYVAPEVLRRSYGKEIDVWSAGVMLYILLSGVPPFWAETEKGIFDAILHEEIDFXESQPWPSISESAKDLVRKMLTRDPKKRLTSGQVLQHPWLREGGDASDKPIDSAVLSRMKQFRAMNKLKKMALKVIASNLNEEEIKGLKQMFMNMDTDNSGTITYXELKAGLAKLGSKLSEAEVKQLMEAADVDGNGSIDYVEFITATMHRHKLERDEHLFKAFQYFDKDNSGFITRDELESAYQSTGMP

SEQ ID NO: 84172 - protein, 85 aa, Setaria italica
  Transcript Sequence Number=SeqID_18198
  Pfam annotation: Domain name=Metallothio_2; Domain location=1-83; Score=139.7; E_value=9.2e-39; Accession=PF01439.10; Description =Metallothionein
MSCCGGNCGCGSGCKCGSGCGGCKMYPDMAEQGTTTTQTVITGVAPSNKGHADGGFEGGAASAGAENGGCKCGPNCTCNPCTCGK

SEQ ID NO: 84173 - protein, 179 aa, Setaria italica
  Transcript Sequence Number=SeqID_18199
  Gene Ontology: Mol. function=ammonia ligase activity; Cellular component=cytoplasm; Biological process=phenylpropanoid metabolic process
  Homolog annotation: Hit_ID=A2IBN5; Match level="QueryCoverage=92%, HitCoverage=23%, E-value=6e-82, Identity=89%"; Hit description =Phenylalanine ammonia-lyase
  Pfam annotation: Domain name=PAL; Domain location=1-179; Score= -112.5; E_value=3.9e-10; Accession=PF00221.11; Description =Phenylalanine and histidine ammonia-lyase
ELDPLLKPKQDRYALRTSPQWLGPQIEVIRAATKSIEREVNSVNDNPVIDVHRGKALHGGNFQGTPIGVSMDNARLAIANIGKLMFAQFSELVNEFYNNGLTSNLAGSRNPSLDYGFKGTEIAMASYCSELQYLGNPITNHVGGGHELEDVDGLGGLPGRDEAEGVHVLVVLLRALHVV

SEQ ID NO: 84174 - protein, 228 aa, Setaria italica
  misc_feature (37)..(37): Xaa can be any naturally occurring amino acid
  Transcript Sequence Number=SeqID_18200
  Gene Ontology: Mol. function=binding
  Pfam annotation: Domain name=Auxin_inducible; Domain location=141 -187; Score=-15.2; E_value=0.077; Accession=PF02519.6; Description =Auxin responsive protein
GLHMEAGQEISNSVSPNDSVDLSIKDDSQWSDQDHLXKFRVNAIKGLIALLNGETESAQLFTDGCKDFAGGKHQTESAAFSYGEYLHCVGDFPMATQVYESVLEAARMEDMSGNLLAAGNMVPEEVSLGATCSYGQLLSHSGKFGEAEDYLTRALQKAQEQFGSNHPKVGIVLTCVARMYKLLAMSEGSSSIMAGHDFAVDAADVDAGVEAGLVVGVNDVAPKGLIGT

SEQ ID NO: 84175 - protein, 66 aa, Setaria italica
  Transcript Sequence Number=SeqID_18201
QVAAVAASAQYQDDSVGTAFFLDKDLYPGSKMTLHFTLAAAGAALPRALANTIPFASARIQEILSR

SEQ ID NO: 84176 - protein, 79 aa, Setaria italica
  Transcript Sequence Number=SeqID_18202
  Gene Ontology: Mol. function=glutamate-ammonia ligase activity; Cellular component=cytoplasm; Biological process=nitrogen compound metabolic process
  Homolog annotation: Hit_ID=P38559; Match level="QueryCoverage=94%, HitCoverage=21%, E-value=1e-33, Identity=94%"; Hit description =Glutamine synthetase root isozyme 1
LRGDQVGPSVGISAGDEIWVARYILERITEMAGVVLSLDPKPIKGDWNGAGAHTNYSTKSMREPGGYEVIKKAIEKLGK

SEQ ID NO: 84177 - protein, 90 aa, Setaria italica
  misc_feature (45)..(45): Xaa can be any naturally occurring amino acid
  misc_feature (73)..(73): Xaa can be any naturally occurring amino acid
  Transcript Sequence Number=SeqID_18203
  Homolog annotation: Hit_ID=Q6I5B2; Match level="QueryCoverage=78%, HitCoverage=28%, E-value=1e-16, Identity=70%"; Hit description=BURP domain-containing protein 6
  Pfam annotation: Domain name=BURP; Domain location=1-90; Score=-69.9; E_value=5.3e-05; Accession=PF03181.7; Description=BURP domain
MRWQATMSPPATGRGLTDTVFACHATTAAVYAVSLAGADGTTAKXEALAACHADAFPGISQSAYEKLGVEPGXVPVCHFLPQDSMLWMRN

SEQ ID NO: 84178 - protein, 120 aa, Setaria italica
  Transcript Sequence Number=SeqID_18204
DATDTITAGEVGVCANRRICKIKCQHHHDQVNSNRCTDFCIGYQVALDAIMENGATATVTAGEDTLRGSRRTCELKCQHHHNPVNKKRCVDFCIRYQLALHDINDGTTAAAAGGAIRQVV

SEQ ID NO: 84179 - protein, 180 aa, Setaria italica
  misc_feature (13)..(13): Xaa can be any naturally occurring amino acid
  Transcript Sequence Number=SeqID_18205
  Gene Ontology: Mol. function=nucleic acid binding; Cellular component= nucleus; Biological process=mRNA processing
  Homolog annotation: Hit_ID=B6UDT4; Match level="QueryCoverage=59%, HitCoverage=17%, E-value=2e-38, Identity=74%"; Hit description =Splicing factor U2AF 65 kDa subunit
TTKGTNAFCVYQXLTVTDIACAALNGIKMGDKTLTVRRANQGAAQPRPEQESILLQAQQQVQMQKLVYQVGGALPTKVVCLTQVVTADELRDDEEYEDIVEDMREEGRKYGMLHETLDFCPLLVLTSYILFYNCFDCLPSVTELVSFCVFVFLCVFFVVPHNAIAECFIVRPYAILAIGP

SEQ ID NO: 84180 - protein, 212 aa, Setaria italica
  misc_feature (81)..(81): Xaa can be any naturally occurring amino acid
  Transcript Sequence Number=SeqID_18206
  Gene Ontology: Mol. function=ammonia ligase activity; Cellular component=cytoplasm; Biological process=phenylpropanoid metabolic process
  Homolog annotation: Hit_ID=A2IBN5; Match level="QueryCoverage=96%, HitCoverage=29%, E-value=1e-105, Identity=89%"; Hit description =Phenylalanine ammonia-lyase
  Pfam annotation: Domain name=PAL; Domain location=1-212; Score=41.1; E_value=4.5e-17; Accession=PF00221.11; Description=Phenylalanine and histidine ammonia-lyase
TERQARAYSGIRFEILEAITKLLNSGVSPCLPLRGTITASGDLVPLSYIAGLITGRPNAQAVTVDGRKVDAAEAFKVAGIXGGFFRLNPKEGLAIVNGTSVGSALAATVLYDANLLAVLSEVLSAVFCEVMNGKPEYTDHLTHKLKHHPGSIEAAAIMEHILEGSAFMKHAKKVNELDPLLKPKQDRYALRTSPQWLGPQIEVIRAATKSYS

SEQ ID NO: 84181 - protein, 146 aa, Setaria italica
  misc_feature (123)..(123): Xaa can be any naturally occurring amino acid
  Transcript Sequence Number=SeqID_18207
  Gene Ontology: Mol. function=glutamate-ammonia ligase activity; Cellular component=cytoplasm; Biological process=nitrogen compound metabolic process
  Homolog annotation: Hit_ID=P38559; Match level="QueryCoverage=94%, HitCoverage=38%, E-value=7e-68, Identity=92%"; Hit description =Glutamine synthetase root isozyme 1
  Pfam annotation: Domain name=Gln-synt_C; Domain location=1-144; Score= -25.2; E_value=2.3e-09; Accession=PF00120.16; Description=Glutamine synthetase, catalytic domain
QCFLLTGWLQRITEMAGVVLSLDPKPIKGDWNGAGAHTNYSTKSMREPGGYEVIKKAIEKLGKRHKEHIAAYGEGNERRLTGHHETADINTFKWGVANRGASIRVGRDTEKEGKGYFEDRRPXASNMDPYVVTGMIAETTILGKGN

SEQ ID NO: 84182 - protein, 131 aa, Setaria italica
  Transcript Sequence Number=SeqID_18208
RAALEPAVGVPLVGRRNARDDGLGGGGALLSHVRVHLAPADHASGRSASSEISLVEGAQQQHAHRFRESEFIRQEFTCAAKHEKTSSFFSKIKKGSLISQLYISYTQRSIHKGPARTKEQPNPCIHMGIDT

SEQ ID NO: 84183 - protein, 253 aa, Setaria italica
  Transcript Sequence Number=SeqID_18209
  Gene Ontology: Mol. function=ammonia ligase activity; Cellular component=cytoplasm; Biological process=phenylpropanoid metabolic process
  Homolog annotation: Hit_ID=Q7F929; Match level="QueryCoverage=100%, HitCoverage=35%, E-value=1e-121, Identity=82%"; Hit description =Phenylalanine ammonia-lyase
SYCSELQFLGNPVTNHVQSAEQHNQDVNSLGLISSRKTAEAVDILKLMSSTFLIALCQAIDLRHLEENLKGAVKSCVMTVAKKTLSTGATGALHNARFCEKDLLTAIDREAVFAYADDSCSANYPLMQKMRSVLVEHALANGEAERDPETSVFAKVATFEEEIRAALPREVEAARAAVENGTAAIPNRIAECRSYPLYRFVREELGTQYLTGEKTRSPGEEVDKVFVAMNLGKHIDAVLECLKEWNGEPLSIC

SEQ ID NO: 84184 - protein, 170 aa, Setaria italica
  misc_feature (154)..(154): Xaa can be any naturally occurring amino acid
  Transcript Sequence Number=SeqID_18210
  Gene Ontology: Mol. function=glutamate-ammonia ligase activity; Cellular component=cytoplasm; Biological process=nitrogen compound metabolic process
  Homolog annotation: Hit_ID=P14656; Match level="QueryCoverage=91%, HitCoverage=43%, E-value=4e-87, Identity=96%"; Hit description =Glutamine synthetase cytosolic isozyme 1-1
  Pfam annotation: Domain name=Gln-synt_C; Domain location=44-170; Score=-72.8; E_value=2.9e-06; Accession=PF00120.16; Description =Glutamine synthetase, catalytic domain
MELSLSLGHVTSCSPQAIFKDPFRKGNNILVMCDCYTPAGEPIPTNKRHNAAKIFSNPEVSAEEPWYGIEQEYTLLQKDTNWPLGWPVGGFPGPQGPYYCGIGADKSFGRDIVDSHYKACLYAGINISGINGEVMPGQWEFQVGPSVGISAGDXVWVARYILERITEIAG

SEQ ID NO: 84185 - protein, 79 aa, Setaria italica
  Transcript Sequence Number=SeqID_18211
  Pfam annotation: Domain name=Metallothio_2; Domain location=1-77; Score=139.2; E_value=1.2e-38; Accession=PF01439.10; Description =Metallothionein
MSCCGGNCGCGSGCKCGSGCGGCKMYPDMAEQGTTTTQTVITGVAPSNKGYGGAASAGAENGGCKCGPNCTCNPCTCGK

SEQ ID NO: 84186 - protein, 197 aa, Setaria italica
  Transcript Sequence Number=SeqID_18212
  Gene Ontology: Mol. function=nucleic acid binding; Cellular component= nucleus; Biological process=mRNA processing
  Homolog annotation: Hit_ID=B6UDT4; Match level="QueryCoverage=99%, HitCoverage=32%, E-value=3e-92, Identity=86%"; Hit description =Splicing factor U2AF 65 kDa subunit
  Pfam annotation: Domain name=RRM_1; Domain location=1-54; Score=22.4; E_value=0.0016; Accession=PF00076.14; Description=RNA recognition motif. (a.k.a. RRM, RBD, o
LLESFGPLRGFDLVKDRETGNSKGYAFCVYQDLTVTDIACAALNGIKMGDKTLTVRRANQGAAQPRPEQESILLQAQQQVQMQKLVYQVGGALPTKVVCLTQVVTADELRDDEEYEDIVEDMREEGRKYGNLVKVVIPRPDPSGAPVAGVGKVFLEYADVDGSTKAKTGMHGRKFGGNQVVAVFYPEDKFAAEQYDG

SEQ ID NO: 84187 - protein, 65 aa, Setaria italica
  Transcript Sequence Number=SeqID_18213
MGQCCSRATAPDSGRGVTNGYGYSNQAKPAHTPPSYNAPPPPTEVRYTPPAMNPPVVPPVVVPTE

SEQ ID NO: 84188 - protein, 169 aa, Setaria italica
  misc_feature (20)..(20): Xaa can be any naturally occurring amino acid
  Transcript Sequence Number=SeqID_18214
  Gene Ontology: Mol. function=nucleic acid binding; Cellular component= nucleus; Biological process=mRNA processing
  Homolog annotation: Hit_ID=Q2QZL4; Match level="QueryCoverage=66%, HitCoverage=19%, E-value=3e-45, Identity=83%"; Hit description =Splicing factor U2af large subunit B
  Subcellular localization annotation: CTP_CleavageSite=91; ConfidenceScore=5.16e-01
ERRRDRDRDGHRRNRSRSRXRSRGTDRSRSRSKRVSGFDAPPPQAMSSTFPVIPTPSQLPGSSLPNIGGMFPNMLPFGVTGQFNPLVIQPQAMTQQATRHARRVYVGGLPPSANEQTVAVYFNQVMAAIGGNTAGPGDAVLNVYINTPSMSSSLLCHGLRLNKGVHRSH

SEQ ID NO: 84189 - protein, 362 aa, Setaria italica
  Transcript Sequence Number=SeqID_18215
  Gene Ontology: Mol. function=ammonia ligase activity; Cellular component=cytoplasm; Biological process=phenylpropanoid metabolic process
  Homolog annotation: Hit_ID=Q0DZE0; Match level="QueryCoverage=100%, HitCoverage=50%, E-value=0.0, Identity=94%"; Hit description =Phenylalanine ammonia-lyase
  Pfam annotation: Domain name=PAL; Domain location=1-199; Score=38.4; E_value=6e-17; Accession=PF00221.11; Description=Phenylalanine and histidine ammonia-lyase
TSPQWLGPQIEVIRAATKSIEREINSVNDNPLIDVARSKALHGGNFQGTPIGVSMDNTRLAIAAIGKLMFAQFSELVNDYYNNGLPSNLSGGRNPSLDYGFKGAEIAMASYCSELQFLGNPVTNHVQSAEQHNQDVNSLGLISSRKTAEAIEILKIMSSTFLIALCQAVDLRHIEENVKSAVKSCVMTVAKKTLSTNSTGGLHVARFCEKDLLQEIEREAVFAYADDPCSANYPLMKKLRNVLVERALANGTAEFNAETSVLAKVAQFEEELRAALPKAVEAARAAVENGTAAIPIRITECRSYPLYRFVREELGAVYLTGEKTRSPGEELNKVLVAINQGKHIDPLLECLKEWNGEPLPIC

SEQ ID NO: 84190 - protein, 554 aa, Setaria italica
  misc_feature (506)..(506): Xaa can be any naturally occurring amino acid
  misc_feature (521)..(521): Xaa can be any naturally occurring amino acid
  Transcript Sequence Number=SeqID_18216
  Gene Ontology: Mol. function=ammonia ligase activity; Cellular component=cytoplasm; Biological process=phenylpropanoid metabolic process
  Homolog annotation: Hit_ID=A2IBN5; Match level="QueryCoverage=95%, HitCoverage=75%, E-value=0.0, Identity=89%"; Hit description =Phenylalanine ammonia-lyase
  Pfam annotation: Domain name=PAL; Domain location=1-466; Score=990.6; E_value=6.6e-295; Accession=PF00221.11; Description=Phenylalanine and histidine ammonia-lyase
RLRVKASSEWVLSCIENGGDIYGVTTGFGGNSHRRTKDGHALQVELLRYLNAGIFGTGSDGHTLPSQVSRAAMLVRINALMQGYSGIRFEILEAIAKLINTGVSPCLPLRGSITASGDLVPLSYIAVLITGRPNAQAVTVDGRKVDAAEAFKVAGIEGGFFKLNPKEGLAMVNGTSVGSALAAMVCFDANVLAVLAVVLSAVFCEVMNGKPEYADHLTHKLKHHPGSIEAAAIMEHILDGSSLMKHAKEVNAMDPLLKPKQDQYALRTSPQWLGPQIEVIRAATKSIEREVNSVNDNPVIDVHRGKALHGGNFQGTPIGVSMDNARLAIANIGKLMFAQFSELVNEFYNNGLTSNLAGSRNPSLDYGFKGTEIAMASYCSELQYLGNPITNHVQSAEQHNQDVNSLGLVSARKTAEAIDILKLMSSTYMVALCQAIDLRHLEENIKTSVKNTVTQVAKKVLTMNPTGDLSSARFSEKDLITAIDREGVFTYAEDAASASLPLMHEXLRAVLVDHAFSSGDXALHVLQDHQVRGGAARGAAPGGGGWRWRRPRRR

SEQ ID NO: 84191 - protein, 453 aa, Setaria italica
  misc_feature (115)..(115): Xaa can be any naturally occurring amino acid
  Transcript Sequence Number=SeqID_18217
  Gene Ontology: Mol. function=ammonia ligase activity; Cellular component=cytoplasm; Biological process=phenylpropanoid metabolic process
  Homolog annotation: Hit_ID=Q6K6Q1; Match level="QueryCoverage=98%, HitCoverage=60%, E-value=0.0, Identity=85%"; Hit description =Phenylalanine ammonia-lyase
  Pfam annotation: Domain name=PAL; Domain location=24-453; Score =793.2; E_value=1.7e-235; Accession=PF00221.11; Description =Phenylalanine and histidine ammonia-lyase
RAEGPVRQHLEAVKRMVEEYRRPLVRIEGSSLTVAQVAAVANGAGEARVELDESARGRVKASSDWVMNSMMNGTDSYGVTTGFGATSHRRTKEGGALQRELIRFLNAGAFGTGTXDGHVLPAEATRAAMLVRINTLLQGYSGIRFEILEAIVKLLNANVTPCLPLRGTVTASGDLVPLSYIAGLVTGRENSVAVAPDGTKVNAAEAFKIAGIQGGFFELQPKEGLAMVNGTAVGSGLASTVLFEANVLAVLAEVLSAVFCEVMNGKPEYTDHLTHKLKHHPGQIEAAAIMEHILEGSSYMKLAKKLGELDPLMKPKQDRYALRTSPQWLGPQIEVIRFATKSIEREINSVNDNPLIDVSRGKALHGGNFQGTPIGVSMDNTRLALAAIGKLMFAQFSELVNDFYNNGLPSNQAGVAPTRQVGGRNPSLDYGFKGAEIAMASYCSELQFLGNPV

SEQ ID NO: 84192 - protein, 140 aa, Setaria italica
  Transcript Sequence Number=SeqID_18218
  Homolog annotation: Hit_ID=Q6I5B2; Match level="QueryCoverage=100%, HitCoverage=56%, E-value=2e-33, Identity=59%"; Hit description=BURP domain-containing protein 6
  Pfam annotation: Domain name=BURP; Domain location=1-140; Score=65.3; E_value=2.3e-16; Accession=PF03181.7; Description=BURP domain
ALRCVTSPDSMADLAAARMFRVPRMEAATKLTSTEGATTRQEYTMVSVRPLPVAGGDMVACHRMPYPYAVFACHATTAAVYAVSLAGADGTTAKGEALAACHADAFPGISQSAYEKLGVEPGSVPVCHFLPQDSMLWMRN

SEQ ID NO: 84193 - protein, 302 aa, Setaria italica
  misc_feature (77)..(77): Xaa can be any naturally occurring amino acid
  Transcript Sequence Number=SeqID_18219
  Gene Ontology: Mol. function=phenylalanine ammonia-lyase activity; Cellular component=cytoplasm; Biological process=phenylpropanoid metabolic process
  Homolog annotation: Hit_ID=Q6K6Q1; Match level="QueryCoverage=96%, HitCoverage=40%, E-value=1e-163, Identity=95%"; Hit description =Phenylalanine ammonia-lyase
  Pfam annotation: Domain name=PAL; Domain location=1-270; Score=279.8; E_value=6e-81; Accession=PF00221.11; Description=Phenylalanine and histidine ammonia-lyase
AEHSGDDLGHDGEPEFTDHLTHKLKHHPGQIEAAAIMEHILEGSSYMKLAKKLGELDPLMKPKQDRYALRTSPQWLXGPQIEVIRFATKSIEREINSVNDNPLIDVSRGKALHGGNFQGTPIGVSMDNTRLALAAIGKLMFAQFSELVNDFYNNGLPSNLSGGRNPSLDYGFKGAEIAMASYCSELQFLGNPVTNHVQSAEQHNQDVNSLGLISSRKTAEAIEILKLMTSTFLIALCQAIDLRHLEENMKAAVKNCVTQVAKKTLSMNAMGGLHIARFCEKDLQTAIDREAVFAYADDRYSG

SEQ ID NO: 84194 - protein, 281 aa, Setaria italica
  misc_feature (39)..(39): Xaa can be any naturally occurring amino acid
  Transcript Sequence Number=SeqID_18220
  Gene Ontology: Mol. function=nucleic acid binding
  Homolog annotation: Hit_ID=UPI00001632D2; Match level="QueryCoverage =80%, HitCoverage=82%, E-value=8e-54, Identity=53%"; Hit description =RNA recognition motif (RRM)-containing protein
  Pfam annotation: Domain name=RRM_1; Domain location=36-106; Score =56.2; E_value=1.2e-13; Accession=PF00076.14; Description=RNA recognition motif. (a.k.a. RRM, RBD, o
QGEEEVEGEGEGGGGGGTSALHYLSGPYGDTTFTKVFVXGGLAWETRSEGLRAHFEVYGDIMEAVVITDRATGRSKGYGFVTFRDPESARMACMDPYPVIDGRRANCNLAILGRPGPAVPFVAPVRPVIPYNGGVAVPGGMYVQSPTYQQPPYNYSQAFVYPSYGPSTYGPEYLYQQNAYGPYVGQQYVPVYGGPRTVGPAVYPYGQFGQPVPSDHAYSPGYAPSHGLPLSNQNVNAANVVRMPPVQQQFPPGGPRPQQQILVPARAPPFPQNNISEQASG

SEQ ID NO: 84195 - protein, 418 aa, Setaria italica
  misc_feature (68)..(68): Xaa can be any naturally occurring amino acid
  Transcript Sequence Number=SeqID_18221
  Gene Ontology: Mol. function=binding
  Pfam annotation: Domain name=Auxin_inducible; Domain location=269 -315; Score=-15.2; E_value=0.077; Accession=PF02519.6; Description =Auxin responsive protein
  Pfam annotation: Domain name=TPR_2; Domain location=204-237; Score =0.3; E_value=31; Accession=PF07719.9; Description=Tetratricopeptide repeat
  Pfam annotation: Domain name=TPR_2; Domain location=256-289; Score =12.4; E_value=0.96; Accession=PF07719.9; Description=Tetratricopeptid e repeat
  Pfam annotation: Domain name=TPR_2; Domain location=84-117; Score =8.1; E_value=3.3; Accession=PF07719.9; Description=Tetratricopeptide repeat
  Pfam module annotation: Pfam domain module=Auxin_inducible::TPR _2::TPR_2::TPR_2; Domain location=269-315::204-237::256-289::84-117
MGMSSIRSALARALVAPKLRGPHRFAATAAAGDTQPERVAAEMVRYALGGAVHRSSPEEAMRILEQGXASNLQGGGEGSAEAVGLLMLAMSTLLYQSGRRQDAMEKLKATQQVAPSAAFRVAAWEALMGLHMEAGQEISNSVSPNDSVDLSIKDDSQWSDQDHLKFRVNAIKGLIALLNGETESAAQLFTDGCKDFAGGKHQTESAAFSYGEYLHCVGDFPMATQVYESVLEAARMEDMSGNLLAAGNMVPEEVSLGATCSYGQLLSHSGKFGEAEDYLTRALQKAQEQFGSNHPKVGIVLTCVARMYKLLAMSEGSSSIMVQEGLYRKALEVLKAPAINSEETSKHMDWRDIISLARGEYAELLLIQSNRKAEGERMKEWAEDAWRNRRLTLAQALEFSSEPSKPTVVVDTRIGRVL

SEQ ID NO: 84196 - protein, 258 aa, Setaria italica
  misc_feature (55)..(55): Xaa can be any naturally occurring amino acid
  misc_feature (213)..(213): Xaa can be any naturally occurring amino acid
  Transcript Sequence Number=SeqID_18222
  Gene Ontology: Biological process=response to stress
  Homolog annotation: Hit_ID=Q6I5B2; Match level="QueryCoverage=67%, HitCoverage=70%, E-value=4e-45, Identity=61%"; Hit description=BURP domain-containing protein 6
  Pfam annotation: Domain name=BURP; Domain location=67-258; Score =194.3; E_value=3.4e-55; Accession=PF03181.7; Description=BURP domain
  Subcellular localization annotation: CTP_CleavageSite=51; ConfidenceScore=5.63e-01
CLVPFHFQLALQWLGPSQLSSSSWSPPWQLQLSTRTTRWARRSSSTRTCTRAPRXRSTSPSPPPAPPSHAPSPTPSRSPPPGSREILSRLPVPAGSPAAAAVRSTLAACEAAPVPGVEALRCVTSPDSMADLAASILGTRNIRAAATKLTSTEGATTRQEYTMVSVRPLPVAGGDMVACHRMAYPYAVFACHATTAAVYAVSLAGADGTTAKXEALAACHADAFPGISQSAYEKLGVEPGSVPVCHFLPQDSMLWMRN

SEQ ID NO: 84197 - protein, 268 aa, Setaria italica
  misc_feature (99)..(99): Xaa can be any naturally occurring amino acid
  misc_feature (207)..(207): Xaa can be any naturally occurring amino acid
  Transcript Sequence Number=SeqID_18223
  Gene Ontology: Mol. function=ammonia ligase activity; Cellular component=cytoplasm; Biological process=phenylpropanoid metabolic process
  Homolog annotation: Hit_ID=P14717; Match level="QueryCoverage=90%, HitCoverage=34%, E-value=1e-105, Identity=76%"; Hit description =Phenylalanine ammonia-lyase
EREVNSVNDNPVIDVHRGKALHGGNFQGTPITNHVQSAEQHNQDVNSLGLVSARKTAEAIDILKLMSSTYIVALCQAIDLRHLEENIKTSVKNTVTQVXRKKVVLTMNPAGELSSARFSEKDLLTAIDREGVFTYAEDAASASLPLMQKLRAVLVDHAFSSGDEPSVFSKITKFEEELRAVLPQEVEAARVAVAEGTAAVENRIKDXRSFPLYRFVREELGCVFLTGEKLKSPGEECNKVFIGISQGKLIDPMLECLKEWDGKPLPIN

SEQ ID NO: 84198 - protein, 303 aa, Setaria italica
  misc_feature (129)..(129): Xaa can be any naturally occurring amino acid
  Transcript Sequence Number=SeqID_18224
MGFGRKVGEGGVSRWLLLLAGVLLAVAVTVTAGDAVEEGATAGDYSLHGSQAMCELKCQHHHDPVNKKRCVDFCIRWQLALPFDAAEEGATAGDDSLHGSRAMCELKCQHHHDPVNKKRCVDFCIRWQXRYHFDAAEEGATAGEDSLHGSRAMCELKCQHHHDPVNKKRCVDFCIRWQLALPFDAVEEGATAGKDSLHGSRAMCELKCQHHHDPVNKKRCVDFCIRWQLALLFDVKEEDGASATDTITAGEVGVCANRRICKIKCQHPSRPGEQQPVHRLLHRVPSGTRCHYGEWSHRHRHCW

SEQ ID NO: 84199 - protein, 601 aa, Setaria italica
  Transcript Sequence Number=SeqID_18225
  Gene Ontology: Mol. function=nucleic acid binding; Cellular component= nucleus; Biological process=mRNA processing
  Homolog annotation: Hit_ID=B6UDT4; Match level="QueryCoverage=67%, HitCoverage=67%, E-value=0.0, Identity=85%"; Hit description =Splicing factor U2AF 65 kDa subunit
  Pfam annotation: Domain name=DUF1777; Domain location=70-234; Score= -64.8; E_value=0.0068; Accession=PF08648.4; Description=Protein of unknown function (DUF1777)
  Pfam annotation: Domain name=RRM_1; Domain location=260-335; Score =30.1; E_value=9.2e-06; Accession=PF00076.14; Description=RNA recognition motif. (a.k.a. RRM, RBD, o
  Pfam annotation: Domain name=RRM_1; Domain location=380-450; Score =82.3; E_value=1.7e-21; Accession=PF00076.14; Description=RNA recognition motif. (a.k.a. RRM, RBD, o
  Pfam module annotation: Pfam domain module=DUF1777::RRM_1::RRM_1; Domain location=70-234::260-335::380-450
MAEYDERYEGNGGPVSGADAAGAYAQAEYGAAPPAAGGSPPAGAKPTGFSDHADGRNSQPQHETQSHDSGSSKSRERDRDRDKGKDRERDRDRGRDRERDRDRDKDRERGDRDRDRDRHHRDRRERSEKREHRDRSHDRDRHRDDRDRHRSLDSERRRDRDRDGHRRHRSRSRSPSKSRDRDRRSRSRSRSRSKSKRVSGFDQGPLQQTMPIVTAGAVPGQLPVVTPIPGMFPNLLMGPMNPLIQPQAMTQQATRHARRVYVGGLPPTANEQTVAIFFNGVMAAIGGNTAGPGDAVLNVYINHDKKFAFVEMRSVEEASNAMALDGIMFEGAPVKVRRPTDYNPSLAAALGPSQPNPNLNLAAVGLTPGSAGGLEGPDRIFVGGLPYYFTEAQVRELLESFGPLRGFDLVKDRETGNSKGYAFCVYQDLTVTDIACAALNGIKMGDKTLTVRRANQGAAQPRPEQESILLQAQQQVQMQKLVYQVGGALPTKVVCLTQVVTADELRDDEEYEDIVEDMREEGRKYVPHNAIAECNLVKVVIPRPDPSGAPVAGVGKVFLEYADVDGSTKAKTGMHGRKFGGNQVVAVFYPEDKFAAEQYDG

SEQ ID NO: 84200 - protein, 541 aa, Setaria italica
  misc_feature (404)..(404): Xaa can be any naturally occurring amino acid
  misc_feature (489)..(489): Xaa can be any naturally occurring amino acid
  misc_feature (506)..(506): Xaa can be any naturally occurring amino acid
  Transcript Sequence Number=SeqID_18226
  Gene Ontology: Mol. function=protein serine/threonine kinase activity; Cellular component=plasma membrane; Biological process =protein amino acid phosphorylation
  Homolog annotation: Hit_ID=P53683; Match level="QueryCoverage=100%, HitCoverage=100%, E-value=0.0, Identity=80%"; Hit description =Calcium-dependent protein kinase isoform 2
  Pfam annotation: Domain name=Pkinase; Domain location=83-341; Score =357.3; E_value=2.8e-104; Accession=PF00069.17; Description=Protein kinase domain
  Pfam annotation: Domain name=Pkinase_Tyr; Domain location=83-339; Score=-51.2; E_value=2.6e-10; Accession=PF07714.9; Description =Protein tyrosine kinase
  Pfam annotation: Domain name=efhand; Domain location=389-418; Score =8.7; E_value=2.4; Accession=PF00036.24; Description=EF hand
  Pfam annotation: Domain name=efhand; Domain location=426-454; Score =27.5; E_value=5.4e-05; Accession=PF00036.24; Description=EF hand
  Pfam annotation: Domain name=efhand; Domain location=462-488; Score =24.5; E_value=0.00045; Accession=PF00036.24; Description=EF hand
  Pfam annotation: Domain name=efhand; Domain location=505-533; Score =37.5; E_value=5.4e-08; Accession=PF00036.24; Description=EF hand
  Pfam module annotation: Pfam domain module=Pkinase::Pkinase _Tyr::efhand::efhand::efhand::efhand; Domain location=83-341::83 -339::389-418::426-454::462-488::505-533
MGQCCSRATAPDSGRGVTNGYGYSNQAKPAHTPPSYNAPPPPTEVRYTPPAMNPPVVPPVVVPPKPTGDTILGKQYEDVRTVYSLGKELGRGQFGVTYLCTEIATGRQYACKSISKRKLTSKADREDIRREIQIMQHLSGQPNIVEFRGAYEDKSNVHVVMELCAGGELFDRIIAKGHYTERAAATICRAVVNVVNICHFMGVMHRDLKPENFLLATKEENAMLKATDFGLSVFIEEGKMYRDIVGSAYYVAPEVLRRSYGKEIDVWSAGVMLYILLSGVPPFWAETEKGIFDAILHEEIDFESQPWPSISESAKDLVRKMLTRDPKKRLTSGQVLQHPWLREGGDASDKPIDSAVLSRMKQFRAIVIKLKKMALKVIASNLNEEEIKGLKQMFMNMDTDNSGXTITYEELKAGLAKLGSKLSEAEVKQLMEAADVDGNGSIDYVEFITATMHRHKLERDEHLFKAFQYFDKDNSGFITRDELRSTRLXEYEDNRRIGTNNEVTNXKEIISEVDTDNDGRINYEEFCAMMRGGMQQPMRLK

SEQ ID NO: 84201 - protein, 168 aa, Setaria italica
  Transcript Sequence Number=SeqID_18227
  Homolog annotation: Hit_ID=Q6I5W0; Match level="QueryCoverage=52%, HitCoverage=30%, E-value=3e-19, Identity=57%"; Hit description=BURP domain-containing protein 2
  Pfam annotation: Domain name=BURP; Domain location=19-165; Score= -22.0; E_value=1.9e-08; Accession=PF03181.7; Description=BURP domain
MRWQATMSPPATGRGPDGHHRVLLPRRRAFRAGELGRRRADVPGAEDGGGEVGHGVWGGDAAQGLHAGDGRGLAASILGTRNIRAAATKLTSTEGATTRQEYTMVSVRPLPVAGGDMVACHRMPYPYAVFACHATTAAVYAVSLAGADGTTAKGEALAPRHFEAKLYF

SEQ ID NO: 84202 - protein, 359 aa, Setaria italica
  misc_feature (64)..(64): Xaa can be any naturally occurring amino acid
  misc_feature (144)..(144): Xaa can be any naturally occurring amino acid
  misc_feature (342)..(342): Xaa can be any naturally occurring amino acid
  Transcript Sequence Number=SeqID_18228
  Gene Ontology: Mol. function=glutamate-ammonia ligase activity; Cellular component=cytoplasm; Biological process=nitrogen compound metabolic process
  Homolog annotation: Hit_ID=P14656; Match level="QueryCoverage=100%, HitCoverage=100%, E-value=0.0, Identity=96%"; Hit description =Glutamine synthetase cytosolic isozyme 1-1
  Pfam annotation: Domain name=Gln-synt_C; Domain location=104-358; Score=282.1; E_value=1.2e-81; Accession=PF00120.16; Description =Glutamine synthetase, catalytic domain
  Pfam annotation: Domain name=Gln-synt_N; Domain location=17-98; Score= 141.4; E_value=2.8e-39; Accession=PF03951.11; Description=Glutamine synthetase, beta-Grasp domain
  Pfam module annotation: Pfam domain module=Gln-synt_C::Gln-synt_N; Domain location=104-358::17-98
MACLTDLVNLNLSDTTEKIIAEYIWIGGSGMDLRSKARTLSGPVTDPSKLPKWNYDGSSTGQAXPGEDSEVILYPQAIFKDPFRKGNNILVMCDCYTPAGEPIPTNKRHNAAKIFSNPEVSAEEPWYGIEQEYTLLQKDTNWPXLGWPVGGFPGPQGPYYCGIGADKSFGRDIVDSHYKACLYAGINISGINGEVMPGQWEFQVGPSVGISAGDQVWVARYILERITEIAGVVVTFDPKPIPGDWNGAGAHTNYSTKSMRNDGGYEVIKAAIEKLKLRHKEHIAAYGEGNERRLTGKHETADINTFSWGVANRGASVRVGRETEQNGKGYFEDRRPASNMDXPYVVTSMIAETTIIWKP

SEQ ID NO: 84203 - protein, 708 aa, Setaria italica
  misc_feature (66)..(66): Xaa can be any naturally occurring amino acid
  misc_feature (78)..(78): Xaa can be any naturally occurring amino acid
  misc_feature (188)..(188): Xaa can be any naturally occurring amino acid
  misc_feature (197)..(197): Xaa can be any naturally occurring amino acid
  misc_feature (334)..(334): Xaa can be any naturally occurring amino acid
  misc_feature (395)..(395): Xaa can be any naturally occurring amino acid
  misc_feature (622)..(622): Xaa can be any naturally occurring amino acid
  Transcript Sequence Number=SeqID_18229
  Gene Ontology: Mol. function=ammonia ligase activity; Cellular component=cytoplasm; Biological process=phenylpropanoid metabolic process
  Homolog annotation: Hit_ID=P14717; Match level="QueryCoverage=99%, HitCoverage=99%, E-value=0.0, Identity=84%"; Hit description =Phenylalanine ammonia-lyase
  Pfam annotation: Domain name=PAL; Domain location=41-546; Score =1065.5; E_value=0; Accession=PF00221.11; Description=Phenylalanine and histidine ammonia-lyase
MASNTAILESDPLNWGKAAAEMAGSHLDEVKRMVAQFREPLVKIEGSSLRVGQVAAVAAAKDASGXVAVELDEDARPXAVKASSEWILDCIAHGGDIYGVTTGFGGTSHRRTKDGPALQVELLRHLNAGIFGNGSDGHTLPSEVSRAAMLVRINTLLQGYSGIRFEILEAITKLINTGVSPCLPLRGXTITASGDLXVPLSYIAGLITGRPNAQAVTVDGRKVDAAEAFKVAGIEGGFFKLNPKEGLAIVNGTSVGSALGAMVCFDANVLAVLSEVLSAVFCEVMNGKPEYTDHLTHKLKHHPGSIEAAAIMEHILEGSSFMKHAKKVNELDPXLLKPKQDRYALRTSPQWLGPQIEVIRAATKSIEREVNSVNDNPVIDVHRGKALHGGNFQGXPPIGVSMDNARLAIANIGKLMFAQFSELVNEFYNNGLTSNLAGSRNPSLDYGFKGTEIAMASYCSELQYLGNPITNHVQSAEQHNQDVNSLGLVSARKTAEAIDILKLMSSTYMVALCQAIDLRHLEENIKTSVKNTVTQVAKKVLTMNPVGELSSARFSEKDIITAIDREGVFTYAEDAASASLPLMQKLRAVLVDHALSSGDAEREPSVFSKITKFEEELRAVLXPREVEAARVAVAEGTAPVANRIKDSRSFPVYRFVREELGCVFLTGEKLKSPGEECNKVFIGISQGKLIDPMLECLKEWDGKPLPIC

SEQ ID NO: 84204 - protein, 357 aa, Setaria italica
  misc_feature (29)..(29): Xaa can be any naturally occurring amino acid
  Transcript Sequence Number=SeqID_18230
  Gene Ontology: Mol. function=glutamate-ammonia ligase activity; Cellular component=cytoplasm; Biological process=nitrogen compound metabolic process
  Homolog annotation: Hit_ID=P38559; Match level="QueryCoverage=100%, HitCoverage=100%, E-value=0.0, Identity=89%"; Hit description =Glutamine synthetase root isozyme 1
  Pfam annotation: Domain name=Gln-synt_C; Domain location=103-355; Score=293.3; E_value=5.1e-85; Accession=PF00120.16; Description =Glutamine synthetase, catalytic domain
  Pfam annotation: Domain name=Gln-synt_N; Domain location=17-97; Score= 146.9; E_value=6.4e-41; Accession=PF03951.11; Description=Glutamine synthetase, beta-Grasp domain
  Pfam module annotation: Pfam domain module=Gln-synt_C::Gln-synt_N; Domain location=103-355::17-97
MASLTDLVNLNLSDCTDKIIAEYIWVGGXGIDLRSKARTVKGPITSASQLPKWNYDGSSTGQAPGEDSEVILYPQAIFKDPFRRGDNILVMCDCYTPQGEPIPTNKRYHAAKVFSHPDVAAEVPWYGIEQEYTLLQKDVNWPIGWPVGGYPGPQGPYYCAAGADKAFGRDVVDAHYKACLYAGINISGINGEVMPGQWEFQVGPSVGISAGDEIWVARYILERITEMAGVVLSLDPKPIKGDWNGAGAHTNYSTKSMREPGGYEVIKKAIEKLGKRHKEHIAAYGEGNERRLTGHHETADINTFKWGVANRGASIRVGRDTEKEGKGYFEDRRPASNMDPYVVTGMIAETTILGKGN

SEQ ID NO: 84205 - protein, 599 aa, Setaria italica
  misc_feature (78)..(78): Xaa can be any naturally occurring amino acid
  misc_feature (241)..(241): Xaa can be any naturally occurring amino acid
  misc_feature (289)..(289): Xaa can be any naturally occurring amino acid
  misc_feature (395)..(395): Xaa can be any naturally occurring amino acid
  misc_feature (455)..(455): Xaa can be any naturally occurring amino acid
  misc_feature (510)..(510): Xaa can be any naturally occurring amino acid
  Transcript Sequence Number=SeqID_18231
  Gene Ontology: Mol. function=ammonia ligase activity; Cellular component=cytoplasm; Biological process=phenylpropanoid metabolic process
  Homolog annotation: Hit_ID=A2IBN5; Match level="QueryCoverage=100%, HitCoverage=83%, E-value=0.0, Identity=90%"; Hit description =Phenylalanine ammonia-lyase
  Pfam annotation: Domain name=PAL; Domain location=41-547; Score =1058.5; E_value=0; Accession=PF00221.11; Description=Phenylalanine and histidine ammonia-lyase
MAGNGLIVENDPLNWGAAAAELAGSHLDEVKRMVAQARQPVVKIEGSTLRVGQVAAVAAAKDASGVAVELDEEARPRXVKASSEWILDCIAHGGDIYGVTTGFGGTSHRRTKDGPALQVELLRHLNAGIFGAGSDGHTLPSEVTRAAMLVRINTLLQGYSGIRFEILEAITKLLNSGVSPCLPLRGTITASGDLVPLSYIAGLITGRPNAQAVTVDGRKVDAAEAFKVAGIEGGFFRLNPXKEGLAIVNGTSVGSALAATVLYDANLLAVLSEVLSAVFCEVMNGKPEXYTDHLTHKLKHHPGSIEAAAIMEHILEGSAFMKHAKKVNELDPLLKPKQDRYALRTSPQWLGPQIEVIRAATKSIEREVNSVNDNPVIDVHRGKALHGGNFQGTPXSGVSMDNARLAIANIGKLMFAQFSELVNEFYNNGLTSNLAGSRNPSLDYGFKGTEIAMAXSYCSELQYLGNPITNHVQSAEQHNQDVNSLGLVSARKTAEAIDILKLMSSTYIRXVASCQAIDLRHLEENIKTSVKNTVTQVAKKVLTMNPAGELSSARFSEKDLLTAIDREGVFTYAEDAASASLPLMQKLRAVLVDHAFSSG

SEQ ID NO: 84206 - protein, 703 aa, Setaria italica
  misc_feature (75)..(75): Xaa can be any naturally occurring amino acid
  misc_feature (153)..(153): Xaa can be any naturally occurring amino acid
  misc_feature (192)..(192): Xaa can be any naturally occurring amino acid
  misc_feature (243)..(243): Xaa can be any naturally occurring amino acid
  misc_feature (573)..(573): Xaa can be any naturally occurring amino acid
  misc_feature (598)..(598): Xaa can be any naturally occurring amino acid
  misc_feature (628)..(628): Xaa can be any naturally occurring amino acid
  Transcript Sequence Number=SeqID_18232
  Gene Ontology: Mol. function=ammonia ligase activity; Cellular component=cytoplasm; Biological process=phenylpropanoid metabolic process
  Homolog annotation: Hit_ID=A2IBN5; Match level="QueryCoverage=100%, HitCoverage=99%, E-value=0.0, Identity=89%"; Hit description =Phenylalanine ammonia-lyase
  Pfam annotation: Domain name=PAL; Domain location=41-544; Score =1085.5; E_value=0; Accession=PF00221.11; Description=Phenylalanine and histidine ammonia-lyase
MAGNGLIVENDPLNWGAAAAELAGSHLDEVKRMVAQARQPVVKIEGSTLRVGQVAAVASARDASGVAVELDEEAXRPAVKASSEWILDCIAHGGDIYGVTTGFGGTSHRRTKDGPALQVELLRHLNAGIFGTGSDGHTLPSEVTRAAMLVRIXNTLLQGYSGIRFEILEAITKLLNSGVSPCLPLRGTITAXSGDLVPLSYIAGLITGRPNAQAVTADGRKVDAAEAFKIAGIEGGFFKLNPXKEGLAIVNGTSVGSALAATVLYDANVLAVLSEVLSAVFCEVMNGKPEYTDHLTHKLKHHPGSIEAAAIMEHILEGSEFMKHAKKVNELDPLLKPKQDRYALRTSPQWLGPQIEVIRAATKSIEREVNSVNDNPVIDVHRGKALHGGNFQGTPIGVSMDNARLAIANIGKLMFAQFSELVNEFYNNGLTSNLAGSRNPSLDYGFKGTEIAMASYCSELQYLGNPITNHVQSAEQHNQDVNSLGLVSARKTAEAIDILKLMSSTYMVALCQAIDLRHLEENIKTSVKNTVTQVAKKVLTMNPTGDLSSARFSEKDLITAIDREGVFTYARGXASASLPLMQKLRAVLVDHAFSSGDXALHVLQDHQVRGGAARGACPRRWRPPASPXAEGTAAVENRIKDSRSFPLYRFVREELGCVFLTGEKLKSPGEECNKVFIGISQGKLIDPMLECLKEWDGKPLPIN

SEQ ID NO: 84207 - protein, 109 aa, Setaria italica
  Transcript Sequence Number=SeqID_18233
GRHLRPARRICKLKCQHHHVTVNNNRCTDFCIGYQVALDAIMENGATVTAGEDTLRGSRLMCELKCQHHNNPVNKKRCVDFCIRYQLALHDINDGATAAAAGGAIRQVV

SEQ ID NO: 84208 - protein, 737 aa, Setaria italica
  misc_feature (91)..(91): Xaa can be any naturally occurring amino acid
  misc_feature (650)..(650): Xaa can be any naturally occurring amino acid
  Transcript Sequence Number=SeqID_18234
  Gene Ontology: Mol. function=phenylalanine ammonia-lyase activity; Cellular component=cytoplasm; Biological process=phenylpropanoid metabolic process
  Homolog annotation: Hit_ID=Q6K6Q1; Match level="QueryCoverage=97%, HitCoverage=99%, E-value=0.0, Identity=92%"; Hit description =Phenylalanine ammonia-lyase
  Pfam annotation: Domain name=PAL; Domain location=58-555; Score =1092.6; E_value=0; Accession=PF00221.11; Description=Phenylalanine and histidine ammonia-lyase
MECETGLVRSLHGDGLCMSAQAAAPRADPLNWGKAAEDLSGSHLDEVKRMVAEFREPLVKIQGASLSIAQVAAVAAGAGEARVELDESARXRVKASSDWVMNSMMNGTDSYGVTTGFGATSHRRTKEGGALQRELIRFLNAGAFGTGADGHVLPAEATRAAMLVRINTLLQGYSGIRFEILETIAKLLNANVTPCLPLRGTITASGDLVPLSYIAGLITGRQNSVAVAPDGRKVDAAEAFKIAGIEHGFFELQPKEGLAMVNGTAVGSGLASTVLFEANVLAIMAEVISAVFCEVMTGKPEFTDHLTHKLKHHPGQIEAAAIMEHILEGSSYMKLAKKLGELDPLMKPKQDRYALRTSPQWLGPQIEVIRFATKSIEREINSVNDNPLIDVSRGKALHGGNFQGTPIGVSMDNTRLALAAIGKLMFAQFSELVNDFYNNGLPSNLSGGRNPSLDYGFKGAEIAMASYCSELQFLGNPVTNHVQSAEQHNQDVNSLGLISSRKTAEAIEILKLMTSTFLIALCQAIDLRHLEENMKAAVKNCVTQVAKKTLSMNAMGGLHIARFCEKDLQTAIDREAVFAYADDPCSPNYPLMQKLRAVLIEHALANGDAERVVETSIFAKVAEFEQQVRAALPKEVEAARAAVESGRPMXSPNRIKECRSYPLYRFVREELGAEYLTGEKTRSPGEELNKVLVAINERKHIDPLLECLKEWNGEPLAALLNCPQEERTPPYTRKTKV

SEQ ID NO: 84209 - protein, 103 aa, Setaria italica
  Transcript Sequence Number=SeqID_18235
  Subcellular localization annotation: CTP_CleavageSite=63; ConfidenceScore=5.42e-01
LRYRFQQRRPLDSSPVPAGVQSMRRLELPPPRGRIRRPSHRPPRLWDPRRPPRLLSTSRPPLRSTTPGGWVEVGPGMRRSSGSRWDGSKRCKGSSLACGRKKR

SEQ ID NO: 84210 - protein, 41 aa, Setaria italica
  Transcript Sequence Number=SeqID_18236
  Homolog annotation: Hit_ID=B6TT30; Match level="QueryCoverage=100%, HitCoverage=20%, E-value=1e-09, Identity=75%"; Hit description=RNA -binding region RNP-1
MEASKEQASKDYADFKEKVRRTIYLDQLSPQVTTPVIKAAL

SEQ ID NO: 84211 - protein, 201 aa, Setaria italica
  Transcript Sequence Number=SeqID_18237
  Gene Ontology: Mol. function=nucleic acid binding
  Homolog annotation: Hit_ID=B6TT30; Match level="QueryCoverage=100%, HitCoverage=100%, E-value=1e-79, Identity=72%"; Hit description=RNA -binding region RNP-1
MEASKEQASKDYADFKEKVRRTIYLDQLSPQVTTPVIKAALAQCANVVNVEFIVNYTIPYDVPSAALVELDDDMQAKAAVELMTDFPFIIGGMPRPVKATHAKAEMFRDRPPCPGLKKEFRWVKQGDDECETMKKLKNLAKKQESENMALIKNLLDEEKELAKQQQEALDANCKKYEMLDLVMQNGAIKNLAHRYGVNLDD

SEQ ID NO: 84212 - protein, 204 aa, Setaria italica
  Transcript Sequence Number=SeqID_18238
  Gene Ontology: Mol. function=isomerase activity; Cellular component =integral to membrane; Biological process=protein folding
  Homolog annotation: Hit_ID=B6T929; Match level="QueryCoverage=83%, HitCoverage=26%, E-value=1e-89, Identity=92%"; Hit description =Peptidyl-prolyl isomerase PASTICCINO1
  Pfam annotation: Domain name=FKBP_C; Domain location=48-150; Score =73.0; E_value=1.1e-18; Accession=PF00254.20; Description=FKBP-type peptidyl-prolyl cis-trans isomer
AHDAGDGGDGGGELPPPAKKKSPAEEAAEKRREKLTPGSLMKGLIRSGSGDATPADGDQVIIHCTTRTMDGIVVNSTRREHGGKGIPLRFVLGKSKMILGFAEGFPTMLKGEIAMFKMQPKIHYAEDDCPVAAPDGFPKDDELQFEIEMLDFFKAKVVAEDLGVVKKIIDEGKGWETPREPYEITARITARTADGKELFPVKKK

SEQ ID NO: 84213 - protein, 236 aa, Setaria italica
  Transcript Sequence Number=SeqID_18239
  Gene Ontology: Mol. function=aspartic-type endopeptidase activity; Biological process=DNA integration
  Homolog annotation: Hit_ID=Q6F2U2; Match level="QueryCoverage=97%, HitCoverage=16%, E-value=8e-86, Identity=61%"; Hit description =Putative polyprotein
ISGSFNLMACLKEIPILKGNNYTEWRKKIEFSFVCGEVDWVLTTPQPQAPQKPVRADGDDDAAWQQKERDYAPLELAYTLENKQWTTANKKCMALVKNTIEPAILGSIAECDSVSEYLDKIRNQFTGSSKIYATQLFKQLATERYNGGGTGIRDHIMRMYNLAAQLKPMDLELKPGHIMHLVFASLPKEFDTFVVNYNMQPEQWDMEKMIAMCVQEEDRLRSSHGGSLSTYCCKVI

SEQ ID NO: 84214 - protein, 62 aa, Setaria italica
  misc_feature (10)..(10): Xaa can be any naturally occurring amino acid
  Transcript Sequence Number=SeqID_18240
  Gene Ontology: Mol. function=N-acetyltransferase activity
  Homolog annotation: Hit_ID=B6TUE4; Match level="QueryCoverage=98%, HitCoverage=38%, E-value=4e-15, Identity=68%"; Hit description =Acetyltransferase
ALLKAAVERXRGRRVQRVILHVDPARTAAVALYRKAGFQVDATVEGYYAPRRDAYRMFVDLQ

SEQ ID NO: 84215 - protein, 285 aa, Setaria italica
  misc_feature (187)..(187): Xaa can be any naturally occurring amino acid
  Transcript Sequence Number=SeqID_18241
  Gene Ontology: Mol. function=translation initiation factor activity
  Homolog annotation: Hit_ID=B6TRD2; Match level="QueryCoverage=100%, HitCoverage=55%, E-value=1e-110, Identity=72%"; Hit description =Eukaryotic translation initiation factor 4B
  Pfam annotation: Domain name=eIF-4B; Domain location=1-285; Score =193.2; E_value=7.2e-55; Accession=PF06273.3; Description=Plant specific eukaryotic initiation factor
SSDRWSRAAPTNGERDRPRLVLDPPKRDASATPTPPAEAGRSRPSPFGAARPREDVLADKGLDWKKMETEIDQKKTSRPTSSQSSRPESAHSSRPGSPGSQVSAAGSEGVLRARPKVNPFGDAKPREVILQEKGKDWRKIDLELEHRRIDRPETNDEKVLKEEINLLKLELNENEAKMSDDDAKSLXEKITQMEKQLELLTIAMDDKIRFSQRPGSGAGRVTASPPTNFADESLIKESMERPGSRGGMDQYPKPTEERWGFQGSRDRGSFGGNRSSDRSSAGQRW

SEQ ID NO: 84216 - protein, 68 aa, Setaria italica
  Transcript Sequence Number=SeqID_18242
MFLKEQHQQPNATDQTDAINSPTADDHHKPGVPRVSSCSTDKDSGLSLCRVCHCVEPDLGGESALGFL

SEQ ID NO: 84217 - protein, 258 aa, Setaria italica
  Transcript Sequence Number=SeqID_18243
  Gene Ontology: Mol. function=calcium ion binding; Cellular component =oxygen evolving complex; Biological process=photosynthesis
  Homolog annotation: Hit_ID=B9RFL8; Match level="QueryCoverage=89%, HitCoverage=87%, E-value=6e-86, Identity=70%"; Hit description =Thylakoid lumenal 21.5 kDa protein, chloroplast, putative
  Pfam annotation: Domain name=PsbP; Domain location=41-255; Score =251.6; E_value=1.8e-72; Accession=PF01789.8; Description=PsbP
  Subcellular localization annotation: CTP_CleavageSite=34; ConfidenceScore=5.81e-01
MAAAAAAAATAFSGGRRSPPRTRASAVSPRAEVSCRRRGGGVLPAVPRRNVLSTMLSTSTVLILGPKQITLAETTGGAFREYIDTFDGYTFLYPKSWIQVKGAGADIFFRDPFVLDENMSVEISSPSSSKYTSVEDLGPPEKAAEKVLKQYLTEFMSTRLGVRRESNVLSALSKVADDGKLYYEVEVNIKSYASNNELAVMPQDRVQSLEWDRRYLSVLGVENKRLYELRLQTPEQVFMQEEEDLRRVMDSFRVIKAA

SEQ ID NO: 84218 - protein, 71 aa, Setaria italica
  Transcript Sequence Number=SeqID_18244
  Gene Ontology: Mol. function=protein tyrosine phosphatase activity; Biological process=dephosphorylation
  Homolog annotation: Hit_ID=Q2QSR6; Match level="QueryCoverage=60%, HitCoverage=21%, E-value=4e-16, Identity=90%"; Hit description =Tyrosine specific protein phosphatase family protein, putative, expressed
FHLKQLLLSADLLNSNISKFSTFKCLHLQDPYVSIPVDAIVGALRVLLDVRNHPVLIHCKRGKHRTGCLVG

SEQ ID NO: 84219 - protein, 134 aa, Setaria italica
  misc_feature (28)..(28): Xaa can be any naturally occurring amino acid
  Transcript Sequence Number=SeqID_18245
  Gene Ontology: Mol. function=protein tyrosine phosphatase activity; Cellular component=cytoplasm; Biological process=dephosphorylation
  Homolog annotation: Hit_ID=Q2QSR6; Match level="QueryCoverage=91%, HitCoverage=64%, E-value=1e-56, Identity=82%"; Hit description =Tyrosine specific protein phosphatase family protein, putative, expressed
  Pfam annotation: Domain name=Y_phosphatase2; Domain location=3-122; Score=70.4; E_value=6.6e-18; Accession=PF03162.5; Description =Tyrosine phosphatase family
PGAQRRVPQGPRGIRLFQFGIEGTKDPXVSIPVDAIVGALRVLLDVRNHPVLIHCKRGKHRTGCLVGSFRKLQNWCLSSVFEEYHRYAAGKSRLSDLRFIESFDVTCMRDCMLRLIYRYHDCLQKSKRLQYDVR

SEQ ID NO: 84220 - protein, 452 aa, Setaria italica
  misc_feature (80)..(80): Xaa can be any naturally occurring amino acid
  Transcript Sequence Number=SeqID_18246
  Gene Ontology: Mol. function=protein binding; Biological process =signal transduction
  Homolog annotation: Hit_ID=B6SY18; Match level="QueryCoverage=95%, HitCoverage=56%, E-value=0.0, Identity=82%"; Hit description=Protein binding protein
  Pfam annotation: Domain name=Ank; Domain location=130-162; Score =17.3; E_value=0.062; Accession=PF00023.22; Description=Ankyrin repeat
  Pfam annotation: Domain name=Ank; Domain location=167-199; Score =13.8; E_value=0.37; Accession=PF00023.22; Description=Ankyrin repeat
  Pfam annotation: Domain name=Ank; Domain location=200-232; Score =21.5; E_value=0.0035; Accession=PF00023.22; Description=Ankyrin repeat
  Pfam annotation: Domain name=Ank; Domain location=270-303; Score =16.0; E_value=0.15; Accession=PF00023.22; Description=Ankyrin repeat
  Pfam annotation: Domain name=Ank; Domain location=3-27; Score=4.2; E _value=9.1; Accession=PF00023.22; Description=Ankyrin repeat
  Pfam annotation: Domain name=Ank; Domain location=304-336; Score =20.2; E_value=0.0086; Accession=PF00023.22; Description=Ankyrin repeat
  Pfam annotation: Domain name=Ank; Domain location=368-401; Score =25.3; E_value=0.00026; Accession=PF00023.22; Description=Ankyrin repeat
  Pfam annotation: Domain name=Ank; Domain location=402-434; Score =41.4; E_value=3.7e-09; Accession=PF00023.22; Description=Ankyrin repeat
  Pfam annotation: Domain name=Ank; Domain location=41-73; Score=6.2; E_ value=4.7; Accession=PF00023.22; Description=Ankyrin repeat
  Pfam module annotation: Pfam domain module=Ank::Ank::Ank::Ank::Ank::An k::Ank::Ank::Ank; Domain location=130-162::167-199::200-232::270 -303::3-27::304-336::368-401::402-434::41-73
VSAAARGFVDVVDTLIKCGADPNATARVLLRSLKPSLHANVDCTALFAAIVSRQVAVVRHLLQAGVKRDTKVRLGAWSWXDTSTSEELRVGAGLAEPYDAVWCAVEYYESTGSILRMLLQNGYTSSATHLGRTLLHHAILCGSGGAAQTLLASGADSEAPVKTSRSSRSRPVHLATRLGQPEILQTFVDKGCDVNVRAEAGDTAAILASRHKREDCLRVLLAAGADVALLNSSGESAASVASSGGWKSGFERAVLGAIRSGTIPRSSDRNVFSPLMFAARCGDAAAMEVLLAQPDVDVDEQDLDGCSPILTAAKVGNVEAFRALVFAGANVKLSNKRGETAIGLAQQSKRDLFEQVMLEFALEKGMPGGFYALHCASRRGDAAAVRHLVASTGCDVNVPDGDGYTPLMLAAREGHAGVCELLISYGARCDLETPRGETALSLARATAAAFNK

SEQ ID NO: 84221 - protein, 109 aa, Setaria italica
  Transcript Sequence Number=SeqID_18247
  Gene Ontology: Mol. function=calcium ion binding; Cellular component =membrane
  Homolog annotation: Hit_ID=Q3HRP5; Match level="QueryCoverage=73%, HitCoverage=35%, E-value=7e-38, Identity=93%"; Hit description =Calcineurin B-like protein 2
  Pfam annotation: Domain name=efhand; Domain location=22-50; Score =16.7; E_value=0.1; Accession=PF00036.24; Description=EF hand
  Pfam annotation: Domain name=efhand; Domain location=59-87; Score =18.1; E_value=0.037; Accession=PF00036.24; Description=EF hand
  Pfam module annotation: Pfam domain module=efhand::efhand; Domain location=22-50::59-87
DLKNSIVLCVKQVKDAVGEEALLLASLDLFDTKHNGILGFEEFARALSVFHPNAPLDEKIDFSFRLYDLKQQGYIERQEVKQMVVATLAESGMNLSDEIVESIIDKHLR

SEQ ID NO: 84222 - protein, 69 aa, Setaria italica
  Transcript Sequence Number=SeqID_18248
  Gene Ontology: Mol. function=calcium ion binding; Cellular component =membrane; Biological process=abscisic acid mediated signaling
  Homolog annotation: Hit_ID=Q3HRP5; Match level="QueryCoverage=82%, HitCoverage=25%, E-value=4e-26, Identity=96%"; Hit description =Calcineurin B-like protein 2
  Pfam annotation: Domain name=efhand; Domain location=10-38; Score =22.2; E_value=0.0021; Accession=PF00036.24; Description=EF hand
LPLLNFLFFSYYKTFEEADTKHDGRIDKEEWRNLVVRHPSLLKNMTLQYLKDITTTFPSFVFHSQVDDN

SEQ ID NO: 84223 - protein, 225 aa, Setaria italica
  Transcript Sequence Number=SeqID_18249
  Gene Ontology: Mol. function=calcium ion binding; Cellular component =membrane; Biological process=abscisic acid mediated signaling
  Homolog annotation: Hit_ID=Q3HRP5; Match level="QueryCoverage=100%, HitCoverage=100%, E-value=1e-124, Identity=96%"; Hit description =Calcineurin B-like protein 2
  Pfam annotation: Domain name=efhand; Domain location=122-150; Score =18.1; E_value=0.037; Accession=PF00036.24; Description=EF hand
  Pfam annotation: Domain name=efhand; Domain location=166-194; Score =27.5; E_value=5.6e-05; Accession=PF00036.24; Description=EF hand
  Pfam annotation: Domain name=efhand; Domain location=85-113; Score =24.8; E_value=0.00035; Accession=PF00036.24; Description=EF hand
  Pfam module annotation: Pfam domain module=efhand::efhand::efhand; Domain location=122-150::166-194::85-113
MVQCLDGVRQLLAVLLKCCDVELKQPRGLEDPQVLARETVFSVSEVEALYELFKKISSAVIDDGLINKEEFQLALFKTSKKESLFADRVFDLFDTKHNGILGFEEFARALSVFHPNAPLDEKIDFSFRLYDLKQQGYIERQEVKQMVVATLAESGMNLSDEIVESIIDKTFEEADTKHDGRIDKEEWRNLVVRHPSLLKNMTLQYLKDITTTFPSFVFHSQVDDN

SEQ ID NO: 84224 - protein, 107 aa, Setaria italica
  misc_feature (1)..(28): Xaa can be any naturally occurring amino acid
  Transcript Sequence Number=SeqID_18250
XXXXXXXXXXXXXXXXXXXXXXXXXXXXVKINPSCSIYFSESLRKIQHKCYVCSMYNHSDQLMTHTYTLTDAAGFFALFRRTDGQGDACLIPWHNTFSDRQIASITY

SEQ ID NO: 84225 - protein, 253 aa, Setaria italica
  Transcript Sequence Number=SeqID_18251
  Gene Ontology: Mol. function=selenium binding; Cellular component =plasma membrane; Biological process=cell redox homeostasis
  Homolog annotation: Hit_ID=B9T1J6; Match level="QueryCoverage=56%, HitCoverage=62%, E-value=1e-56, Identity=69%"; Hit description =Selenoprotein T, putative
  Pfam annotation: Domain name=SelT; Domain location=98-204; Score =186.5; E_value=7.5e-53; Accession=PF10262.1; Description =Selenoprotein T
MDRVQLVLLGLPILLFCSDVVTLFAPLPPAAPKPDHQSGSTPDAFQPGDPSAADASAQAEPQVDVPGSGTTVDLKFCASCSYRGTAMTMKRMLETSFPGIHVVLENYPPPFPKRALSKAVPLLQVGAMATLMAGDQIFPRFGMVPPPWYYSLRANRFGTMASIWLFGNFAQSFLQSSGAFEVYCNGQLVFSKLSQQRFPSEIELQELIGNRILDPQELIGDRTPDSQELIGDTIPDSQDEENLEKDLVLDDEL

SEQ ID NO: 84226 - protein, 65 aa, Setaria italica
  Transcript Sequence Number=SeqID_18252
  Gene Ontology: Cellular component=integral to membrane; Biological process=photosynthesis, light harvesting
  Homolog annotation: Hit_ID=B6SI32; Match level="QueryCoverage=100%, HitCoverage=33%, E-value=7e-18, Identity=70%"; Hit description=Early light-induced protein
AWFAATAAVLSVASLVPLLKGDSAEARSGGFMSADAELWNGRFAMLGLVALAFTEYLTGAPFINA

SEQ ID NO: 84227 - protein, 107 aa, Setaria italica
  misc_feature (2)..(2): Xaa can be any naturally occurring amino acid
  misc_feature (5)..(5): Xaa can be any naturally occurring amino acid
  misc_feature (26)..(26): Xaa can be any naturally occurring amino acid
  Transcript Sequence Number=SeqID_18253
  Gene Ontology: Cellular component=integral to membrane; Biological process=photosynthesis, light harvesting
  Homolog annotation: Hit_ID=B6SI32; Match level="QueryCoverage=100%, HitCoverage=55%, E-value=5e-34, Identity=71%"; Hit description=Early light-induced protein
FXGPXPERINGRLAMVGFVSALAVEXTDGGPTYSQAGSGSGLAWFAATAAVLSVASLVPLLKGDSAEARSGGVMSADAELWNGRFAMLGLVALAFTEYLTGAPFINA

SEQ ID NO: 84228 - protein, 97 aa, Setaria italica
  misc_feature (14)..(14): Xaa can be any naturally occurring amino acid
  misc_feature (29)..(29): Xaa can be any naturally occurring amino acid
  Transcript Sequence Number=SeqID_18254
  Gene Ontology: Mol. function=acid-amino acid ligase activity; Cellular component=cytoplasm; Biological process=peptidoglycan-based cell wall biogenesis
  Homolog annotation: Hit_ID=C4WRH2; Match level="QueryCoverage=100%, HitCoverage=10%, E-value=5e-21, Identity=57%"; Hit description =Putative UDP-N-acetylmuranoylanalyl-D-2-6-diaminoligase
PDEMPPSGVDSEIXFYDIAVLTNVKHTDXRNGMTYEEYMGSMASLFSRMVDPERHRKVVNIDDPTAPFFAAQGGLDVPVVTYSFENKKADVYTLKYQ

SEQ ID NO: 84229 - protein, 170 aa, Setaria italica
  Transcript Sequence Number=SeqID_18255
  Gene Ontology: Mol. function=oxidoreductase activity; Cellular component=extracellular region; Biological process=oxidation reduction
  Homolog annotation: Hit_ID=B6ST56; Match level="QueryCoverage=92%, HitCoverage=28%, E-value=1e-87, Identity=98%"; Hit description=L -ascorbate oxidase
  Pfam annotation: Domain name=Cu-oxidase_3; Domain location=22-138; Score=188.1; E_value=2.4e-53; Accession=PF07732.7; Description =Multicopper oxidase
LLAASLLLPARADDPYRFYTWNITFGDIYPLGVKQEGILINGQFPGPQIDAVTNDNIIVNVFNNLPVPFLLSWQGIQQRRSSWQDGVSGTNCPIPPGGNFTYNMQFKDQIGSYYYFPSLLFHKAAGGYGGIRVLSRPRIPVPFDPPAGDFTILAGDWFKLNHTDLKGILD

SEQ ID NO: 84230 - protein, 49 aa, Setaria italica
  Transcript Sequence Number=SeqID_18256
LMLVESWHHININIYWQRSGRASQVQTIFMQFLKWHTYHLFSHEKVWCF

SEQ ID NO: 84231 - protein, 74 aa, Setaria italica
  Transcript Sequence Number=SeqID_18257
  Subcellular localization annotation: CTP_CleavageSite=2; ConfidenceScore=5.05e-01
MTAFAAGSCRKFRTSVYVYALVIGVVIFLVIVMFMSSGIAKHLTSRERSGTSPSSQRSPNHVSGTTTPIPGRQV

SEQ ID NO: 84232 - protein, 235 aa, Setaria italica
  Transcript Sequence Number=SeqID_18258
  Gene Ontology: Mol. function=hydrolase activity
  Homolog annotation: Hit_ID=B9RAS9; Match level="QueryCoverage=94%, HitCoverage=68%, E-value=3e-72, Identity=57%"; Hit description =Hydrolase, putative
MLARPNAGVVRPPASSAKEPLFSFGVIADVQYADIPDGRSFLGVPRYYRHSICVLRRAVRSWNAHEGVRFCVNFGDIVDGFCPRERSLEAVRAVVREFDGFRGGPAYHMLGNHCLYNLPRSDLVPELRIPSPPGRSAAYYDFSPWPGYRFVVLDAYDLSALGRPRTHPLSAAARRFLDARNPNRDKNSPSGLEGTDRRFVMFNGGVGGAQLRWLDGVLRGAARRRERVVVCSHLP

SEQ ID NO: 84233 - protein, 118 aa, Setaria italica
  misc_feature (39)..(39): Xaa can be any naturally occurring amino acid
  Transcript Sequence Number=SeqID_18259
  Subcellular localization annotation: CTP_CleavageSite=26; ConfidenceScore=5.20e-01
APMVAVVQSARLLGAAGHGAGRFKVRSLHVGGVQMRCVXSGAGGSASWGAERQKLTAMQWMVAHGPGRAGKRATTPTARARAKVQRADVVWSLSSRVLAGMWLKTVRNPDVRIGASST

SEQ ID NO: 84234 - protein, 50 aa, Setaria italica
  Transcript Sequence Number=SeqID_18260
MVENTHGSGRRAFGDLTNILCKRPALSDPENSTGGIKIRRIEKDTMTKKV

SEQ ID NO: 84235 - protein, 48 aa, Setaria italica
  Transcript Sequence Number=SeqID_18261
YGTLLRKPHILLLITLICSIRESFYSFVCCLLIVVNFSGYHANAYLYF

SEQ ID NO: 84236 - protein, 93 aa, Setaria italica
  misc_feature (28)..(28): Xaa can be any naturally occurring amino acid
  Transcript Sequence Number=SeqID_18262
  Homolog annotation: Hit_ID=B6T7L8; Match level="QueryCoverage=100%, HitCoverage=21%, E-value=3e-39, Identity=77%"; Hit description=F-box protein interaction domain containing protein
MDCNSDDLDKQNETTEAQVYVPQDAQGXVLAFLPGRVVVKLRSVCKFWRDCIEEPNFVDRHLNNACRFHQSIACSPCLIHGLVHLYTFDPATM

SEQ ID NO: 84237 - protein, 270 aa, Setaria italica
  misc_feature (252)..(252): Xaa can be any naturally occurring amino acid
  Transcript Sequence Number=SeqID_18263
  Homolog annotation: Hit_ID=B6T7L8; Match level="QueryCoverage=99%, HitCoverage=62%, E-value=1e-121, Identity=76%"; Hit description=F -box protein interaction domain containing protein
MDCNSDDLDKQNQATEAQVYVPQDAQGIVLAFLPGRVVVKLRSVCKFWRDCIEEPNFVDRHLNNACRFHQSIACFTVLDHGLVHLYTFDPATMNFRSVELVFSNRFQMSGPCNGLVCAYDIKGNAEVLNPTTRKHLRLPDSVLKSRSLCSEYFVGFVHSTKQYKVVSVRHCVQFLAFEICTIGVLSWRTIRESAELLKATKAVIVNGSMYWLLLNEASSSFSRDILMLNLTDETFTKIAIPDAVRKHDLELXEGEGKLLSLSNHCDGSSG

SEQ ID NO: 84238 - protein, 206 aa, Setaria italica
  Transcript Sequence Number=SeqID_18264
  Homolog annotation: Hit_ID=Q8L7M8; Match level="QueryCoverage=79%, HitCoverage=10%, E-value=3e-52, Identity=61%"; Hit description =Putative WD-40 repeat protein
MSFRKHQLPHNAASISLAPLDFPSQELEKVNPLNSVMSADVASMDGVDIDMREVYFLIMHFLSHGPFKRTFGELCNELLEHQLLPRRYHGWYSRGGFHSGEENDDGISLPLDYAKLAERYPHIGKDHLVKLLKQLMVNSCHPHNLIGGVSPNAADVPTLLGSNSFSLLASERQDKETPRMPSYLRWPHIQADQVHGLGLREIGGFT

SEQ ID NO: 84239 - protein, 112 aa, Setaria italica
  Transcript Sequence Number=SeqID_18265
  Gene Ontology: Mol. function=protein binding; Cellular component =integral to membrane
  Homolog annotation: Hit_ID=Q1HTV4; Match level="QueryCoverage=83%, HitCoverage=39%, E-value=4e-25, Identity=54%"; Hit description=Green ripe-like 1
  Pfam annotation: Domain name=DUF778; Domain location=43-112; Score =24.7; E_value=6.3e-09; Accession=PF05608.4; Description=Protein of unknown function (DUF778)
MELEATPDNEVFSSNDEMQELWPLGEVDPKRARFPCCIVWTPLPVVSWLVPYIGHVGIAREDGTVLDFAGSNLVSVDDLAYGSAARCLQLDMKKVYIMLNCSLIPSQIVFLY

SEQ ID NO: 84240 - protein, 233 aa, Setaria italica
  Transcript Sequence Number=SeqID_18266
  Gene Ontology: Mol. function=protein binding; Cellular component =integral to membrane
  Homolog annotation: Hit_ID=Q1HTV4; Match level="QueryCoverage=99%, HitCoverage=95%, E-value=3e-74, Identity=53%"; Hit description=Green ripe-like 1
  Pfam annotation: Domain name=DUF778; Domain location=43-178; Score =276.1; E_value=7.7e-80; Accession=PF05608.4; Description=Protein of unknown function (DUF778)
MELEATPDNEVFSSNDEMQELWPLGEVDPKRARFPCCIVWTPLPVVSWLVPYIGHVGIAREDGTVLDFAGSNLVSVDDLAYGSAARCLQLDMKKCCFPANLAAHVCARSHEHSEAGTAVSWDDALRSEARRFEHKCYNLFTCNSHSFVADCLNRLAYGGSVGWNVLNLAALVWLRGRWLDRTAAVRSFLPFAAVSCVGVFMAGWSFLLGMAAFSLLLLGWFVLGVYCLKGLVG

SEQ ID NO: 84241 - protein, 182 aa, Setaria italica
  Transcript Sequence Number=SeqID_18267
  Gene Ontology: Mol. function=metal ion binding
  Subcellular localization annotation: CTP_CleavageSite=51; ConfidenceScore=5.03e-01
MDESSSRSAAPIGFLRRGSGISLRNQSNEDRPSQYNNRPGKSTNLNPVKARFTENKEKPRYLQGPFHSSGSKASSVSSSKAPVRKYHDERQKRPFLAEADIAESSNGRTEVRRLQCGKKAVANEHRHPYTQKGTSGGSSSSTFTEGGLPEEHDLGVLDFSVSSRSSARTIDSSLSFCLCSIP

SEQ ID NO: 84242 - protein, 110 aa, Setaria italica
  Transcript Sequence Number=SeqID_18268
  Gene Ontology: Mol. function=metal ion binding
  Homolog annotation: Hit_ID=B9RNL9; Match level="QueryCoverage=93%, HitCoverage=18%, E-value=8e-35, Identity=62%"; Hit description=Ring finger protein, putative
  Pfam annotation: Domain name=zf-C3HC4; Domain location=56-96; Score =21.4; E_value=0.00037; Accession=PF00097.17; Description=Zinc finger, C3HC4 type (RING finger)
IDNMSYEELLALEEHIGSVSTALTEEQFAKCINQSVYEARNSDRDGNNIEVDDVKCSICQEEYVEGEEIGRMQCEHQYHVCCIHEWLRQKNWCPICKASAIPSEVDKGDA

SEQ ID NO: 84243 - protein, 399 aa, Setaria italica
  Transcript Sequence Number=SeqID_18269
  Gene Ontology: Mol. function=metal ion binding
  Homolog annotation: Hit_ID=B9RNL9; Match level="QueryCoverage=31%, HitCoverage=23%, E-value=6e-34, Identity=54%"; Hit description=Ring finger protein, putative
LPEEHDLGVLDFSVSSRSSARTIDSGNTALSGMEHRQKDREELSSGRPQGASTFVNRRTVPQSFTTGAKLSSAPGTTSTALQRRGLKSLGCTSISDVLPSGCSSSDSVHNRRVEVTKKRTSDAGSSSRSRGINEQSNLGQPRASLPRPRAAEQSARTNSTSVQDSTDSVRTRRPSTLRARERMPGEREDGVFALRETVTRVRRPERGHFPTDDISPQRLARPFYGELPHAVYSSNRQGSSSRTARRRSPSHPEERPQQMFHGLFGERDGYRHINMEGIAEVLLALDRIEHDDDLTYEQLLVLETNLLLSGLGLHDQHQDMRLDIDNMSYEELLALEEHIGSVSTALTEEQFAKCINQSVYEARNSDRDGNNIEVDDVKCSICQEEYVEGEEVFNHGSKF

SEQ ID NO: 84244 - protein, 84 aa, Setaria italica
  misc_feature (69)..(69): Xaa can be any naturally occurring amino acid
  Transcript Sequence Number=SeqID_18270
  Gene Ontology: Mol. function=diphosphate-fructose-6-phosphate 1 -phosphotransferase activity; Cellular component=6-phosphofructokinase complex; Biological process=glycolysis
  Homolog annotation: Hit_ID=A9YVC8; Match level="QueryCoverage=100%, HitCoverage=13%, E-value=5e-27, Identity=64%"; Hit description =Pyrophosphate-dependent phosphofructokinase alpha subunit
MDSDYGVPRELSEVQKKRALYQPEVPPCLQGTTVRVEYGDAAIAADPAGAHVISQAFPHTYGQPLAHFXRKTAVVPDAKVISEH

SEQ ID NO: 84245 - protein, 95 aa, Setaria italica
  Transcript Sequence Number=SeqID_18271
  Subcellular localization annotation: CTP_CleavageSite=12; ConfidenceScore=5.11e-01
SARTRQEPTKGCASHGSRPTGKGGNKNRGLRFQEPGGTRGLQRIAEIESSRPSPVSSRLRGLGGGISLGFSGGISTGNDECGNLKSVELGWDTGG

SEQ ID NO: 84246 - protein, 61 aa, Setaria italica
  Transcript Sequence Number=SeqID_18272
CRRIKKLQSDLVQQQNQISHFQRENEELQSTNSSLHKQLEEIRTNLQDEIIVLQGVKEEAI

SEQ ID NO: 84247 - protein, 205 aa, Setaria italica
  misc_feature (20)..(20): Xaa can be any naturally occurring amino acid
  misc_feature (183)..(183): Xaa can be any naturally occurring amino acid
  Transcript Sequence Number=SeqID_18273
YLNEIEKAQSSIKDLEKETXSTRNVMNSNMAELQEEKDSAMSEVEQLEASLMNLKTELAQQLERISDMQKTTEELELANSNMHNEIVEVKGQKNEAAASVINLESNLEQQVEQISVLQLTNEDLQNSNSNLKMQLEEAKVSHHAEILALQDERNKIISDLQQSEASIKNLRIELEQGKEQISXMNLANEDLKNNIAILDKQLEEV

SEQ ID NO: 84248 - protein, 229 aa, Setaria italica
  Transcript Sequence Number=SeqID_18274
SKVKFNSANKENTKLQKDVQDLEVQLQLAKQKLKVTEAESKCKEDSYAMAVETSQAEIHHLEQLVKQFSGRVNLLEETLMQVKGHAESGVSELADKLDELEPLFCQSFALFVDRSSACGEELNVLRKKLHDHLDEQKELVKENDEMAVRLREKEKLVSEMVKNTADAEAKLVQLEKTVAEKEEELAARVQEKREAIKQLSDAIVYHKNYSDDLVRYIRSHNRPRLPFCL

SEQ ID NO: 84249 - protein, 1216 aa, Setaria italica
  misc_feature (1176)..(1176): Xaa can be any naturally occurring amino acid
  misc_feature (1192)..(1192): Xaa can be any naturally occurring amino acid
  Transcript Sequence Number=SeqID_18275
  Gene Ontology: Mol. function=microtubule motor activity; Cellular component=microtubule associated complex; Biological process =microtubule-based movement
  Homolog annotation: Hit_ID=A4H7R5; Match level="QueryCoverage=75%, HitCoverage=43%, E-value=3e-09, Identity=26%"; Hit description =Kinesin K39, putative
  Pfam annotation: Domain name=Cast; Domain location=10-840; Score= -280.9; E_value=0.023; Accession=PF10174.1; Description=RIM-binding protein of the cytomatrix
  Pfam annotation: Domain name=Filament; Domain location=345-632; Score= -191.0; E_value=0.06; Accession=PF00038.13; Description=Intermediate filament protein
  Pfam annotation: Domain name=M; Domain location=131-151; Score=6.1; E_ value=22; Accession=PF02370.8; Description=M protein repeat
  Pfam annotation: Domain name=M; Domain location=321-342; Score=4.0; E_ value=44; Accession=PF02370.8; Description=M protein repeat
  Pfam annotation: Domain name=M; Domain location=398-418; Score=5.3; E_ value=29; Accession=PF02370.8; Description=M protein repeat
  Pfam annotation: Domain name=M; Domain location=54-75; Score=4.0; E _value=44; Accession=PF02370.8; Description=M protein repeat
  Pfam annotation: Domain name=M; Domain location=694-714; Score=3.8; E_ value=45; Accession=PF02370.8; Description=M protein repeat
  Pfam annotation: Domain name=M; Domain location=821-841; Score=4.1; E_ value=42; Accession=PF02370.8; Description=M protein repeat
  Pfam annotation: Domain name=M; Domain location=888-908; Score=5.7; E_ value=26; Accession=PF02370.8; Description=M protein repeat
  Pfam annotation: Domain name=Myosin_tail_1; Domain location=16-765; Score=-475.2; E_value=0.02; Accession=PF01576.11; Description=Myosin tail
  Pfam annotation: Domain name=Pox_A_type_inc; Domain location=187-209; Score=11.2; E_value=2.2; Accession=PF04508.4; Description=Viral A -type inclusion protein repeat
  Pfam annotation: Domain name=Pox_A_type_inc; Domain location=321-343; Score=0.7; E_value=76; Accession=PF04508.4; Description=Viral A-type inclusion protein repeat
  Pfam annotation: Domain name=Pox_A_type_inc; Domain location=454-476; Score=10.4; E_value=2.8; Accession=PF04508.4; Description=Viral A -type inclusion protein repeat
  Pfam annotation: Domain name=Pox_A_type_inc; Domain location=54-76; Score=0.7; E_value=76; Accession=PF04508.4; Description=Viral A-type inclusion protein repeat
  Pfam annotation: Domain name=Pox_A_type_inc; Domain location=591-610; Score=2.5; E_value=40; Accession=PF04508.4; Description=Viral A-type inclusion protein repeat
  Pfam annotation: Domain name=Pox_A_type_inc; Domain location=627-649; Score=1.6; E_value=56; Accession=PF04508.4; Description=Viral A-type inclusion protein repeat
  Pfam annotation: Domain name=Pox_A_type_inc; Domain location=701-723; Score=1.8; E_value=51; Accession=PF04508.4; Description=Viral A-type inclusion protein repeat
  Pfam annotation: Domain name=Pox_A_type_inc; Domain location=842-864; Score=2.4; E_value=42; Accession=PF04508.4; Description=Viral A-type inclusion protein repeat
  Pfam annotation: Domain name=PspA_IM30; Domain location=280-532; Score=-62.1; E_value=0.076; Accession=PF04012.4; Description =PspAIM30 family
  Pfam module annotation: Pfam domain module=Cast::Filament::M::M::M::M: :M::M::M::Myosin_tail_1::Pox_A_type_inc::Pox_A_type_inc::Pox_A_type _inc::Pox_A_type_inc::Pox_A_type_inc::Pox_A_type_inc::Pox_A_type _inc::...
  Pfam module annotation: Pfam domain module=Pox_A_type_inc::PspA_IM30; Domain location=10-840::345-632::131-151::321-342::398-418::54 -75::694-714::821-841::888-908::16-765::187-209::321-343::454-476::54- 76::591-610::...
  Pfam module annotation: Domain location=627-649::701-723::842 -864::280-532
MQLEEAKFSHQAEILALQDEKNKIISDLQQSEASIKNLVSNISELQKDNNCATSEIEQLEASLMNLKTELAQQLERISDMQKTNEGLELANSNLHHEIVELQGQKNEFAASVINLESKLEQQVQEISNLQEANKDLKAAKTDLYNEVTVLQEEKNTALTQLQQSEANIKKLQSDLVQQQNQISLFQRENEELQSTNSSLHKQLEEIRTNLQDEIIVLQGEKEEAINSLHQSNDSVKTLGAQLEQPVEQISVLQLANEDLQNSNSQLKMQLEEAKFSHQAEILALQDEKNKIISDLQQSEASIKILVSNIAELQKDNDSAMSEIEQLEASLMNLKTELAQQLERISDMQKTNEGLELANSNLHNEIVELQGQKNEAADSVINLESKLEQQVQEISNLQEAIKDLKAAKTDLYNEVTALQEEKNAALAQLQQSEANIKELQSDMVQQQNQILFFQRENEELQSTNSRLHKQLEEIRTNLQDEIIVLQGEKEEAINSLHQSNDSVKTLRVQLEQQVEQISVLQLANEDLQNINSRLKMQLEEAKCSHQAEILALQDEKNKIISDLKQSEASIKNLRIELKQGKEQISEMNLSNEDLTNNIAILNKQLEEVRSSLHAEIAQLQAEKGIVLSELQVSQASVRNLESVLEKQSEKISTLDQANDQLQKNICTLTEQSEQTKAELQKEVEATQEEKDTALTQLKQSQTSVQNLENEVTRLKEDLSVQLESNSTLDKQLEEVRSSTHAEIAELRAEKDATLLELQTSQASVRNLEIALQTQNENISTLQQANDESQKIICTLTEQSEQAKAELQQEVKATQEEKDAVLTKLKQSEDSVQNLANEVTQLKDELSVQLENNSTLEKQLEEAILKVSNLHENLEKAQAEAACQIDDMSTKTKDLEKTIDLLSYQKTKLEEDLKIMIEACTVNMSFMTEFEDRVTQKISDHEAGLVVLRQSLKGVASSCQRLQYAYDEVSSRVSQLEILKRLQIEQIGQLEEKHTETLEKHRLLEEENLSANKVNTKLQKHVQDLEVQLQLAKQKLKVTEAESKCKEDSYAMAVETSQAEIHRLEQLVKQFSGRVSLLEETLMQVKGHAVSGVKVLRKKLHDQLDEQKELVKENDEMSVRLREKEKLVSEMVKNSVEAEAKIVQLEKMVAEKEEELAARVHKKKPRLSTLFFRFRKKXQEKREAIKQLSDAIAXHKNYSDDLVRYIRSHNRPRLPFCL

SEQ ID NO: 84250 - protein, 69 aa, Setaria italica
  Transcript Sequence Number=SeqID_18276
LDGTRTVGRSSVIGDGRLDTPMEDLRCAGPGHLSTLLSEIRHLLAKRFTVPGPSACRGYPSWENRMVPY

SEQ ID NO: 84251 - protein, 132 aa, Setaria italica
  Transcript Sequence Number=SeqID_18277
  Gene Ontology: Mol. function=nucleotide binding; Biological process =defense response
  Homolog annotation: Hit_ID=A7U1X3; Match level="QueryCoverage=100%, HitCoverage=10%, E-value=3e-44, Identity=63%"; Hit description=Lr1 -like protein
MERPAIGSTIRQEEFYGRSTIFKQTVDRMTSGTCSDETLSVLPIVGPGGIGKTTFTQHLYNNEKIEKHFAVRVWVCVSTNFDVLKLTKEIRSCIPAGENEVETDNLDQLQKSIAKRLKSKRFLIVLDDIWQC

SEQ ID NO: 84252 - protein, 102 aa, Setaria italica
  misc_feature (29)..(29): Xaa can be any naturally occurring amino acid
  Transcript Sequence Number=SeqID_18278
  Homolog annotation: Hit_ID=A8I1I2; Match level="QueryCoverage=84%, HitCoverage=37%, E-value=4e-12, Identity=43%"; Hit description=SOUL3- like protein
LVLRSTSLDLLVPFFDSPSLELENIENLXQGLRVETRFVKATWKLRTYLRLPWRPLIAIRGNTTYDLNEDYKVVRHSESWDVSALEAIGQIFVSAPEQRKDS

SEQ ID NO: 84253 - protein, 225 aa, Setaria italica
  Transcript Sequence Number=SeqID_18279
  Gene Ontology: Mol. function=oxidoreductase activity; Cellular component=peroxisome; Biological process=tetrahydrofolate metabolic process
  Homolog annotation: Hit_ID=B6TF50; Match level="QueryCoverage=100%, HitCoverage=54%, E-value=3e-95, Identity=76%"; Hit description =Sarcosine oxidase
VTAVSEHGGGVLNATKAVAMFQALAVKKGAAVRDNAEVVGIEKGAEGGVVVRTIGGEVFRGAKCVVTVGAWASKLLRSVAGVELPIQPLHTLILYWRVKPGRERELTAKAGFPTFSSSGDPPVYGTPSLELPGLIKISCDGGPPCDPDNRNWDAGDKEVTKRVARWIEEAMPGHVDAAGGPVIRQSCICSMTPDADFVIDFLGGDFGEDVVVGAGFSGHGFKMGP

SEQ ID NO: 84254 - protein, 250 aa, Setaria italica
  Transcript Sequence Number=SeqID_18280
  Gene Ontology: Mol. function=molecular_function; Cellular component =cellular_component; Biological process=ubiquitin-dependent protein catabolic process
  Homolog annotation: Hit_ID=B4FPX6; Match level="QueryCoverage=98%, HitCoverage=100%, E-value=1e-136, Identity=93%"; Hit description =DCN1-like protein 2
  Pfam annotation: Domain name=DUF298; Domain location=126-241; Score =215.0; E_value=2e-61; Accession=PF03556.7; Description=Domain of unknown function (DUF298)
MHKLGRGSRDKVQQFMVITGASEKVALQALKTSDWHLEGAFDVFYSQPQVAVANTRHLEELYNRYKDPDADMIMVEGISQLCNDLQVDPQDIVMLVISWHMKASTMCEFTRQEFVGGLQSIGVDSIEKLRDKLPSLRAELKDDQKFREIYNFAFAWAREKGQKSLALETAIGMWRLLFADRNWPLIDHWCQFLQVRHNKAISRDTWAQLLEFVKTVDPQLTNYDEEGAWPYLIDEFVDYLKENGVVQHRQ

SEQ ID NO: 84255 - protein, 516 aa, Setaria italica
  Transcript Sequence Number=SeqID_18281
  Gene Ontology: Mol. function=tubulin-tyrosine ligase activity; Cellular component=nucleus; Biological process=protein modification process
  Homolog annotation: Hit_ID=B6U4S2; Match level="QueryCoverage=100%, HitCoverage=59%, E-value=0.0, Identity=92%"; Hit description=Tubulin- -tyrosine ligase-like protein 12
  Pfam annotation: Domain name=TTL; Domain location=223-513; Score =150.8; E_value=4e-42; Accession=PF03133.7; Description=Tubulin -tyrosine ligase family
TLLNGVNSSSIIESGKHIVDSALEPRLPEWSPEESLAERVIGAMWLYLMTYRLADEEKIDETPVWYVMDELGSAMRHSDNANFRIAPFLFMPEGKLATAISYTVLWPTHDVHTGEECTRDFLFGIGEEKQRSARLTAWFHTPENYFIQEFRKYQEQLQTNSICSSTKTKEAPSTKSVRPSDGRALRVYTDIPHVEEFLTRPEFVLTTDPKEADIIWVSMQVDSEVKNALGLTDKQYTNQFPFEACLVMKHHLAETIHKAWGSPEWLQPTYNLETHLSPLIGDYCTRKRDGVDNLWIMKPWNMARTIDTTVTGDLSAIIRLMETGPKICQKYIECPALFQGRKFDLRYIVLVRSIRPLEIFLSDVFWVRLANNQYTLEKTSFFEYETHFTVMNYIGRMNHMNTPEFIKEFEKEHQVKWLEIHESIRSTIRCVFESATAVHPEMQNPFSRAIYGVDVMLDNRFKPKILEVTYCPDCGRACKYDTQALVGNQNTIKGSDFFNRVFGCLFLDEQTNVSPL

SEQ ID NO: 84256 - protein, 64 aa, Setaria italica
  Transcript Sequence Number=SeqID_18282
  Subcellular localization annotation: CTP_CleavageSite=26; ConfidenceScore=5.32e-01
LYCHSASWSSSCVHACVVGLVGWLVSSSSVQLALHRTSSSDSFVFTASSYLLALHLGESLGICW

SEQ ID NO: 84257 - protein, 101 aa, Setaria italica
  misc_feature (9)..(9): Xaa can be any naturally occurring amino acid
  Transcript Sequence Number=SeqID_18283
  Gene Ontology: Mol. function=oxidoreductase activity, acting on the CH-CH group of donors; Cellular component=mitochondrial inner membrane; Biological process=electron transport chain
  Homolog annotation: Hit_ID=B6U124; Match level="QueryCoverage=97%, HitCoverage=15%, E-value=2e-39, Identity=79%"; Hit description =Succinate dehydrogenase flavoprotein subunit,mitochondrial
  Pfam annotation: Domain name=Succ_DH_flav_C; Domain location=1-94; Score=138.9; E_value=1.6e-38; Accession=PF02910.12; Description =Fumarate reductasesuccinate dehydroge
LDKAWESFXDVKLSDRSLIWNSDLIETIELENLLINACITMHSAEARKESRGAHAREDFTTRDDEKWMKHTLGYWENEKVRLAYRPVHMNTLDEEVESNVF

SEQ ID NO: 84258 - protein, 93 aa, Setaria italica
  misc_feature (12)..(12): Xaa can be any naturally occurring amino acid
  Transcript Sequence Number=SeqID_18284
  Gene Ontology: Mol. function=oxidoreductase activity, acting on the CH-CH group of donors; Cellular component=mitochondrial inner membrane; Biological process=electron transport chain
  Homolog annotation: Hit_ID=B6U124; Match level="QueryCoverage=97%, HitCoverage=14%, E-value=1e-44, Identity=95%"; Hit description =Succinate dehydrogenase flavoprotein subunit,mitochondrial
ANSLLDIVVFGXRACANRVADISKPGQKQKPLEKDAGEKTIAWLDKLRNANGSLPTSKIRLNMQRVMQNNAAVFRTQETLEEGCKLISKAWVK

SEQ ID NO: 84259 - protein, 168 aa, Setaria italica
  misc_feature (41)..(41): Xaa can be any naturally occurring amino acid
  Transcript Sequence Number=SeqID_18285
  Homolog annotation: Hit_ID=P32439; Match level="QueryCoverage=50%, HitCoverage=72%, E-value=1e-09, Identity=49%"; Hit description=MFS18 protein
  Pfam annotation: Domain name=GRP; Domain location=1-115; Score=-11.4; E_value=0.0012; Accession=PF07172.3; Description=Glycine rich protein family
MARSAKMMAAAALLVLAVAAATTAEARNIKTAEKKDDAVVXQPQTFPPFDRLGGGLPGAGGSSIPGFSMPGSGGLTPGFSLPGSGSIGSMPLFGGGGSPFSGFGGIPGSPRRRRLRPRRTPTNPEEARRRAWPAWWWSDAIVRRGRRRACMHAWSVWLVGWFPVHLCS

SEQ ID NO: 84260 - protein, 619 aa, Setaria italica
  Transcript Sequence Number=SeqID_18286
  Gene Ontology: Mol. function=oxidoreductase activity, acting on the CH-CH group of donors; Cellular component=mitochondrial inner membrane; Biological process=electron transport chain
  Homolog annotation: Hit_ID=B6U124; Match level="QueryCoverage=100%, HitCoverage=100%, E-value=0.0, Identity=89%"; Hit description =Succinate dehydrogenase flavoprotein subunit,mitochondrial
  Pfam annotation: Domain name=DAO; Domain location=36-372; Score= -22.7; E_value=0.00034; Accession=PF01266.16; Description=FAD dependent oxidoreductase
  Pfam annotation: Domain name=FAD_binding_2; Domain location=36-432; Score=595.4; E_value=5.9e-176; Accession=PF00890.16; Description=FAD binding domain
  Pfam annotation: Domain name=Pyr_redox_2; Domain location=36-421; Score=-53.2; E_value=0.0088; Accession=PF07992.6; Description =Pyridine nucleotide-disulphide oxidore
  Pfam annotation: Domain name=Succ_DH_flav_C; Domain location=487-619; Score=288.8; E_value=1.2e-83; Accession=PF02910.12; Description =Fumarate reductasesuccinate dehydroge
  Pfam module annotation: Pfam domain module=DAO::FAD_binding_2::Pyr _redox_2::Succ_DH_flav_C; Domain location=36-372::36-432::36-421::487- 619
MWRSCVSRGLSRAKASASRLLSTASSSYTVVDHTYDAVVVGAGGAGLRAAIGLSEHGFNTACITKLFPTRSHTVAAQGGINAALGNMTEDDWRWHMYDTVKGSDWLGDQDSIQYMCREAPKAVIELENYGLPFSRTEEGKIYQRAFGGQSLDFGKGGQAYRCACAADRTGHAMLHTLYGQAMKHNTQFFVEYFALDLIMDNEGNCQGVIALNMEDGTLHRFRASNTILATGGYGRAYFSATSAHTCTGDGNAMVARAGLPLQDLEFVQFHPTGIYGAGCLITEGSRGEGGILRNSEGERFMERYAPTAKDLASRDVVSRSMTMEIREGRGVGPLKDHIYLHLNHLPPEVLKERLPGISETAAIFAGVDVTKEPIPVLPTVHYNMGGIPTNYHGEVVDIKGDNPDSVISGLLAAGEAACASVHGANRLGANSLLDIVVFGRACANRVADISKPGQKQKPLEKDAGEKTIAWLDKLRNANGSLPTSKIRLNMQRVMQNNAAVFRTQETLEEGCKLISKAWESFHDVKLSDRSLIWNSDLIETIELENLLINACITMHSAEARKESRGAHAREDFTTRDDEKWMKHTLGYWENEKVRLAYRPVHMNTLDEEVESFPPKARVY

SEQ ID NO: 84261 - protein, 229 aa, Setaria italica
  Transcript Sequence Number=SeqID_18287
  Gene Ontology: Mol. function=RNA-directed DNA polymerase activity; Biological process=RNA-dependent DNA replication
  Homolog annotation: Hit_ID=Q7XUD8; Match level="QueryCoverage=98%, HitCoverage=17%, E-value=8e-62, Identity=47%"; Hit description =OSJNBa0088A01.7 protein
  Pfam annotation: Domain name=Exo_endo_phos; Domain location=3-155; Score=-17.4; E_value=0.06; Accession=PF03372.15; Description =EndonucleaseExonucleasephosphatase family
  Subcellular localization annotation: CTP_CleavageSite=37; ConfidenceScore=5.32e-01
VFDMQDIHTGRFFISATAVVKHSNTRFQLTTVYGPTRHSAKPAFLRQLRTMTPDDTTPWLIMGDFNLIYSARDKNNSNLNRSLMRRFRSALNYCGLKEIHLQNRRFTWSNARHQPTLTRIDRVFCNASWDVKFDDHVLHALSSSHSDHCPLLLAHHSGPRKPTPLRFENFWTRLPGFYETVDKEWSKPTTHTEPFHRLGYKLHNTARALRSWSRAHVSDARLKLHMAQE

SEQ ID NO: 84262 - protein, 246 aa, Setaria italica
  misc_feature (93)..(93): Xaa can be any naturally occurring amino acid
  Transcript Sequence Number=SeqID_18288
  Gene Ontology: Mol. function=binding; Cellular component=integral to membrane; Biological process=protein insertion into membrane
  Homolog annotation: Hit_ID=B9N167; Match level="QueryCoverage=97%, HitCoverage=85%, E-value=2e-43, Identity=42%"; Hit description=Inner membrane protein (Fragment)
  Pfam annotation: Domain name=TPR_1; Domain location=177-210; Score =14.7; E_value=0.1; Accession=PF00515.20; Description=Tetratricopeptid e repeat
  Pfam annotation: Domain name=TPR_1; Domain location=211-244; Score =15.8; E_value=0.074; Accession=PF00515.20; Description =Tetratricopeptide repeat
  Pfam annotation: Domain name=TPR_2; Domain location=177-210; Score =19.8; E_value=0.012; Accession=PF07719.9; Description=Tetratricopepti de repeat
  Pfam annotation: Domain name=TPR_2; Domain location=211-244; Score =15.0; E_value=0.31; Accession=PF07719.9; Description=Tetratricopeptid e repeat
  Pfam module annotation: Pfam domain module=TPR_1::TPR_1::TPR_2::TPR _2; Domain location=177-210::211-244::177-210::211-244
LNNHPGFDNGGILWFHDLTEFPHGTLGPIFPILVAGLHYLNVQISFQGSQIKHHPGIFGLLAKYYRIYLDILTIPLFLIAYVVPQGSLVYWTXNGLFSVAQQLSLRNGAVRKLLGLPDIRAQVGYRAEKSPLEGPKMMQRSLLEDADLQTKLAPSDNGSASESATPMEGNISESSSPEELLEQALQYLGTGRRDQAIPLIRTAVERNPDLSTALIGMGQTLFSNRLFPEASECFKHAIEKIQEDDP

SEQ ID NO: 84263 - protein, 99 aa, Setaria italica
  Transcript Sequence Number=SeqID_18289
RPRRLHLHLRSSLAKIPLTAWCFDGGGVGDRAAAAERTAEMQADGRRCGTATEKSGGAQHGAARAELRRSCVAGIENNGKGAAWLRWSRDEQSHGCAAE

SEQ ID NO: 84264 - protein, 189 aa, Setaria italica
  Transcript Sequence Number=SeqID_18290
  Gene Ontology: Mol. function=metal ion binding
  Homolog annotation: Hit_ID=B6TA04; Match level="QueryCoverage=100%, HitCoverage=65%, E-value=1e-81, Identity=74%"; Hit description =Palmitoyltransferase PFA4
  Pfam annotation: Domain name=zf-DHHC; Domain location=2-62; Score =115.6; E_value=1.6e-31; Accession=PF01529.12; Description=DHHC zinc finger domain
RKGGDLRYCQKCSHYKPPRAHHCRVCKRCVLRMDHHCIWINNCVGHENYKVFLIFVLYAVIACFYSMVLIIGGAVHLPKDEQPGSDSPRTSIIICGVLLCPLALALMVLLGWHVYLILHNKTTIEYHEGVRAMWLAEKAGNLYHHPYNLGVYENLISVLGPNVFCWLCPISRNIGSGVRFRTSYDIPLS

SEQ ID NO: 84265 - protein, 54 aa, Setaria italica
  Transcript Sequence Number=SeqID_18291
  Gene Ontology: Mol. function=ubiquinol-cytochrome-c reductase activity; Cellular component=membrane; Biological process=electron transport chain
  Homolog annotation: Hit_ID=Q9LYR3; Match level="QueryCoverage=100%, HitCoverage=22%, E-value=3e-26, Identity=92%"; Hit description =Ubiquinol-cytochrome c reductase iron-sulfur subunit
GCVFLPNAGDFGGWFCPCHGSHYDISGRIRKGPAPFNLEVPTYSFLEENKLLIG

SEQ ID NO: 84266 - protein, 88 aa, Setaria italica
  Transcript Sequence Number=SeqID_18292
  Gene Ontology: Mol. function=oxidoreductase activity; Cellular component=mitochondrion; Biological process=hydrogen peroxide catabolic process
  Homolog annotation: Hit_ID=P18123; Match level="QueryCoverage=86%, HitCoverage=15%, E-value=9e-35, Identity=89%"; Hit description =Catalase isozyme 3
FGVNTYTFVNAAGKAHYVKFHWKPTCGVRCILTDEEAALVGGRNHSHATQDLYDSIATGTFPEWKLFVQVMDPATSWCRPAGRSRTAP

SEQ ID NO: 84267 - protein, 97 aa, Setaria italica
  Transcript Sequence Number=SeqID_18293
  Gene Ontology: Mol. function=oxidoreductase activity; Cellular component=mitochondrion; Biological process=hydrogen peroxide catabolic process
  Homolog annotation: Hit_ID=P18123; Match level="QueryCoverage=72%, HitCoverage=14%, E-value=3e-36, Identity=100%"; Hit description =Catalase isozyme 3
YYSDDKMLQCRVFAYADTQRYRLGPNYLMLPVNAPRCAHHNNHYDGAMNFMHRDEEVDYYPSRHAPLRQAPPVPMPARPVVGRREKANQYKERPKRT

SEQ ID NO: 84268 - protein, 92 aa, Setaria italica
  misc_feature (65)..(65): Xaa can be any naturally occurring amino acid
  misc_feature (77)..(77): Xaa can be any naturally occurring amino acid
  Transcript Sequence Number=SeqID_18294
  Gene Ontology: Mol. function=oxidoreductase activity; Cellular component=mitochondrion; Biological process=hydrogen peroxide catabolic process
  Homolog annotation: Hit_ID=P18123; Match level="QueryCoverage=88%, HitCoverage=15%, E-value=3e-33, Identity=90%"; Hit description =Catalase isozyme 3
  Subcellular localization annotation: CTP_CleavageSite=21; ConfidenceScore=5.10e-01
QATLQVPLLLATMDPTKFRPSSSHDTTVTTTNAGAPVWNDNEALTVGPRGPILLEDYHLIEKVEXTHFARERIPETXVRTNARGASAKGFFE

SEQ ID NO: 84269 - protein, 68 aa, Setaria italica
  Transcript Sequence Number=SeqID_18295
  Gene Ontology: Mol. function=oxidoreductase activity; Cellular component=mitochondrion; Biological process=hydrogen peroxide catabolic process
  Homolog annotation: Hit_ID=P18123; Match level="QueryCoverage=89%, HitCoverage=12%, E-value=2e-28, Identity=98%"; Hit description =Catalase isozyme 3
LLYVLQLQFRPSSSHDTTVTTTNAGAPVWNDNEALTVGPRGPILLEDYHLIEKVAHFARERIPERVVH

SEQ ID NO: 84270 - protein, 494 aa, Setaria italica
  misc_feature (160)..(160): Xaa can be any naturally occurring amino acid
  misc_feature (172)..(172): Xaa can be any naturally occurring amino acid
  Transcript Sequence Number=SeqID_18296
  Gene Ontology: Mol. function=oxidoreductase activity; Cellular component=glyoxysome; Biological process=hydrogen peroxide catabolic process
  Homolog annotation: Hit_ID=Q43206; Match level="QueryCoverage=100%, HitCoverage=100%, E-value=0.0, Identity=89%"; Hit description =Catalase-1
  Pfam annotation: Domain name=Catalase; Domain location=18-403; Score =940.8; E_value=6.5e-280; Accession=PF00199.11; Description=Catalase
  Pfam annotation: Domain name=Catalase-rel; Domain location=411-489; Score=86.5; E_value=9.3e-23; Accession=PF06628.4; Description =Catalase-related immune-responsive
  Pfam module annotation: Pfam domain module=Catalase::Catalase-rel; Domain location=18-403::411-489
MDPYKYRPSSAHNGPHWSTNSGAPVWSNDHSLTVGPRGPILLEDYHLVEKLANFDRERIPERVVHARGASAKGFFEVTHDITHLTCADFLRAPGVQTPVIVRFSTVIHERGSPETIRDPRGFAVKFYTREGNWDLVGNNFPVFFIRDGMKFPDMVHALKXPNPKSHIQENWXRVLDFFSHHPESLHMFTFLFDDIGIPADYRHMDGSGVNTYTLVNRAGKSHYVKFHWRPTCGVKSLLEDEAVTVGGTNHSHATKDLYDAIAAGNFPEWKLYIQTIDPDHEDRFDFDPLDVTKTWPEDVIPLQPVGRMVLNRNIDNFFTENEQLAFCPGVIVPGIYYSDDKLLQTRIFSYSDTQRHRLGPNYLLLPANAPKCAHHNNHYDGFMNFMHRDEEVDYFPSRYDAAKNAPRYPIPSVPLTGRREKTMIKKENNFKQPGERYRSMDPARQERFIKRWIDALSDPRLTHEIRSIWLSYWSQADRSLGQKLASRLSAKPSM

SEQ ID NO: 84271 - protein, 448 aa, Setaria italica
  Transcript Sequence Number=SeqID_18297
  Gene Ontology: Mol. function=amino acid binding; Biological process =metabolic process
  Homolog annotation: Hit_ID=B6TDN9; Match level="QueryCoverage=91%, HitCoverage=93%, E-value=0.0, Identity=90%"; Hit description=Amino acid binding protein
  Pfam annotation: Domain name=ACT; Domain location=134-198; Score =34.5; E_value=4.2e-07; Accession=PF01842.17; Description=ACT domain
  Pfam annotation: Domain name=ACT; Domain location=271-348; Score=4.5; E_value=2.7; Accession=PF01842.17; Description=ACT domain
  Pfam module annotation: Pfam domain module=ACT::ACT; Domain location =134-198::271-348
MPVGEVAARPGGGVAGMVLGGGAAAAAVGGDDAVVMQLAAAEGEETVVTVNCPDQAGLGCDLCRTILEFGLRITRGDVSTDGHWCFVVFWVMPRSSTIKIRWASLKNRLMSMCPSSYSIPFYPDISQPGPSKFYLLKLLSPDRKGLLHDVTHILSELELLIHRVKVSTTPDGRVVDLFFITDGMELLHTKERQDETCSTLIATLGPSISCEVLSAEGFQQGFSSLPPKIAEELFRVELADSEICSSSLSAELKRVQTATINFDNALSPAHTLVQIICPDQKGLSYDILRTMKDCNIQIFYGRFRSDKKGSGNKGCREVDLFVKQVDGKKVIDPEKQEVLRSRLRSEMLHPLRVMIVSRGPDTELLVANPVELSGKGRPRVFYDATLALKALGICIFSAEIGRQSASERQWEVYRFLLDDSKEFPLANSPTNRNRVVDRVRKTLMGCYN

SEQ ID NO: 84272 - protein, 177 aa, Setaria italica
  misc_feature (150)..(150): Xaa can be any naturally occurring amino acid
  Transcript Sequence Number=SeqID_18298
  Gene Ontology: Mol. function=structural molecule activity; Cellular component=chloroplast
  Homolog annotation: Hit_ID=Q69WE1; Match level="QueryCoverage=89%, HitCoverage=35%, E-value=5e-77, Identity=88%"; Hit description =Plastid-lipid associated protein PAP/fibrillin family-like
  Pfam annotation: Domain name=PAP_fibrillin; Domain location=1-157; Score=141.2; E_value=3.3e-39; Accession=PF04755.4; Description=PAP _fibrillin
QEVESAVQALEALGGVPDPTSSSLIEGSWQLIFTTRPGTASPIQRTFVGVDSFRIFQEVYLRTDDPRVVNVVRFSESVGDLKVEAEATIEDGKRILFRFDRAAFTFKFLPFKVPYPVPFRLLGDEAKGWLDTTYLSHAGKIRISRGNKCXGTTFVLQKSADARQTLLSTISAGTGVE

SEQ ID NO: 84273 - protein, 68 aa, Setaria italica
  misc_feature (26)..(26): Xaa can be any naturally occurring amino acid
  misc_feature (40)..(40): Xaa can be any naturally occurring amino acid
  Transcript Sequence Number=SeqID_18299
  Gene Ontology: Mol. function=structural molecule activity
LRRRPHLAVEVESAVQALEALGDVPXPNLIETGDKFKFDXKVAGSSSIQRTFVGVDSFRIFQEVYLQP

SEQ ID NO: 84274 - protein, 137 aa, Setaria italica
  Transcript Sequence Number=SeqID_18300
SANKKTAAPEVLVDTDVRHSSRVKKIKRGYKDVTCRSKLCLGCNIELPTISPSVSKNLGSSCKIEVSNLSDTALHAKKKSAPIQKKKSPDGVTQIVESQCDVICSRKLNGALLIVSSLENSCVARCSSRIFLNGTNI

SEQ ID NO: 84275 - protein, 256 aa, Setaria italica
  Transcript Sequence Number=SeqID_18301
  Homolog annotation: Hit_ID=B6TX37; Match level="QueryCoverage=100%, HitCoverage=87%, E-value=1e-69, Identity=56%"; Hit description =NDR1/HIN1-Like protein 2
  Pfam annotation: Domain name=Hin1; Domain location=50-189; Score =125.5; E_value=1.7e-34; Accession=PF07320.5; Description=Harpin -induced protein 1 (Hin1)
YQRPIYRPQAPAKRRRGRSCRCSFCCCFCWALLVVILLALVAAAAGGAFYLLYRPQHPSFTVSSVRLTALNLTSSATAPVLSDAITLTVTARNPNKKIVYVYGDFTLSAATSANALPLGSGTVPGFTHAAGNTTVLTATIASTAATVDPTAAGDVKKSGGFSVVLDADTTAGARVGSIKTKKIGIQVHCEGIKVTPPPPPPPAPKKAKGSKNSTVALAPAPAPSDADATTTGATTVSTAAHSCKVRVRVKIWKWTF

SEQ ID NO: 84276 - protein, 109 aa, Setaria italica
  Transcript Sequence Number=SeqID_18302
  Homolog annotation: Hit_ID=B9R7I1; Match level="QueryCoverage=90%, HitCoverage=48%, E-value=8e-37, Identity=68%"; Hit description =Electron transporter, putative
REAATVLEFYSPRCRLCASLQGFVRDLEEQAGGSAGFVLADAEDDRWMPELLHYDIRYVPCFVLLDKHGRALAKTGVPTSRQHVIAGLHHLLKIEQPSGHEGNRSAPPS

SEQ ID NO: 84277 - protein, 179 aa, Setaria italica
  Transcript Sequence Number=SeqID_18303
GPKEQRTAESIGMYDIWFNRCKELDAFTYRSVLPSLPWLDTDRAKNLAESALTMEFPEFSYCSCILKELVQTGNMKLVMSVLPESTHGKLSGTLLNSLLQAYGCLKNWRKLDAVLCMMLKMDDDLSIPSYRFLVCRMCEQSRFSSASSLRALFQHSDKSRELITCNILIFYLSQRRNTS

SEQ ID NO: 84278 - protein, 123 aa, Setaria italica
  Transcript Sequence Number=SeqID_18304
  Gene Ontology: Mol. function=transporter activity; Cellular component= membrane; Biological process=oligopeptide transport
  Homolog annotation: Hit_ID=B6TII9; Match level="QueryCoverage=91%, HitCoverage=20%, E-value=1e-20, Identity=49%"; Hit description =Peptide transporter PTR2
PDPRWRLGTAMERGERAPLLPESHGPKVEDDSLHVPLLKDKKRTGSKAPTVVLGFQCLESTGFFGISTNLVVYLEKVLHGSNLASASKVTTWTGTSYLTPIFGAIIADTFLGNYNTILISLVV

SEQ ID NO: 84279 - protein, 138 aa, Setaria italica
  Transcript Sequence Number=SeqID_18305
MSILWEKSAGWRWLVRRTRDSKPFFFTFAALCGVVPGVIGYGVMQLTSSRNEQLEAHLRSTARPETTMMGQVNRERLAEFLGELQRKEDTNDRYVAALKGETLTRKRYERIQPVPAPVQASQEAASAKAASAEKPKAK

SEQ ID NO: 84280 - protein, 55 aa, Setaria italica
  Transcript Sequence Number=SeqID_18306
VLTKCEVDIPALSKPRVSLFFFSHITFHSRYIGVYGVLVLLTLVQYFYTAGSSPG

SEQ ID NO: 84281 - protein, 107 aa, Setaria italica
  Transcript Sequence Number=SeqID_18307
  Gene Ontology: Mol. function=metal ion transmembrane transporter activity; Cellular component=integral to membrane; Biological process=metal ion transport
  Homolog annotation: Hit_ID=Q5Z653; Match level="QueryCoverage=99%, HitCoverage=25%, E-value=2e-40, Identity=80%"; Hit description =Putative ZIP-like zinc transporter
  Pfam annotation: Domain name=Zip; Domain location=1-107; Score=-66.6; E_value=0.0026; Accession=PF02535.14; Description=ZIP Zinc transporter
QVLELGIVSHSVIIGLSLGVSQSPCTIRPLVAALSFHQFFEGFALGGCICEAQFKSFSAFLMAFFFAITTPAGITVGAGIASFYNPNSPRALVVEGILNAMSAGILN

SEQ ID NO: 84282 - protein, 79 aa, Setaria italica
  Transcript Sequence Number=SeqID_18308
SGVDVHVYVLCWVRPWWQGIFSFTQNSSANTSLPTLLFSLIKSYIEVIHLPYLFTSSGMVKLYVNIYKILPLSVSTCTD

SEQ ID NO: 84283 - protein, 82 aa, Setaria italica
  misc_feature (12)..(12): Xaa can be any naturally occurring amino acid
  Transcript Sequence Number=SeqID_18309
GEADPIRSSEIXKMVVDQGGRSGARHRGSETRRTRRRPDGDDGMRGRTVSRYSPALKICARLLDRRGRGDASRSSRRHCTRR

SEQ ID NO: 84284 - protein, 241 aa, Setaria italica
  misc_feature (54)..(54): Xaa can be any naturally occurring amino acid
  Transcript Sequence Number=SeqID_18310
  Gene Ontology: Mol. function=hydrolase activity, hydrolyzing O -glycosyl compounds; Cellular component=extracellular region; Biological process=carbohydrate metabolic process
  Homolog annotation: Hit_ID=Q2QZ61; Match level="QueryCoverage=87%, HitCoverage=73%, E-value=2e-66, Identity=61%"; Hit description =Xylanase inhibitor protein 2, putative, expressed
  Pfam annotation: Domain name=Glyco_hydro_18; Domain location=31-238; Score=48.3; E_value=3e-11; Accession=PF00704.20; Description =Glycosyl hydrolases family 18
MAFQHRPCCLLFLGALLVSHLAAALAATGPGDVAVYWGRNKDEGTLREACDTGXYTTVLIAFLSAFGHGKYTLDLSGHPVAGVGDDIKHCQSKGVLVLLSIGGQGGEYSLPSSQAATDLADYLWDAFLAGGRASVPRPFGDAQVNGVDLFIDQGATEHYDELVRRLYGYNRYYRGGGITLTATPRCAYPDQRLQGALATGLVGRVHVRLYGDLRCTWAAREAWEKWAAAYPGSRVFVGVVA

SEQ ID NO: 84285 - protein, 165 aa, Setaria italica
  Transcript Sequence Number=SeqID_18311
  Gene Ontology: Mol. function=N-methyltransferase activity; Biological process=phospholipid metabolic process
  Homolog annotation: Hit_ID=C3VD33; Match level="QueryCoverage=98%, HitCoverage=99%, E-value=2e-51, Identity=62%"; Hit description =Phospholipid N-methyltransferase
MVSMAAAVGVLLPFPFYYALWTHPQRWVDLCGRGADPCRRMAQVSHVLKALQLLALASVASFSWPPPLYCPVLLAVGQYLNFKVYQLLGESGTYYGVRFGKKIPWVTEFPFGYIKDPQYVGSMLSLAALLCWVPLPYVLLWCLGYVFMMWIEHKEDPATRAKPLS

SEQ ID NO: 84286 - protein, 87 aa, Setaria italica
  Transcript Sequence Number=SeqID_18312
SLALTLWRNNVCFNSEVRGFTVSGRCSGRICLPTHMNGLGNDYILNSYTGCSIRLGKSFITSVKLDRQMFYCMVLALELGVSQCDSC

SEQ ID NO: 84287 - protein, 48 aa, Setaria italica
  Transcript Sequence Number=SeqID_18313
DPQTQSIKNNVLNFQFEDLEMMVLWPIYQTKHMVIEIIDRINNLSAHA

SEQ ID NO: 84288 - protein, 81 aa, Setaria italica
  Transcript Sequence Number=SeqID_18314
  Gene Ontology: Mol. function=FMN binding; Cellular component=vacuole
  Homolog annotation: Hit_ID=B6T6N9; Match level="QueryCoverage=95%, HitCoverage=36%, E-value=4e-31, Identity=85%"; Hit description=CREG1 protein
MYTNVVSYSDGLPGEGHGIPYFYLTTLDPTARDALADERTSFTLSEFPLGTCGKIDPENPTCAKLTLNGKVLTNVRLQLQL

SEQ ID NO: 84289 - protein, 205 aa, Setaria italica
  Transcript Sequence Number=SeqID_18315
  Gene Ontology: Mol. function=FMN binding; Cellular component=vacuole; Biological process=regulation of transcription from RNA polymerase II promoter
  Homolog annotation: Hit_ID=B6T6N9; Match level="QueryCoverage=84%, HitCoverage=82%, E-value=8e-92, Identity=92%"; Hit description=CREG1 protein
MLSPARLALAAAFLLVLRPPAPASAARPIVDDKPAPSEATATARWLAAQNTWGVLSTISSDLNGAPFGNVVSYSDGLPGEGHGIPYFYLTTLDPTARDALADERTSFTLSEFPLGTCGKIDPENPTCAKLTLNGKLKLVDLQSPEADLAKSALFTKHPEMKDWPKNHHFKIFKLEIENIFLIDWFGGPKPISPSQYLEFGGNSTQ

SEQ ID NO: 84290 - protein, 87 aa, Setaria italica
  Transcript Sequence Number=SeqID_18316
ARPIVRTNKACPLRGYRHREVARRTEHVGCPQVPSSSAQTRLLLFYRCDLVPQLVPLATGVLLRGSSMCSFDRMGSWELPLLSWEIC

SEQ ID NO: 84291 - protein, 506 aa, Setaria italica
  misc_feature (158)..(158): Xaa can be any naturally occurring amino acid
  Transcript Sequence Number=SeqID_18317
  Gene Ontology: Mol. function=binding; Cellular component=integral to membrane
  Homolog annotation: Hit_ID=B9R7G8; Match level="QueryCoverage=100%, HitCoverage=40%, E-value=1e-149, Identity=53%"; Hit description =Ribonuclease p/mrp subunit, putative
IASALSLLYAGEVPLSLEESQRWSGILLRWLFDKTVSDKTHLTAVKILSCILEDYGPASVPISQGWLALVLSEILGDNKAQNSKGITQPEPERVKSPVDYHNASTATQVLNQLGSAVVKLASAQSGYEPGSDDKDKVPLADFLSLEPFATALKNLNKXNPPKFDAADSASATLKGLKALAELCSEDGACQKRIADLGVLSLLRHILLGDDYEKLAAIEAYDASRIREVQGKNVSASNVSTTDGTTDPSSVRVPPAAHIRRHAGRLLTILSLLPNSKKEIISDDVWCKWLEDCASGRIPCNDIKLKSYCRLTLLNIFCSESPNTRRDSDEYPDSESEYKRNCPQFGDSLFLLNPELPLEVHLDNSGFRISSVPRDNCKEDGDIEDSSETGSSVDGADAALKNAPLMDVVFVHGLRGGPFNSWRIADDKSSTTKAGLVESIDEDAGKEGTCWPREWLAADFPQARFFTVKYKTNLTQWTGASLPLQEVSSMLLRKLVAAGVGNRPVVL

SEQ ID NO: 84292 - protein, 77 aa, Setaria italica
  Transcript Sequence Number=SeqID_18318
MALTNFILTVVGVGAAVMLLRKDVKQSATMFRRNVRHIRNWLEEESAAAAKSTEGSSVKELESQAAKKDAAPKEDKH

SEQ ID NO: 84293 - protein, 161 aa, Setaria italica
  Transcript Sequence Number=SeqID_18319
  Homolog annotation: Hit_ID=B6TT91; Match level="QueryCoverage=94%, HitCoverage=37%, E-value=1e-25, Identity=49%"; Hit description=BSD domain containing protein
NRTNNPFSNIDYGISQPTNQEFLSANAISDAGTVSSDNISSSVPVQLVPILKDATVESQSTVEESTRDLSTGDATTEEQSMQMSEIALVDNSPPKDDQPKQHLADISEQSRVDIRKAYHDEDDDGDEWLEEETGGPGSTAIPIADDEDVSFSDLEDDDGTK

SEQ ID NO: 84294 - protein, 184 aa, Setaria italica
  Transcript Sequence Number=SeqID_18320
  Gene Ontology: Mol. function=metal ion binding
  Homolog annotation: Hit_ID=Q9M2V1; Match level="QueryCoverage=97%, HitCoverage=43%, E-value=1e-57, Identity=62%"; Hit description=RING finger-like protein
  Pfam annotation: Domain name=zf-C3HC4; Domain location=65-99; Score =2.9; E_value=0.047; Accession=PF00097.17; Description=Zinc finger, C3HC4 type (RING finger)
RTVVCPAKSDKNISGVCPVTGKNHGAEEQGSTGNAEGKSSDPRLVPAKCPFGYDSGTFKLGPLSCMICQALLHECSRCKPCSHKFCKACVSRFKDCPLCGADIEGIEPDSELQALVNRFIDGHARIKRSHASGDVEVLGGKNKVIYEDVSMERGAFLVQQAMRAFRAQNIGSAKSRLSMCAEDI

SEQ ID NO: 84295 - protein, 99 aa, Setaria italica
  misc_feature (6)..(6): Xaa can be any naturally occurring amino acid
  misc_feature (8)..(8): Xaa can be any naturally occurring amino acid
  misc_feature (26)..(26): Xaa can be any naturally occurring amino acid
  Transcript Sequence Number=SeqID_18321
  Gene Ontology: Mol. function=RNA methyltransferase activity
  Homolog annotation: Hit_ID=Q9LFB3; Match level="QueryCoverage=86%, HitCoverage=29%, E-value=1e-30, Identity=75%"; Hit description=Cell division-like protein
LYHLLXKXGTPSGADDLDCRSGWLEXGPNKVYIPFLACGDLSGYDSDRSYPLPSTEGGSYRSLDPVQPPIAPPYKTALEMKKASSHGASADTVRPSADS

SEQ ID NO: 84296 - protein, 65 aa, Setaria italica
  Transcript Sequence Number=SeqID_18322
  Subcellular localization annotation: CTP_CleavageSite=37; ConfidenceScore=5.25e-01
LFSSSSCFSSFCLALRGKSRVSKPLFSFFFLVSMEMQAREGGGVHSWCDNFKGTWRKDEFVRSVS

SEQ ID NO: 84297 - protein, 92 aa, Setaria italica
  Transcript Sequence Number=SeqID_18323
  Subcellular localization annotation: CTP_CleavageSite=68; ConfidenceScore=5.67e-01
RGKNDLMAMGTNPTSTTPSAGGQKPTPPPSLIAPALLVAWVQPAGLSFVKVTSKRGQCRSYLSAISLCAASEAYTGRGGGGRKRRSSGGEKD

SEQ ID NO: 84298 - protein, 371 aa, Setaria italica
  misc_feature (270)..(270): Xaa can be any naturally occurring amino acid
  misc_feature (325)..(325): Xaa can be any naturally occurring amino acid
  misc_feature (365)..(365): Xaa can be any naturally occurring amino acid
  Transcript Sequence Number=SeqID_18324
  Gene Ontology: Mol. function=metal ion binding; Cellular component =early endosome membrane; Biological process=phagocytosis, engulfment
  Homolog annotation: Hit_ID=Q6ASX1; Match level="QueryCoverage=91%, HitCoverage=30%, E-value=1e-137, Identity=72%"; Hit description=FYVE zinc finger containing protein
  Pfam annotation: Domain name=FYVE; Domain location=47-110; Score =87.9; E_value=3.6e-23; Accession=PF01363.13; Description=FYVE zinc finger
PIWPSSGAGDEHLTGSSWLQGEEGLLFALAAMLEKIGLPPKPSMRGASWVVDASHCQGCSVQFSLFTRKHHCQRCGGLFCSSCTQQRMVLRGQGDSPVRICDPCKKLEEAARYELRYGHKNRARAITKEASKPEDEILSEILGGDGVQTKYSRKESLDSEFPGRTASSASASSSSSSSRRTSTNFSVDANGDDNLSPEAHNYELNNTASIFTPEELRQQAVEEKKRYKTLKSEGKPEEALRAFKHGKELERQAAALELELRKSRRMATKXPNVVAAVGSAPTADSSEEAETKRSSAGKRVKKENDLASELRELGWSDADLRDETXTAPMSVEGELSQLLREVAPKSSEGKKSGGIDKSQVNALKXQALLLK

SEQ ID NO: 84299 - protein, 241 aa, Setaria italica
  Transcript Sequence Number=SeqID_18325
  Gene Ontology: Mol. function=protein binding; Cellular component =membrane coat; Biological process=intracellular protein transport
  Homolog annotation: Hit_ID=Q5QMU1; Match level="QueryCoverage=100%, HitCoverage=38%, E-value=2e-64, Identity=61%"; Hit description=AP-3 complex delta subunit-like protein
DDTTPSTSIFFYPRSRDSVETRDEPAVSIGSSSLSEHRKRHGIFYLPTGNTEDEQSDYPHVNDTLPSCSNATVYGDNSKTIEPVFAGKKSKSTKSRPKVVKLDGEDFLSSMMATANALKEDPLSGALRGVLLGRDAKASSSQKALDVNSEAIPNLMGTNESSSQQIEYLGSHPTSSSRTSMRQNHDKEKGTNPPESDAKQSRKHRSSGRSGHRQGKHKHRERSSTQPDIVPQAPVIQDFLL

SEQ ID NO: 84300 - protein, 83 aa, Setaria italica
  Transcript Sequence Number=SeqID_18326
MAASKNPPFSAMPNAGESVTPEEAPLLPEHAGSPGAQAGGSPASVLGAVFNVSTSVVGAGIMSIPAAMRVLGVAPAVALIAGA

SEQ ID NO: 84301 - protein, 144 aa, Setaria italica
  Transcript Sequence Number=SeqID_18327
  Gene Ontology: Mol. function=protein binding; Cellular component =nucleus; Biological process=regulation of transcription, DNA -dependent
  Homolog annotation: Hit_ID=Q8LPU3; Match level="QueryCoverage=85%, HitCoverage=32%, E-value=8e-43, Identity=72%"; Hit description =Nucleosome/chromatin assembly factor 104
MDGGSSSPASPPPTAGPSAAEMEEYQNWKKNAAVLYDLVISHPLEWPSLTVQWLPSESSTRSHRLVVGTHTSDEAPNNLMVLDAVLPLPPRLAAAVAASGGALPAPSVSVSRVAPHRGEVNRARYMPQRPFTVATKTCMDEVHV

SEQ ID NO: 84302 - protein, 240 aa, Setaria italica
  Transcript Sequence Number=SeqID_18328
  Gene Ontology: Mol. function=nucleic acid binding
  Homolog annotation: Hit_ID=Q7X8Z7; Match level="QueryCoverage=93%, HitCoverage=25%, E-value=2e-27, Identity=39%"; Hit description =OSJNBa0070C17.5 protein
PPSLKKPEYGSKDNTAAGAIDALPKSSKVQGTSADVRGSKGSVGNDPKLQEFLEIMQPRSKAKMWANDTTGTLDAAATDSVVATKDSKRPQKDVPASENDASSEDSSDEEMTNDPSSEDALEEQQTGSKQDNDMTDADFFKSKIKKKVPDSESDDEDSGDHSNSSTDDENSSDESQDADKQLVDLKGNLNKKINVDKDTPVQHTDLQEMEDPDNKESEDLDGRQKETKIREDKYNEDVSI

SEQ ID NO: 84303 - protein, 73 aa, Setaria italica
  Transcript Sequence Number=SeqID_18329
HEHYTSISVSTQCLFPHACIFSLLAGSMKVLFHVYRAVISLRVMWFIWLFICIIIVKKWLVAASVTKSWQFTV

SEQ ID NO: 84304 - protein, 367 aa, Setaria italica
  misc_feature (7)..(7): Xaa can be any naturally occurring amino acid
  misc_feature (45)..(45): Xaa can be any naturally occurring amino acid
  Transcript Sequence Number=SeqID_18330
  Gene Ontology: Mol. function=protein tyrosine kinase activity; Cellular component=plasma membrane; Biological process=protein amino acid phosphorylation
  Homolog annotation: Hit_ID=B9RDA7; Match level="QueryCoverage=95%, HitCoverage=91%, E-value=1e-121, Identity=60%"; Hit description =Leucine rich repeat receptor kinase, putative
  Pfam annotation: Domain name=Pkinase; Domain location=99-365; Score =27.9; E_value=3.8e-10; Accession=PF00069.17; Description=Protein kinase domain
  Pfam annotation: Domain name=Pkinase_Tyr; Domain location=99-365; Score=38.2; E_value=2.9e-16; Accession=PF07714.9; Description =Protein tyrosine kinase
  Pfam module annotation: Pfam domain module=Pkinase::Pkinase_Tyr; Domain location=99-365::99-365
IVAVVAXVIGAAFCGLFAFSWYRRQKQKIGSSLEVSDSRLSTDHXQQKEACRRSASPLISVEYSNSWDPLSGGGVGSSGEVGDSFRFNLEEVECATQYFSDVNLLGKSGFAATYKGILRDGSVVAVKSLNKTSCKQEESDFLRGLKMLSLLRHDNLVSLRGFCCSRGRGECFLVYDFMVNGCLSQYLDVKDGSSASVLDWPTRVSIVRGIAKGIEYLHSKKSSKPPVVHQNISAEKILLDHHFAPRLSVPGLHKLLADDVVFSTLKASAAMGYLAPEYATTGRFTDKSDVFAFGIVVLQVITGKRDVSQLKVGAAAVSDLDGLVDGNLNGVFSRTEAARLAAVAAYCTSEVPNQRPTMEAVVQQLSH

SEQ ID NO: 84305 - protein, 124 aa, Setaria italica
  Transcript Sequence Number=SeqID_18331
  Subcellular localization annotation: CTP_CleavageSite=16; ConfidenceScore=5.01e-01
LSAPALSRSWKLALVSEDHRSTSLMSHRRPCDTSRWNESLALLSVPSRAYACFLSLVSSPTCGFLPLWKNKMLIFHEGKQGRETGAAWPGVGVDRSAAPWRRRRMFLARRQAPESAARSPCCRN

SEQ ID NO: 84306 - protein, 54 aa, Setaria italica
  Transcript Sequence Number=SeqID_18332
SGVIVYRWNDEGSRPSTGRANWKKRWSCCQEREEDAPPCHRGWHVSYDDGYTLF

SEQ ID NO: 84307 - protein, 168 aa, Setaria italica
  misc_feature (19)..(19): Xaa can be any naturally occurring amino acid
  misc_feature (71)..(71): Xaa can be any naturally occurring amino acid
  Transcript Sequence Number=SeqID_18333
  Homolog annotation: Hit_ID=Q9FVX8; Match level="QueryCoverage=92%, HitCoverage=16%, E-value=2e-36, Identity=57%"; Hit description =Putative myosin
LTLIAKIDKLSSERDELFXKNEQKDKELAGISEKDMQLQGKTTEITSLNKELALLKDQVKMHLEELHNLKXSLKNEKEETIGKLQIDIGSLKLQCENLKTLLSKKESEKDNLASQVLKLRRSLETREGAKANGVNADVKDNQHTNHKRIKHNTGSTGSYLLVFCPRST

SEQ ID NO: 84308 - protein, 153 aa, Setaria italica
  Transcript Sequence Number=SeqID_18334
  Gene Ontology: Mol. function=receptor activity; Cellular component =chloroplast
  Homolog annotation: Hit_ID=Q53RP7; Match level="QueryCoverage=100%, HitCoverage=14%, E-value=7e-43, Identity=65%"; Hit description =Chorion family 2, putative
AGRPTARSEPAEVADGACRWAAPILEATKLAAGKDKIYQFLVYETGSSKAALLGEATVNLAEYADALKPSAVTLPLKGSPGALLHVTIQRVVGGAGGCGDDASSENGDASPVVVKTPQRRTTLQNQLSRFEDEDSEKARAAADAMSPVQDGLL

SEQ ID NO: 84309 - protein, 843 aa, Setaria italica
  Transcript Sequence Number=SeqID_18335
  Gene Ontology: Mol. function=receptor activity; Cellular component =chloroplast
  Homolog annotation: Hit_ID=Q53RP7; Match level="QueryCoverage=98%, HitCoverage=76%, E-value=0.0, Identity=72%"; Hit description=Chorion family 2, putative
  Pfam annotation: Domain name=M; Domain location=168-188; Score=5.0; E_ value=32; Accession=PF02370.8; Description=M protein repeat
  Pfam annotation: Domain name=M; Domain location=203-223; Score=5.1; E_ value=30; Accession=PF02370.8; Description=M protein repeat
  Pfam annotation: Domain name=M; Domain location=264-284; Score=0.8; E_ value=1.1e+02; Accession=PF02370.8; Description=M protein repeat
  Pfam annotation: Domain name=M; Domain location=607-627; Score=4.2; E_ value=41; Accession=PF02370.8; Description=M protein repeat
  Pfam annotation: Domain name=M; Domain location=798-818; Score=3.9; E_ value=44; Accession=PF02370.8; Description=M protein repeat
  Pfam module annotation: Pfam domain module=M::M::M::M::M; Domain location=168-188::203-223::264-284::607-627::798-818
GRTNGSSENGDASPVVVKTPQRRTTLQNQLSRFEDEDSEKARAAADAMSPVQDGLLIRKPPGMRFRSRRNTPMSVDPVGHLHNGSSFDAVSVSGSDGSSGRYTPKTSVSMQNTFLQDNSNALSPFANNGTLRNPLTSSGDWSGSSAPDASTDGSTSNSGEARLRGEEDDVEKLRSEIATLTRKLDVSDMELQTLRKQIVKESRRGQDLSKEMSSLREERDALRRENEGLRGAKKMIHDSNGSGKRLSDGEDPWSQIEELKQELSHEKNLNADLRVQLQKMQESNSELLLAVKDLDELVEQKNREISILQEDTHEDPQEAEYEHALSNVHNSGHKIALSETSSEQEKEDELMLDALAKKRDDISTSELEKKIVELSNEIELYKKDREDLEMQMEQLALDYEILKQENHDISSRLEQTQLREQLRMQYECSAHLAIISDLEANVESLDNELQTQAKKFESDIAEIMSAKVEQEQRAIKAEESLRKIRWNNATTAERLQEEFKVLSSQVSSAFNANERHLVQARKEVAELQLQKSQLEELLQKAQGDLGSIQDQHRVKVQQLITLVDFKSKEIDRLLMELKSKSDEFQNQKRCDEAKLNALSEEIELLNAKIDKLSSERDELFEKNEQKDKELAGISEKDMQLQGKTTEITSLNKELALLKDQVKMHLEELHNLKCLKNEKEETIGKLQIDIGSLKLQCENLKTLLSKKESEKDNLASQVLKLRRSLETREGAKANGVNADVKDNQHTNHKRIKHNTGSTGSTTALPGTNRQSAEGDCNCNRQDMRNAAEQSSKELTSLKERNKAMEEELKELHERYSEISLRFAEVEGERQQLVMTVRSLKNSLR

SEQ ID NO: 84310 - protein, 87 aa, Setaria italica
  Transcript Sequence Number=SeqID_18336
SSFVKGSCSQEEQTDVALGSHLNVHESLCQDGFTNADNVASALPDMHHQLSTSDMDQGKHLQEEFSQGMDLDKHLQQEFFSRNGFAS

SEQ ID NO: 84311 - protein, 204 aa, Setaria italica
  Transcript Sequence Number=SeqID_18337
  Homolog annotation: Hit_ID=Q8DL61; Match level="QueryCoverage=28%, HitCoverage=52%, E-value=2e-11, Identity=55%"; Hit description =Tlr0636 protein
  Subcellular localization annotation: CTP_CleavageSite=30; ConfidenceScore=5.39e-01
MAPPPTTPSFLRPPPLPHRPHLRLLCRPPSASFRVSEILGGRGLCNGEVGVRKELASTPPPSTTVSSPESSTGSTPTEAAPPAVDLDAFEKELLGLTGGFPGGEVGLKDFVAKNPPPPPPSKKSGSQTQAGISAPPRPPELPLFLPGMVVLVKNPNNAYHMYCGIVQRVTDGKVAVLFEGGNWDRLINLKTFETYERSYEGREK

SEQ ID NO: 84312 - protein, 81 aa, Setaria italica
  Transcript Sequence Number=SeqID_18338
SLLPVIYYQPLGMEKHRSVVVPILVLIFAIAFLMFRLMPALCKTCSLYATAVSFQSCKFPVASTKQVLTLKLVRQWVVVCV

SEQ ID NO: 84313 - protein, 146 aa, Setaria italica
  Transcript Sequence Number=SeqID_18339
  Gene Ontology: Mol. function=binding
SELISGLSLPSLRSSGRSQDGSTMEENHDTWPTRRSPKMQMHKHYVDMPNRDVRYRNSLNSHVPHFQGRLRKQVASRASASGRHRFDDDHVPSNDMRGYTNGLASLNDALSEGLSPSSDWAARVAAFNFIQILLQQGQKGIQDITQ

SEQ ID NO: 84314 - protein, 124 aa, Setaria italica
  Transcript Sequence Number=SeqID_18340
  Gene Ontology: Mol. function=binding
  Homolog annotation: Hit_ID=Q6K6B1; Match level="QueryCoverage=88%, HitCoverage=9%, E-value=6e-12, Identity=35%"; Hit description=CLIP -associating protein-like
  Pfam annotation: Domain name=HEAT; Domain location=42-78; Score=14.8; E_value=0.37; Accession=PF02985.14; Description=HEAT repeat
  Pfam annotation: Domain name=HEAT; Domain location=83-119; Score=8.2; E_value=4.8; Accession=PF02985.14; Description=HEAT repeat
  Pfam module annotation: Pfam domain module=HEAT::HEAT; Domain location=42-78::83-119
GPSVPQLLHRIGNGGEVSCLDRQEALRQLVRASTNKDNFIWKKYFNQILTTVLEVLDDADSSLREISLLLVAEMLHNQKDSMEQSIEIVLEKLLHVTKDDVAKVSNEAHQCLYVVLAKYVPLDA

SEQ ID NO: 84315 - protein, 622 aa, Setaria italica
  misc_feature (298)..(298): Xaa can be any naturally occurring amino acid
  Transcript Sequence Number=SeqID_18341
  Gene Ontology: Mol. function=binding; Cellular component=condensed chromosome kinetochore; Biological process=cell division
  Homolog annotation: Hit_ID=Q6K6B1; Match level="QueryCoverage=95%, HitCoverage=47%, E-value=1e-105, Identity=39%"; Hit description=CLIP- associating protein-like
  Pfam annotation: Domain name=HEAT; Domain location=17-53; Score=16.9; E_value=0.085; Accession=PF02985.14; Description=HEAT repeat
  Pfam annotation: Domain name=HEAT; Domain location=429-465; Score =14.8; E_value=0.37; Accession=PF02985.14; Description=HEAT repeat
  Pfam annotation: Domain name=HEAT; Domain location=470-506; Score =8.2; E_value=4.8; Accession=PF02985.14; Description=HEAT repeat
  Pfam annotation: Domain name=HEAT; Domain location=507-541; Score =5.6; E_value=10; Accession=PF02985.14; Description=HEAT repeat
  Pfam annotation: Domain name=HEAT; Domain location=548-583; Score =21.8; E_value=0.0029; Accession=PF02985.14; Description=HEAT repeat
  Pfam annotation: Domain name=HEAT; Domain location=58-94; Score=17.5; E_value=0.056; Accession=PF02985.14; Description=HEAT repeat
  Pfam module annotation: Pfam domain module=HEAT::HEAT::HEAT::HEAT::HEA T::HEAT; Domain location=17-53::429-465::470-506::507-541::548 -583::58-94
FIQILLQQGQKGIQDITQHFEKVMKLFFCYMDDSHHKVAHAAFSTLADIIPAFKKHFESYVERILPHIFSRLIDPKELVRHPCSSTLEIVGQTYSIDTLLPALVRSLDEQRSPRAKLAVLEFANKSFDNYTVDSEGYSNSGFLKLWLTKLAPLIHEKNAKLKEASISGMISVYSNFDSAVVINFILSLSIDEQNIVRRALKQYTPRIEVDLVNYLQNKKERPHPKSYDQVDSSASSEDGYALTFKKSFPFGRFSDSLVDTESRKKMNTVQESALLNVPISRTTSDVCTDHAKQCLDVXSEADVLMQSRELKNNTCTVVEAVHSWADYPEKSDATMDDENSTGTTRLDLGHLPSDGHSSALAISGEHTQEGDPFVDRSSVNIIPHTSNGPSVPQLLHRIGNGGEVSCLDRQEALRQLVRASTNKDNFIWKKYFNQILTTVLEVLDDADSSLREISLLLVAEMLHNQKDSMEQSIEIVLEKLLHVTKDDVAKVSNEAHQCLYVVLAKYDPFRCLAIIVPLLASDDEKTLVMCINCLTKLVGRLSRDELVTQLPSFLPAVFDAFSNQSPDVRKAVVFCLVDMYIILGKEFVPYLEGLSSTQLRLVTIYANRISQARSGAPVAATQ

SEQ ID NO: 84316 - protein, 67 aa, Setaria italica
  Transcript Sequence Number=SeqID_18342
LVILKLWKIFRHDDQNMISNFKWCIGIASANLAIGILSANQAIGITSANQVIGITSTGSIPMENDDS

SEQ ID NO: 84317 - protein, 170 aa, Setaria italica
  misc_feature (125)..(125): Xaa can be any naturally occurring amino acid
  Transcript Sequence Number=SeqID_18343
  Gene Ontology: Mol. function=nucleic acid binding
  Homolog annotation: Hit_ID=B6TJR7; Match level="QueryCoverage=95%, HitCoverage=40%, E-value=7e-71, Identity=85%"; Hit description=Zinc finger C-x8-C-x5-C-x3-H type family protein
MFLTCGPCSERKHSKSPDGGKTNSSESFRTSDNEDREKDEKYFTSDEKNGCEAQLKQMHLDMEALREDKSKLETILEKKTDEERKLCTRVEDLELQLNKEKEDCQRMTSKTKKLIKAHGRYIKAXEDLKRQVCRSQARFERFADLLASDILKPSTKEQGSTGITANEDPL

SEQ ID NO: 84318 - protein, 38 aa, Setaria italica
  Transcript Sequence Number=SeqID_18344
DERKKGRVELSREEGNIVSSTNIFADRYKGDDEEVDVD

SEQ ID NO: 84319 - protein, 111 aa, Setaria italica
  Transcript Sequence Number=SeqID_18345
  Gene Ontology: Mol. function=nucleic acid binding
  Homolog annotation: Hit_ID=B6TJR7; Match level="QueryCoverage=46%, HitCoverage=13%, E-value=3e-24, Identity=98%"; Hit description=Zinc finger C-x8-C-x5-C-x3-H type family protein
  Pfam annotation: Domain name=zf-CCCH; Domain location=27-52; Score =22.6; E_value=0.0016; Accession=PF00642.16; Description=Zinc finger C-x8-C-x5-C-x3-H type (and similar)
MREGMRERDRGGGADALDAPPFRGPAYKTKLCALWRGRGGCSRPNCGFAHGEAELRRPPPRASFQPRPRPGIHTPRAPPSLPDYHSLTLDPCLVGRFKALQRLIVCLVISP

SEQ ID NO: 84320 - protein, 86 aa, Setaria italica
  Transcript Sequence Number=SeqID_18346
FHCRKTWHSCWLLFWLLPFKIAVSLADLLRLTASRGCQSYFLAGLFFSWQSVIYDPSNAYTVSEELNMEDITHFIFSEIHVMVNVL

SEQ ID NO: 84321 - protein, 336 aa, Setaria italica
  Transcript Sequence Number=SeqID_18347
  Gene Ontology: Mol. function=nucleic acid binding
  Homolog annotation: Hit_ID=B6TJR7; Match level="QueryCoverage=93%, HitCoverage=80%, E-value=1e-132, Identity=79%"; Hit description=Zinc finger C-x8-C-x5-C-x3-H type family protein
IIIWLKVVQPRPRPGRRDYRDQDFRVRPERRHSPRGRYSPERDNRGRSVRDGKPSSQDRESSRSRSPIRKSERKHSKSPDGGKTNSSESFRTSDNEDREKDEKYFTSDEKNGCEAQLKQMHLDMEALREDKSKLETILEKKTDEERKLCTRVEDLELQLNKEKEDCQRMTSKTKKLIKAHGRYIKAKEDLKRSQARFERFADLLASDILKPSTKEQGSTGITANEDPYEMSPPSDQRQNHVSASRKRPIALSASEEAKTGKRQRDNDDDMIPASENYRPEDALEHVQDSKGTDIPKPFTAKKKLGEGDYREEGNIVSSTNIFADRYKGDDEEVDVD

SEQ ID NO: 84322 - protein, 591 aa, Setaria italica
  misc_feature (48)..(48): Xaa can be any naturally occurring amino acid
  misc_feature (50)..(50): Xaa can be any naturally occurring amino acid
  Transcript Sequence Number=SeqID_18348
  Gene Ontology: Mol. function=protein serine/threonine kinase activity; Cellular component=cytoplasm; Biological process=protein amino acid phosphorylation
  Homolog annotation: Hit_ID=Q67C40; Match level="QueryCoverage=96%, HitCoverage=100%, E-value=0.0, Identity=80%"; Hit description =Mitogen-activated protein kinase 7
  Pfam annotation: Domain name=Pkinase; Domain location=34-325; Score =296.4; E_value=6e-86; Accession=PF00069.17; Description=Protein kinase domain
  Pfam annotation: Domain name=Pkinase_Tyr; Domain location=34-323; Score=5.8; E_value=4.1e-14; Accession=PF07714.9; Description=Protein tyrosine kinase
  Pfam module annotation: Pfam domain module=Pkinase::Pkinase_Tyr; Domain location=34-325::34-323
MPEANEDYLPSVCRRVWNSPEMDFFSEYGDANRYKIQEIIGKGSYGVXCXAIDQHTGEKVAIKKIQNIFEHLSDAARILREIKLLRLLRHPDIVEIKHVMLPPSRRDFRDIYVVFELMDTDLHQVIKANDDLTKEHHQFFLYQMLRALKYIHTANVYHRDLKPKNILANANCKLKICDFGLARVAFNDSPTTVFWTDYVATRWYRAPELCGSFFTKYSPAIDMWSIGCIFAEILTGKPLFPGKNVVHQLDLMTDLLGTPSADTVSQIRNEKARRYLSSMRKKQPIPFSEKFPNADPSALKLLQRLLAFDPKDRPTAEEALADPYFKGIAKVEREPSCQPISKMEFEFERRKFTKEDVKELIFQEILEYHPQLLKDYKNGSEKTSFLYPSAVDNFRRQFASLEESGGRNATTDRKHVSLPRTTTVHSTPIPAKEGPVATSQVPQRIPTARPGRVVGPVLPFENASVADQHITRRVARNPVAPPATNNSSVYCYHLKSDSSDRQDYQRELEKDRMQYRPGQHVMEAKVAPEMARDIRPSQYYVSRGVPRADLTERAALQRSMMHSVAPFNGITAVAGGYSKAGVLHYGVTSLY

SEQ ID NO: 84323 - protein, 78 aa, Setaria italica
  Transcript Sequence Number=SeqID_18349
  Subcellular localization annotation: CTP_CleavageSite=63; ConfidenceScore=5.41e-01
WDGEAFSPDWNYQPGLKASPHQPGPLVPLFSPPYHLRSLISRRQSFSSFLFLSSSPFLPGEVGSARVGPFFLNLFSLG

SEQ ID NO: 84324 - protein, 302 aa, Setaria italica
  Transcript Sequence Number=SeqID_18350
  Homolog annotation: Hit_ID=B9S1P0; Match level="QueryCoverage=99%, HitCoverage=62%, E-value=1e-124, Identity=71%"; Hit description =Flotillin-1, putative
  Pfam annotation: Domain name=Band_7; Domain location=5-205; Score =48.3; E_value=3e-11; Accession=PF01145.17; Description=SPFH domain Band 7 family
MGFVYRIASPSEYLAITGYGINDVKLAKKAWIAPGQRCTRFDISPVNYTFEVQAMSAEKLPFILPAVFTIGPRSDDEECLLRYAKLISPHDKLSHHVNELVKGVIEGETRVLAASMTMEEIFRGTKSFKQAVFENVQLELNQFGLIIYNANVKQLVDVPGHEYFSYLGQKTQQEAVNQAKVDVAEARMKGEVGAKEREGTTRQNAAKVDAETKVYTVKRQGEGAKEEARVKAEVKVFENEREAEVAAANSELAMKKAGWEQQARVAEVEAAKAVAIRDAELQAEVERRNAARQTEKLKAEHL

SEQ ID NO: 84325 - protein, 94 aa, Setaria italica
  Transcript Sequence Number=SeqID_18351
AARAPPSARPLHLRQTLVLLVTGLEHAVNSDLLLFLVKFAGLPGGWMCQLQAAYHPVIRRKTKGATKQFVVSFLGAGENPAWQMLVRGLTPQLL

SEQ ID NO: 84326 - protein, 166 aa, Setaria italica
  Transcript Sequence Number=SeqID_18352
  Gene Ontology: Mol. function=protein kinase activity; Cellular component=plasma membrane; Biological process=protein amino acid phosphorylation
  Homolog annotation: Hit_ID=B9RWV4; Match level="QueryCoverage=96%, HitCoverage=16%, E-value=2e-54, Identity=62%"; Hit description =Receptor protein kinase, putative
SLIHYDVKPSNIFLDERCNPAVGDFGLARLLPRPEQQRRYALGSGYVAPELACQSLRVNEKCDIYGLGVVILEVVTGRRAVEYGDDDVVVLQDQVRVLLEHGNALECVDPGMGGAFPEEEVLPVLKLGMVCTSQIPSNRPSMAEVVQILQVIKAPVGGRMEAAARF

SEQ ID NO: 84327 - protein, 542 aa, Setaria italica
  misc_feature (183)..(183): Xaa can be any naturally occurring amino acid
  misc_feature (528)..(528): Xaa can be any naturally occurring amino acid
  Transcript Sequence Number=SeqID_18353
  Homolog annotation: Hit_ID=B6UF72; Match level="QueryCoverage=94%, HitCoverage=78%, E-value=0.0, Identity=74%"; Hit description=mTERF family protein
  Pfam annotation: Domain name=mTERF; Domain location=262-540; Score= -27.5; E_value=2.9e-06; Accession=PF02536.6; Description=mTERF
LNSAAPARRGEEKPLDEDEDEEEVVVDKELKRMERSRVFWTAQQTFMEYLHFTRGLPFADAEHISKHSPAFVSKLLDQVKDAIKDPVEGGEEVVFMSKVKKTEVRDQRATKALVRLFRYHPVNEFEPFFESMGLKPGKYDSFLPRDLMFLADDETLLENYHFLCNYGFARTKIGRIYMAAVEXFRSGDNVLPSKLSALEDLGFSKTTVIKLVTSCPVILARDLNAEFKIMQWLDDCGIKRDWIGQFLSVQKSYDWKKMVEIPQFFTELGFDKEGIGKLISQNPDFLLDGSGKVLFRVVTIMLKAGSEKKDLFNLFLDFPDVSASDFARNIQSVILLLADIDVCDEDIKQFVVANASILGSARVKAANSILTNLSVGKRRLWKIIKEDPRQLMKYKLGTKLSRLPSCDRSTDQSLEEKVKFLKGIGFVEGSEDMKKALKSFRGKGDELQDRFDFLVRTGLSPKDVVNMIKIAPHVFNQKIHVLESKISFLLNETAYPLSALVTFPSFLSFTVERTKVRFLMYNWLQEGXVAPNFALATFLACS

SEQ ID NO: 84328 - protein, 377 aa, Setaria italica
  Transcript Sequence Number=SeqID_18354
  Gene Ontology: Mol. function=hydrolase activity, hydrolyzing O -glycosyl compounds; Biological process=carbohydrate metabolic process
  Homolog annotation: Hit_ID=Q3Y6U9; Match level="QueryCoverage=98%, HitCoverage=40%, E-value=1e-150, Identity=63%"; Hit description =Putative xylanase Xyn2
  Pfam annotation: Domain name=Glyco_hydro_10; Domain location=29-321; Score=216.7; E_value=6e-62; Accession=PF00331.12; Description =Glycosyl hydrolase family 10
RGARAKVRRRDVVLKFQGSNAVNLLGSIVRIQQTENSFPFGSCIARHNIENEDLAEFFVKNFNWAVFENELKWYHTEAEQGRLNYKDSDELLEFCEKHKIQVRGHCLFWEVEDAVQPWVRSLQGHHLMAAIQNRLQSLLSRYKGRFRHHDVNNEMLHGSFYEDRLGRDIRAYMFREAHKLDPSAVLFVNDYNVEDGCDTKSTPEKFVEQVVDLQERGAPVGGIGVQGHISHPVGEVICDNLDKLAILGLPIWITELDVTAENEHLRADDLEVFLREAFAHPAVGGIILWGFWEMFMFREHAHLVDADGTINEAGRRYLALKQEWLTRVNGNVSHQGEFKFRGYHGSYTVEVDTPSGKVARSFVVDKDSPVQVVNLNI

SEQ ID NO: 84329 - protein, 76 aa, Setaria italica
  Transcript Sequence Number=SeqID_18355
  Gene Ontology: Mol. function=nucleotide binding; Biological process =defense response
  Homolog annotation: Hit_ID=Q6Z574; Match level="QueryCoverage=89%, HitCoverage=5%, E-value=3e-10, Identity=47%"; Hit description =Putative disease resistance protein
IRSQFDCMAFVSVSRCPNVNKILADVLLQVLKRSSSITEDQNKGLYLRTLGYLELVNMIREHLQNKRYETLQMPAY

SEQ ID NO: 84330 - protein, 92 aa, Setaria italica
  Transcript Sequence Number=SeqID_18356
  Subcellular localization annotation: CTP_CleavageSite=50; ConfidenceScore=5.77e-01
FMSFHRKKTPSSSSSSSSSASAALSAGGGGLKRSKSVAPRPEEQFPYSSSASSLAAESPRKKSFWSFLYLSSSPAYAHQAAASAPYAARRGR

SEQ ID NO: 84331 - protein, 123 aa, Setaria italica
  misc_feature (23)..(23): Xaa can be any naturally occurring amino acid
  Transcript Sequence Number=SeqID_18357
  Gene Ontology: Mol. function=zinc ion binding; Cellular component =intracellular
  Homolog annotation: Hit_ID=B7VCC0; Match level="QueryCoverage=84%, HitCoverage=20%, E-value=3e-43, Identity=87%"; Hit description=C2H2 zinc finger protein
  Subcellular localization annotation: CTP_CleavageSite=72; ConfidenceScore=5.09e-01
FALKRSLHCRSEPSDVHVPRAKXRSAAVGGGGGNLSSIVTKRAAPRSGCSRSIANLRDVIHGSKRHPGQPPSCSPRSIGSSEFLNPIAHEVVLSTNSRCELKITGFGGCGGLGAVGTAAAHDK

SEQ ID NO: 84332 - protein, 79 aa, Setaria italica
  Transcript Sequence Number=SeqID_18358
  Gene Ontology: Mol. function=nucleic acid binding; Cellular component= ribonucleoprotein complex
  Homolog annotation: Hit_ID=Q6JAG6; Match level="QueryCoverage=100%, HitCoverage=17%, E-value=3e-19, Identity=68%"; Hit description =Putative small nuclear ribonucleoprotein
EREMERRDRLRALMVRLEADGQVDRLLRAQEDDQAARAGEEEEEEEQIQYPFFTEGTQELLNARVDIAQYSLPRAKARI

SEQ ID NO: 84333 - protein, 177 aa, Setaria italica
  Transcript Sequence Number=SeqID_18359
  Gene Ontology: Mol. function=protein binding; Biological process =protein metabolic process
  Homolog annotation: Hit_ID=Q9LML2; Match level="QueryCoverage=66%, HitCoverage=11%, E-value=2e-23, Identity=47%"; Hit description =F10K1.9 protein
  Subcellular localization annotation: CTP_CleavageSite=40; ConfidenceScore=5.26e-01
PVVLLSPYVPSTYYSLPTFISSLLAPTAAPLLRDALARARSAAYSPRLQLKALELCFAVSLDRLPSSSSSASSSQKEKEKENEYSEPPVANSLMAAIKRSQANQRRNPDTFHFYHHQATSATSPNAVKVDLSHLVLAILDDPLVSRVFADAGFRSGDIKLAILRPAPPMPLLGRLPT

SEQ ID NO: 84334 - protein, 89 aa, Setaria italica
  Transcript Sequence Number=SeqID_18360
  Gene Ontology: Mol. function=hydrogen ion transporting ATP synthase activity, rotational mechanism; Cellular component=proton -transporting two-sector ATPase complex; Biological process =mitochondrial electron transport, NADH to ubiquinone
  Homolog annotation: Hit_ID=A1EA12; Match level="QueryCoverage=100%, HitCoverage=39%, E-value=1e-42, Identity=95%"; Hit description =NAD(P)H-quinone oxidoreductase subunit K, chloroplastic
PGCPPKPEAVIDALTKLRKKISREIVEDRTLSQKRNRCFTTSHKLYVRRSTHTGTYEQELLYQSPSTLDISSETFFKSKSPVSSYKLVN

SEQ ID NO: 84335 - protein, 51 aa, Setaria italica
  Transcript Sequence Number=SeqID_18361
HYQFIQNLSLFLSETRICFAQTKGKKREVLDKLIMSCQLELTNSVLPIPHK

SEQ ID NO: 84336 - protein, 87 aa, Setaria italica
  Transcript Sequence Number=SeqID_18362
LAQVQTESFLQAPSREDYCSSIHLQFSTTQEGKKLPQPWPPPRQPSSSPPSPAPGSRPPRARRPPSSWPPRAPAPSAPPSPPPPPNP

SEQ ID NO: 84337 - protein, 78 aa, Setaria italica
  Transcript Sequence Number=SeqID_18363
  Gene Ontology: Mol. function=NADH dehydrogenase (ubiquinone) activity; Cellular component=photosystem II; Biological process =mitochondrial electron transport, NADH to ubiquinone
  Homolog annotation: Hit_ID=P0C340; Match level="QueryCoverage=97%, HitCoverage=47%, E-value=1e-36, Identity=97%"; Hit description =NAD(P)H-quinone oxidoreductase subunit J, chloroplastic
MQQGWLSNWLVKHEVVHRSLGFDHRGIETLQIKAGDWDSIAVILYVYGYNYLRSQCAYDVAPGGSLASVYHLTRIHAS

SEQ ID NO: 84338 - protein, 76 aa, Setaria italica
  Transcript Sequence Number=SeqID_18364
  Gene Ontology: Mol. function=NADH dehydrogenase (ubiquinone) activity; Cellular component=photosystem II; Biological process =mitochondrial electron transport, NADH to ubiquinone
  Homolog annotation: Hit_ID=P0C340; Match level="QueryCoverage=44%, HitCoverage=21%, E-value=2e-11, Identity=97%"; Hit description =NAD(P)H-quinone oxidoreductase subunit J, chloroplastic
KKETLFQNYETEYPVLLFTLFFFFFSFRIFFIFLLKWIDLDNVYCYNYLRSQCAYDVAPGGSLASVYHLTRIQYGI

SEQ ID NO: 84339 - protein, 63 aa, Setaria italica
  Transcript Sequence Number=SeqID_18365
IPIIQKGPDRLSKKGLHFDSPIWKITYSFPSYKQKNTMTQRSSLPRTLYRAHYLEQLCTARIT

SEQ ID NO: 84340 - protein, 30 aa, Setaria italica
  Transcript Sequence Number=SeqID_18366
ELGIYHLFRYDRDLILIQRKLFRFTLSRFL

SEQ ID NO: 84341 - protein, 76 aa, Setaria italica
  Transcript Sequence Number=SeqID_18367
  Gene Ontology: Mol. function=oxidoreductase activity, acting on NADH or NADPH, quinone or similar compound as acceptor; Cellular component=photosystem II; Biological process=mitochondrial electron transport, NADH to ubiquinone
  Homolog annotation: Hit_ID=A1EA12; Match level="QueryCoverage=100%, HitCoverage=33%, E-value=7e-36, Identity=97%"; Hit description =NAD(P)H-quinone oxidoreductase subunit K, chloroplastic
MGLIEFPLLDQTSSNSVISTTLNDLSNWSRLSSLWPLLYGTSCCFIEFASLIGSRFDFDRYGLVPRSSPRQADLIL

SEQ ID NO: 84342 - protein, 43 aa, Setaria italica
  Transcript Sequence Number=SeqID_18368
SSSLVERPLQLFKLISDSNRQDDQDNGHDSVVSGVGHSNVCIL

SEQ ID NO: 84343 - protein, 203 aa, Setaria italica
  Transcript Sequence Number=SeqID_18369
  Pfam annotation: Domain name=Extensin_2; Domain location=129-202; Score=0.4; E_value=1.3; Accession=PF04554.5; Description=Extensin -like region
  Pfam annotation: Domain name=Extensin_2; Domain location=26-78; Score= 12.1; E_value=0.11; Accession=PF04554.5; Description=Extensin-like region
  Pfam annotation: Domain name=Extensin_2; Domain location=79-127; Score=2.9; E_value=0.75; Accession=PF04554.5; Description=Extensin -like region
  Pfam module annotation: Pfam domain module=Extensin_2::Extensin _2::Extensin_2; Domain location=129-202::26-78::79-127
  Subcellular localization annotation: CTP_CleavageSite=20; ConfidenceScore=5.20e-01
PHRCNPATLTPSSTPAKHCLQSTLPNSYQSPPPLQGVNSPVPSHKYLPPPYYYNSPPPYVSKKNSPPPQYQYNYVPPPLANQYPPPPYIHSSPLLPSSTGTTYQYNSPPPYQYAPPPHSHQSSPPPAQYSPQLPPNAPNNLHPSVPHAKSPPVSSASPHPLYQHNSPPPPIEALSAPTPPRRESGREPATRQSTRMVAPWPRR

SEQ ID NO: 84344 - protein, 72 aa, Setaria italica
  Transcript Sequence Number=SeqID_18370
  Subcellular localization annotation: CTP_CleavageSite=56; ConfidenceScore=5.48e-01
MRGWSPIHLQFSTTQEGKKLPQPWPPPRQPSSSPPSPAPGSRPPRARRPPSSWPPRAPAPSAPPSPPPPSNP

SEQ ID NO: 84345 - protein, 319 aa, Setaria italica
  Transcript Sequence Number=SeqID_18371
  Gene Ontology: Mol. function=translation elongation factor activity
  Homolog annotation: Hit_ID=Q01CJ3; Match level="QueryCoverage=88%, HitCoverage=55%, E-value=7e-39, Identity=36%"; Hit description=RNA polymerase II transcription elongation factor DSIF/SUPT5H/SPT5 (ISS)
MESDRGSRSAATGPVPQSLEVPESGGSSSYKQESSKLGTPGPDFWSWLPPVRGSSMPSENSTGLKPSKKVDTFSRQPDLLMEKEQSADYLSLPFEATFFEKKEDRSLPPFQSFAEPENVDSKADLATDATETFEEQFSKNAAEAARALSESDDKSTHGVHPDGSLWWKETGVEQRPDGVVCKWTVIRGVSADGAVEWEDKYWEASDRFDHKELGSEKSGRDASGNVWREYWKESMWQDYTCGVMHMEKTADKWGQNGKGEQWQEQWFERYDSTGKAEKWADKWCSLDPNTPLDVGHAHVWHERWGETYDGSGGSTKYTD

SEQ ID NO: 84346 - protein, 305 aa, Setaria italica
  Transcript Sequence Number=SeqID_18372
  Homolog annotation: Hit_ID=B6TI36; Match level="QueryCoverage=96%, HitCoverage=67%, E-value=1e-126, Identity=85%"; Hit description =Transporter, folate-biopterin transporter
  Pfam annotation: Domain name=BT1; Domain location=1-305; Score=58.4; E_value=2.7e-14; Accession=PF03092.8; Description=BT1 family
  Subcellular localization annotation: CTP_CleavageSite=28; ConfidenceScore=5.47e-01
IVAEAGKQATSSSGSGQLQSFAWMFGSSAGALGNLLGGIALSYFSPRIMFLFFAILLTLQFFTTVTIPESSLKLPKANTNLSALTSIRKQVKELSCALCMPEMFRSIIWFTLSYTVIPFLLGTMFFYQTEVLRLDSSVIGLSKVFGQVALLAWSMSYNKYFKTMSARKVLSVLQFALALVMLSDVLFVQGIYRKIGIPDSIYTIVFSGLFEGLMFFKVLPFSVHIAKLCPAGCEGSVMAFVMSALALATIISGYFGVALAAFMGVSGDDFSALPACLLIEAACTMLPLCCSSLIKERREKVKKEE

SEQ ID NO: 84347 - protein, 59 aa, Setaria italica
  Transcript Sequence Number=SeqID_18373
NRISSFIIYSFLFFFFFRFFLFSLKWIDLDNVYLNNVYIVIYFKQNRNSTKWRKSLQSL

SEQ ID NO: 84348 - protein, 120 aa, Setaria italica
  misc_feature (29)..(29): Xaa can be any naturally occurring amino acid
  Transcript Sequence Number=SeqID_18374
  Gene Ontology: Mol. function=oxidoreductase activity, acting on NADH or NADPH, quinone or similar compound as acceptor; Cellular component=integral to membrane; Biological process=mitochondrial electron transport, NADH to ubiquinone
  Homolog annotation: Hit_ID=A1E9S9; Match level="QueryCoverage=100%, HitCoverage=100%, E-value=1e-50, Identity=86%"; Hit description =NAD(P)H-quinone oxidoreductase subunit 3, chloroplastic
  Pfam annotation: Domain name=Oxidored_q4; Domain location=19-119; Score=161.4; E_value=2.8e-45; Accession=PF00507.11; Description=NADH- ubiquinoneplastoquinone oxidoredu
MFLLYEYDIFWTFLIIASLIPILVFWISXFLAPSSEGPEKLSSYESGIEPMGGAWLQFRIRYYMFALVFVVFDVETVFLYPWAMSFDVLGVSVFIEAFIFVLILVVGLVYAWRKGALEWS

SEQ ID NO: 84349 - protein, 68 aa, Setaria italica
  Transcript Sequence Number=SeqID_18375
  Gene Ontology: Mol. function=NADH dehydrogenase (ubiquinone) activity; Cellular component=photosystem II; Biological process =mitochondrial electron transport, NADH to ubiquinone
  Homolog annotation: Hit_ID=P0C340; Match level="QueryCoverage=94%, HitCoverage=40%, E-value=2e-29, Identity=96%"; Hit description =NAD(P)H-quinone oxidoreductase subunit J, chloroplastic
QGWLSNWLVKHEVVHRSLGFDHRGIETLQIKAGDWDSIAVILYVYGYNYLRSQCAYDVAPGGSIPYCI

SEQ ID NO: 84350 - protein, 273 aa, Setaria italica
  Transcript Sequence Number=SeqID_18376
  Gene Ontology: Mol. function=protein serine/threonine phosphatase activity; Cellular component=protein serine/threonine phosphatase complex; Biological process=protein amino acid dephosphorylation
  Homolog annotation: Hit_ID=Q6EN45; Match level="QueryCoverage=93%, HitCoverage=70%, E-value=1e-105, Identity=72%"; Hit description =Probable protein phosphatase 2C 13
  Pfam annotation: Domain name=PP2C; Domain location=22-262; Score =227.8; E_value=2.7e-65; Accession=PF00481.13; Description=Protein phosphatase 2C
MEPCARDGEKEPPVNELVDGKLTCGYSSFIGRRSTMEDCYDIKLTKLDGHSVNLFGVFDGHGGNLAAEYLKDNLFKNLMKQPEFLTDTKLAISRGFLETDGDILETISSSFRDDGSTALAAVLIGKHLYVANVGDSRAVASKASKAVPLSKDHKPNRKDERKRIEDAGGVVIWDDTWRVGGILAMSRAFGNRMLKEYVIAKPDIQEEEVNSDLEYLILATDGLWDVVRNEDAVALLKAEDGPQAAAVKLTEIAYSRHSADNITCIVVQFHHDK

SEQ ID NO: 84351 - protein, 424 aa, Setaria italica
  misc_feature (248)..(248): Xaa can be any naturally occurring amino acid
  Transcript Sequence Number=SeqID_18377
  Gene Ontology: Mol. function=zinc ion binding
  Homolog annotation: Hit_ID=Q67IW8; Match level="QueryCoverage=97%, HitCoverage=51%, E-value=8e-72, Identity=34%"; Hit description=Far -red impaired response protein-like
  Pfam annotation: Domain name=FAR1; Domain location=1-75; Score=36.2; E_value=6.1e-09; Accession=PF03101.7; Description=FAR1 family
  Pfam annotation: Domain name=MULE; Domain location=198-296; Score =42.4; E_value=1.8e-09; Accession=PF10551.1; Description=MULE transposase domain
  Pfam module annotation: Pfam domain module=FAR1::MULE; Domain location=1-75::198-296
MGFGIRYSTSQSYKKRGEIYRNRVSFVCACGGTPDAGSKKSIKQGCPAFMRLLRTDDDGWYIKEFVADHNHKMSKTCGEQSCWKSHRQIDPHTKEVVKNLRANNVSLTEVSCILSSFFGNNNASAVTKRALRSLTVQINREKVEGNTMVQKAIEVFNRLHEEDEGFANVVDLDEGGKIKAMMWTNGKSRHDYLCFGDAITFDTTYRTNKYNMPFGLFVGANKHFQSVIFAGVLMLDESIKSFEWGFSXFVALMGGKVPKTILTDQCSAMELGQKYTKEFKEELNKICNHMLTSEEFEAGWGALVTKHGLKNNVYMSNIYNNRHMWAKAYFSGKFCAKQTSTQRCESANHVLKGSLSPGATMHIFVEQYHKLLSELIEKEDGKEHEDKLPLTETSTGWPIESHAAEFYTKTMLGKFVGPTIVSLG

SEQ ID NO: 84352 - protein, 589 aa, Setaria italica
  misc_feature (429)..(429): Xaa can be any naturally occurring amino acid
  Transcript Sequence Number=SeqID_18378
  Gene Ontology: Mol. function=zinc ion binding; Cellular component =nucleus
  Homolog annotation: Hit_ID=Q9M997; Match level="QueryCoverage=98%, HitCoverage=79%, E-value=3e-65, Identity=40%"; Hit description =F27J15.26
  Pfam annotation: Domain name=zf-C3HC; Domain location=1-102; Score =101.3; E_value=3.4e-27; Accession=PF07967.5; Description=C3HC zinc finger-like
PVNCARRGWTNIEPDVITCEACGARLMFSTPSSWSTQQVEKAAAVFSLKLDSGHKLLCPWIDNTCDESLALFPPTTPPVLVENYYECFSSLLRLLALPRISCSSLETMKKRSPQLDQFLSEPLSSSVVLKGRFMLTEDSTIKDLDDAFQDADTYYQALKIISLCGWEPRLLPYAIDCGTESHSDANSISKMVQPQQISKTMEDRVILYSPNDANGARASADANREDQHYDPLSAVLDCQFCGACVALWPFSLVERPLQLFKLISDSNRQDDQDNGHDSVVSGVGHSKDANIGFNFTIAGGPPPTRQSFRPKVSFPVVSRHLKADLNSRGNLLSSGSHSHMVPVASNASGSMKRKRSTDQPHLLEGDIDDVDTSTIGAKHDQPGDNSEKSIPNSEVSTEQKQGGSHSDTDKDTNMDGASNEEEPATGSPXRKSITSTDEALDQHGLEPRFPSVQGMNEEPSNGVNLAETDANNSMPNELSTRTKSLVNKEKGAYRSSEKQGLYDRMNEFDPIKQHRTFCPWISPDYGESLPGWRLTLTALLAQDRRSDEDSQGEVQTGLLDEDDDPLTSVRKLFMSPPPKRRRIHQSEKS

SEQ ID NO: 84353 - protein, 366 aa, Setaria italica
  misc_feature (213)..(213): Xaa can be any naturally occurring amino acid
  misc_feature (354)..(354): Xaa can be any naturally occurring amino acid
  Transcript Sequence Number=SeqID_18379
  Gene Ontology: Mol. function=DNA-directed RNA polymerase activity; Cellular component=plastid; Biological process=regulation of transcription, DNA-dependent
  Homolog annotation: Hit_ID=B9RIL8; Match level="QueryCoverage=87%, HitCoverage=62%, E-value=1e-119, Identity=65%"; Hit description=RNA polymerase sigma factor rpoD, putative
  Pfam annotation: Domain name=Sigma70_r2; Domain location=131-204; Score=47.5; E_value=5.3e-11; Accession=PF04542.6; Description=Sigma -70 region 2
  Pfam annotation: Domain name=Sigma70_r3; Domain location=209-289; Score=30.5; E_value=6.7e-06; Accession=PF04539.8; Description=Sigma -70 region 3
  Pfam annotation: Domain name=Sigma70_r4; Domain location=301-354; Score=63.4; E_value=8.3e-16; Accession=PF04545.8; Description=Sigma -70, region 4
  Pfam annotation: Domain name=Sigma70_r4_2; Domain location=295-352; Score=13.7; E_value=0.03; Accession=PF08281.4; Description=Sigma-70, region 4
  Pfam module annotation: Pfam domain module=Sigma70_r2::Sigma70 _r3::Sigma70_r4::Sigma70_r4_2; Domain location=131-204::209-289::301 -354::295-352
TVIVRSRRRRRGRRMDLGKRVEMKQKEGDAGGKQEEEREFEEMLLREHSVSTDMGSLDWKRMKIPPVLSSAQSARLFKTMQPMKAIFEVQESLREDLQRDPTDAELAEATGMTVQQLRRRLDVGRAARNKVIKHNLRLVLYAINKYYPDMANDERFDDLCQAGANGLITAIDRFEPKRGFRISTYALFWIRHSIVRAMTLSNFTRFPFAMESXERQEINKAREELAFELGRAPTDEEVIKRVGISQQRYRDVLRMTRPTYSLHSRNRVTQEELINEVTDDDAIGVDAGKHNTLLRLAIDDLLDSLKPKESLVIRQRFGLDGRGKRTLSEIAGNLSISREMVRKYELKALMKLKXHPTRVEYLRRYM

SEQ ID NO: 84354 - protein, 121 aa, Setaria italica
  misc_feature (39)..(39): Xaa can be any naturally occurring amino acid
  misc_feature (54)..(54): Xaa can be any naturally occurring amino acid
  Transcript Sequence Number=SeqID_18380
  Gene Ontology: Mol. function=oxidoreductase activity, acting on NADH or NADPH, quinone or similar compound as acceptor; Cellular component=integral to membrane; Biological process=mitochondrial electron transport, NADH to ubiquinone
  Homolog annotation: Hit_ID=A1E9S9; Match level="QueryCoverage=100%, HitCoverage=100%, E-value=2e-48, Identity=85%"; Hit description =NAD(P)H-quinone oxidoreductase subunit 3, chloroplastic
  Pfam annotation: Domain name=Oxidored_q4; Domain location=19-120; Score=150.9; E_value=3.8e-42; Accession=PF00507.11; Description=NADH- ubiquinoneplastoquinone oxidoredu
MFLLYEYDIFWTFLIIASLIPILVFWISGLLAPSSEGPXEKLSSYESGIEPMGXAWLQFRIRYYMFALVFFFFDVETVFLYPWAMSFDVLGVSVFIEAFIFVLILVVGLVYAWRKGALEWS

SEQ ID NO: 84355 - protein, 286 aa, Setaria italica
  Transcript Sequence Number=SeqID_18381
  Gene Ontology: Mol. function=structural constituent of ribosome; Cellular component=ribonucleoprotein complex; Biological process =translation
  Homolog annotation: Hit_ID=Q60E59; Match level="QueryCoverage=90%, HitCoverage=71%, E-value=1e-143, Identity=95%"; Hit description =Ribosomal protein L1
  Pfam annotation: Domain name=Ribosomal_L1; Domain location=64-269; Score=434.6; E_value=1.6e-127; Accession=PF00687.13; Description =Ribosomal protein L1pL10e family
QGAVLEEEVEADQGGRYDDDDGYEGGRGPAFTPPTRPRTGKAALPLKRDRTRSKRFLEIQKLRESKKEYDVPTAISLMKQMASAKFKESAEAHFRMNLDPKYNDQQLRATVNLPKGTGQTVKIAVLTQGEKIDEARAAGADIVGGDELIEQIKGGFMEFDKLIASPDMMPKVAGLGKILGPRGLMPNPKAGTVSPNITQAIEEFKKGKVEYRVDKTGIVHIPFGKVDFPEEDLITNFMAVVRSVERNKPSGAKGIYWKTAYLCSSMGPSIKLNIKEMLDYGTDSSN

SEQ ID NO: 84356 - protein, 586 aa, Setaria italica
  Transcript Sequence Number=SeqID_18382
  Gene Ontology: Mol. function=sulfite reductase (ferredoxin) activity; Biological process=oxidation reduction
  Homolog annotation: Hit_ID=C0JT31; Match level="QueryCoverage=100%, HitCoverage=84%, E-value=0.0, Identity=74%"; Hit description=Sulfite reductase
  Pfam annotation: Domain name=NIR_SIR; Domain location=163-344; Score =208.0; E_value=2.5e-59; Accession=PF01077.14; Description=Nitrite and sulphite reductase 4Fe-4S domain
  Pfam annotation: Domain name=NIR_SIR; Domain location=435-581; Score =0.5; E_value=0.0018; Accession=PF01077.14; Description=Nitrite and sulphite reductase 4Fe-4S domain
  Pfam annotation: Domain name=NIR_SIR_ferr; Domain location=359-427; Score=80.8; E_value=5e-21; Accession=PF03460.9; Description =NitriteSulfite reductase ferredoxin-like half domain
  Pfam annotation: Domain name=NIR_SIR_ferr; Domain location=63-131; Score=43.0; E_value=1.2e-09; Accession=PF03460.9; Description =NitriteSulfite reductase ferredoxin-like half domain
  Pfam module annotation: Pfam domain module=NIR_SIR::NIR_SIR::NIR_SIR _ferr::NIR_SIR_ferr; Domain location=163-344::435-581::359-427::63-131
AVSAPLKKGAAEVKRSKVEIIKEKSNFLRYPLNEELVSEAPNINDSAVQLIKFHGSYQQTDRDVRGQKNYSFMLRTKNPCGKVPNQLYLAMDTLADEFGIGTLRLTTRQTFQLHGVLKKNLKTVLSTVIKNMGSTLGACGDLNRNVLAPAAPYVRKDILFAQQTAENIAALLTPQSGAYYDLWVDGEKIMSAEEPPEVTKARNDNSHGTNFPDSPEPIYGTQYLPRKFKIAVTVAGDNSVDILTNDIGVVVVSDDAGEPVGFNIYVGGGMGRTHRVETTFPRLADPLGYVPKEDILYAIKAIVVTQRENGRRDDRKYSRMKYLIDRWGIDKFRAEVEKYYGKKFESFRPLPEWQFNSYLGWQEQGDGKLFYGVHVDNGRVGGQAKKTLREIIEKYNLDVSITPNQNLILCGIDQAWREPITTALAQAGLLEPKDVDPLNLTAMACPALPLCPLAQTEAERGILPILKRIRAVFDKVGIKDSESVVVRITGCPNGCARPYMAELGFVGDGPKSYQIWLGGTPNQSTLAESFMNKVKLDDIEKVLEPLFSYWNSTRLEGESFGSFTNRTGFNKLKEVVDKWVESPSAA

SEQ ID NO: 84357 - protein, 229 aa, Setaria italica
  misc_feature (115)..(115): Xaa can be any naturally occurring amino acid
  Transcript Sequence Number=SeqID_18383
  Gene Ontology: Mol. function=oxidoreductase activity, acting on NADH or NADPH, quinone or similar compound as acceptor; Cellular component=photosystem II; Biological process=mitochondrial electron transport, NADH to ubiquinone
  Homolog annotation: Hit_ID=A1EA12; Match level="QueryCoverage=100%, HitCoverage=100%, E-value=1e-118, Identity=92%"; Hit description =NAD(P)H-quinone oxidoreductase subunit K, chloroplastic
  Pfam annotation: Domain name=Oxidored_q6; Domain location=43-155; Score=198.6; E_value=1.7e-56; Accession=PF01058.14; Description=NADH ubiquinone oxidoreductase, 20 Kd sub
MGLIEFPLLDQTSSNSVISTTLNDLSNWSRLSSLWPLLYGTSCCFIEFAALIGSRFDFDRYGLVPRSSPRQADLILTAGTVTMKMAPSLVRLYEQMPEPKYVIAMGACTITGGMXTSNGITYSTVRGVDKLIPVDVYLPGCPPKPEAVIDALTKLRKKISREIVEDRTLCQSQKKNRSFTTRHKLYVRRSTHTGTYEQELLYQSPSTLDISSETFFKSKSPISSYKLVN

SEQ ID NO: 84358 - protein, 462 aa, Setaria italica
  misc_feature (69)..(69): Xaa can be any naturally occurring amino acid
  misc_feature (125)..(125): Xaa can be any naturally occurring amino acid
  misc_feature (166)..(166): Xaa can be any naturally occurring amino acid
  misc_feature (402)..(402): Xaa can be any naturally occurring amino acid
  misc_feature (427)..(427): Xaa can be any naturally occurring amino acid
  misc_feature (453)..(453): Xaa can be any naturally occurring amino acid
  Transcript Sequence Number=SeqID_18384
  Homolog annotation: Hit_ID=B9SBK4; Match level="QueryCoverage=63%, HitCoverage=30%, E-value=5e-64, Identity=46%"; Hit description =Chitinase, putative
  Subcellular localization annotation: CTP_CleavageSite=44; ConfidenceScore=5.54e-01
MAVILSSAAPTPLSPPARPRRQQQQPRATSGLRGGLARLSGALVLSHAGAALAVPLSYEEALRLSSDSXGGDGGEFALTLPDLGLDGLVDFVTENPIVIAASVAAVALPLLLGQLLGGGGGGSEXYAVVSARTAYQRLLEEPGVQLVDIRALKDAREAGAPDLREXAKKKAAAVPYNGEDKNGFLKKLALRFKDPENTTLIIIDKFDGNSELVAELVTTNGYKAAFAVKDGAEGSRGWKSSNLPWKEPAKGFSLDLGELFGDGSDGLPLTIGFAAATGLGVLAYTEIETLLQFLGSAAIVQLVATKLLYAEDRQKTLKQIDEFFNKKVAPKDLVDEIKEIGQALLPLPGEPKSQPALETGTPAAAPAAEATTESAPATPTPLSPYTNYPDLKPPTPPSAPSXEAEAEVKVESTATEAPASVNSAPPXRPRPLSPYPNYPDLKPPSSPSPSPPXLGMSTRNRV

SEQ ID NO: 84359 - protein, 293 aa, Setaria italica
  misc_feature (54)..(54): Xaa can be any naturally occurring amino acid
  misc_feature (150)..(150): Xaa can be any naturally occurring amino acid
  misc_feature (179)..(179): Xaa can be any naturally occurring amino acid
  misc_feature (239)..(239): Xaa can be any naturally occurring amino acid
  Transcript Sequence Number=SeqID_18385
  Gene Ontology: Mol. function=oxidoreductase activity, acting on NADH or NADPH, quinone or similar compound as acceptor; Cellular component=photosystem II; Biological process=mitochondrial electron transport, NADH to ubiquinone
  Homolog annotation: Hit_ID=A9QBC1; Match level="QueryCoverage=97%, HitCoverage=98%, E-value=1e-132, Identity=84%"; Hit description=NADH- plastoquinone oxidoreductase subunit K (Fragment)
  Pfam annotation: Domain name=Oxidored_q6; Domain location=108-218; Score=200.4; E_value=4.9e-57; Accession=PF01058.14; Description=NADH ubiquinone oxidoreductase, 20 Kd sub
CGNGLSLSLGNEFRRIGCIRFYRSFHFCAYPSCWFSLCMAKRSLGMVLTEYSDXKKEGKDSIETIMGLIEFPLLDQTSSNSVISTTPNDLSNWSRLSSLWPLLYGTSCCFIEFAALIGSRFDFDRYGLVPRSSPRQADLILTAGTVTMKXAPSLVRLYEQMPEPKYVIAMGACTITGGXFSTDSYSTVRGVDKLIPVDVYLPGCPPKPEAVIDALTKLRKKISREIVEDRTLCQSQKEXNRSFTTRHKLYVRRSTHTGTYEQELLYQSPSTLDISSETFFKSKSPISSYKLVN

SEQ ID NO: 84360 - protein, 302 aa, Setaria italica
  misc_feature (28)..(28): Xaa can be any naturally occurring amino acid
  misc_feature (185)..(185): Xaa can be any naturally occurring amino acid
  misc_feature (215)..(215): Xaa can be any naturally occurring amino acid
  Transcript Sequence Number=SeqID_18386
  Gene Ontology: Mol. function=oxidoreductase activity, acting on NADH or NADPH, quinone or similar compound as acceptor; Cellular component=photosystem II; Biological process=mitochondrial electron transport, NADH to ubiquinone
  Homolog annotation: Hit_ID=A9QBC1; Match level="QueryCoverage=94%, HitCoverage=98%, E-value=1e-131, Identity=84%"; Hit description=NADH- plastoquinone oxidoreductase subunit K (Fragment)
  Pfam annotation: Domain name=Oxidored_q6; Domain location=116-228; Score=187.5; E_value=3.8e-53; Accession=PF01058.14; Description=NADH ubiquinone oxidoreductase, 20 Kd sub
CFFLVVFVCGNGLSLSLGNEFRRIGCIXFIRSFHFCAYPSCWFSLCMAKRSLGMVLTEYSDKKKEGKDSIETIMGLIEFPLLDQTSSNSVISTTLNDLSNWSRLSSLWPLLYGTSCCFIEFAALIGSRFDFDRYGLVPRSSPRQADLILTAGTVTMKMAPSLVRLYEQMPEPKYVIAMGACTITXGGMFSTDSYSTVRGVDKLIPVDVYLPGCPXPKPEAVIDALTKLRKKISREIVEDRTLCQSQKKNRSFTTRHKLYVRRSTHTGTYEQELLYQSPSTLDISSETFFKCKSPISSYKLVN

SEQ ID NO: 84361 - protein, 105 aa, Setaria italica
  misc_feature (38)..(38): Xaa can be any naturally occurring amino acid
  Transcript Sequence Number=SeqID_18387
  Gene Ontology: Mol. function=protein dimerization activity; Cellular component=phagocytic vesicle; Biological process=proteolysis
  Homolog annotation: Hit_ID=B6TIJ2; Match level="QueryCoverage=85%, HitCoverage=20%, E-value=9e-41, Identity=86%"; Hit description =Acetylornithine deacetylase
LSWWRPHCRWSSKLIDFPPHEKEKVYKFATPSTMKPTXWSYPGGGLNQIPGECTISGDIRLTPFYSTSHVVEKLKGYVEDINERLETVLDTRGPASKYFHQEEHI

SEQ ID NO: 84362 - protein, 447 aa, Setaria italica
  Transcript Sequence Number=SeqID_18388
  Gene Ontology: Mol. function=protein dimerization activity; Cellular component=phagocytic vesicle; Biological process=proteolysis
  Homolog annotation: Hit_ID=B6TIJ2; Match level="QueryCoverage=99%, HitCoverage=99%, E-value=0.0, Identity=89%"; Hit description =Acetylornithine deacetylase
  Pfam annotation: Domain name=M20_dimer; Domain location=210-326; Score=42.0; E_value=2.4e-09; Accession=PF07687.6; Description =Peptidase dimerisation domain
  Pfam annotation: Domain name=Peptidase_M20; Domain location=98-442; Score=78.5; E_value=2.4e-20; Accession=PF01546.20; Description =Peptidase family M20M25M40
  Pfam module annotation: Pfam domain module=M20_dimer::Peptidase_M20; Domain location=210-326::98-442
MASPSPALLKDAVGGLDRDGFVALLSKLIGESARLQNDPPAHMPQEDLVAQHVVDALRPVSTETGGGPLVVRKVSYAEGRSNVIVEYPGTVPGRVVSFVGMHMDVVPANPSEWDFDPFSLTFDSEDKDKLRGRGTTDCLGHVALVAQLMRRLGEVKPPLKHSVIAVFIANEENSSVTGIGVDGLVKDGLLDKLKTGPLFWIDTADKQPCIGTGGMIPWHLKATGKLFHSGLAHKAINSMEMNMEALKEIQKRFYTDFPPHEKEKVYKFATPSTMKPTKWSYPGGGLNQIPGECTISGDIRLTPFYSTSHVVEKLKGYVEDINERLETVLDTRGPASKYVLPDENLRGRLEITFDGDVMNGVACNLESRGFKALCKATEEIVGHVEPYSITGSLPLIRELQDEGFDVQTAGYGLLKTYHAKNEYCLFSDMTQGFQVFVSIISQLEEEA

SEQ ID NO: 84363 - protein, 109 aa, Setaria italica
  misc_feature (15)..(15): Xaa can be any naturally occurring amino acid
  Transcript Sequence Number=SeqID_18389
  Gene Ontology: Mol. function=hydrolase activity; Biological process =metabolic process
  Homolog annotation: Hit_ID=B6UC04; Match level="QueryCoverage=91%, HitCoverage=26%, E-value=3e-25, Identity=60%"; Hit description =Gibberellin receptor GID1L2
PAGFDPDNTGVASKXTFVLFRYAATGATVRLYLPPVQDQEAAKTKLPILVFFHGGYFIVGSAAEPMYHRYVNSLVARAGAVAVSVQYRLAPEHPLPAAYDDSWAALEWP

SEQ ID NO: 84364 - protein, 183 aa, Setaria italica
  Transcript Sequence Number=SeqID_18390
  Gene Ontology: Mol. function=nucleotide binding; Cellular component =nucleus; Biological process=regulation of transcription
  Homolog annotation: Hit_ID=Q2QZH5; Match level="QueryCoverage=59%, HitCoverage=10%, E-value=1e-13, Identity=40%"; Hit description=NB -ARC domain containing protein, expressed
  Pfam annotation: Domain name=WRKY; Domain location=144-180; Score= -3.8; E_value=0.0024; Accession=PF03106.7; Description=WRKY DNA -binding domain
FNAHSADLQSTIPVGINFLSELKEFSVKIGGAGPDKSHRRAAELAFREAIMVHGRCQRVNVRCVQHIIGGKAGQSSITTHDDHDSYEHDEIMPDNSGQEVLCAVKEAGTIPLPGKKEGNNDADNRWIYVPLSMIRGNVKTSKPDDDGYSWKKYGQKNFLGAKYPRYVMTDYYSSRHLAQLQTH

SEQ ID NO: 84365 - protein, 77 aa, Setaria italica
  Transcript Sequence Number=SeqID_18391
LSLLCTCRIILISLNLKQKNCMCTLYLRLCHSLLMGLTKYFLTGECPWKTTLEPIHKHHEGFEIQRWQGRSYGASMR

SEQ ID NO: 84366 - protein, 176 aa, Setaria italica
  misc_feature (166)..(166): Xaa can be any naturally occurring amino acid
  misc_feature (172)..(172): Xaa can be any naturally occurring amino acid
  Transcript Sequence Number=SeqID_18392
  Gene Ontology: Mol. function=protein binding; Cellular component =nucleolus; Biological process=mRNA processing
  Homolog annotation: Hit_ID=B6TVN1; Match level="QueryCoverage=100%, HitCoverage=68%, E-value=3e-89, Identity=91%"; Hit description=BCAS2 protein
  Pfam annotation: Domain name=BCAS2; Domain location=1-176; Score =276.1; E_value=7.7e-80; Accession=PF05700.3; Description=Breast carcinoma amplified sequence 2 (BCAS2)
PPSDPALAPWRSPPDAEAVDALPYIDGDYGDPAVKREVDRLVEEEMRRGQRKPADFLRDLPPVPTAGFENHPMLAKEYERVRAGKPPFMLDMSRYGLEPPPMNKRNDVAAWRQALRNAQSQLQHQIIRIENLELMLKYGVDVWKLQNRQMESVLSRMTKAAVEYNXEKIETXNRER

SEQ ID NO: 84367 - protein, 150 aa, Setaria italica
  Transcript Sequence Number=SeqID_18393
  Gene Ontology: Mol. function=protein binding; Cellular component =nucleolus; Biological process=mRNA processing
  Homolog annotation: Hit_ID=B6TVN1; Match level="QueryCoverage=98%, HitCoverage=57%, E-value=3e-68, Identity=84%"; Hit description=BCAS2 protein
  Pfam annotation: Domain name=BCAS2; Domain location=2-150; Score =72.9; E_value=1.2e-18; Accession=PF05700.3; Description=Breast carcinoma amplified sequence 2 (BCAS2)
HHSSCSLEVVPNHSETYDVAAWRQALRNAQSQLQHQIIRIENLELMLKYGVDVWKLQNRQMESVLSRMQKTAVEYNEKIETVNRERKFHQQNTGGQLHALTMEWQELCQKNIAIEAACVDLQNHIDQLKLEAEELGMPMEDHTGTNSQAS

SEQ ID NO: 84368 - protein, 144 aa, Setaria italica
  Transcript Sequence Number=SeqID_18394
  Gene Ontology: Mol. function=protein binding; Cellular component =nucleolus; Biological process=mRNA processing
  Homolog annotation: Hit_ID=B6TVN1; Match level="QueryCoverage=86%, HitCoverage=48%, E-value=4e-62, Identity=90%"; Hit description=BCAS2 protein
  Pfam annotation: Domain name=BCAS2; Domain location=1-144; Score =41.8; E_value=6.1e-11; Accession=PF05700.3; Description=Breast carcinoma amplified sequence 2 (BCAS2)
TEGIVITVILLPNKLLYVLKQNAQSQLQHQIIRIENLELMLKYGVDVWKLQNRQMESVLSRMQKTAVEYNEKIETVNRERKFHQQNTGGQLHALTMEWQELCQKNIAIEAACVDLQNHIDQLKLEAEELGMPMEDHTGTNSQAS

SEQ ID NO: 84369 - protein, 125 aa, Setaria italica
  Transcript Sequence Number=SeqID_18395
  Gene Ontology: Mol. function=aspartic-type endopeptidase activity; Cellular component=extracellular region; Biological process =proteolysis
  Homolog annotation: Hit_ID=Q10M98; Match level="QueryCoverage=47%, HitCoverage=15%, E-value=1e-21, Identity=79%"; Hit description =Eukaryotic aspartyl protease family protein
  Subcellular localization annotation: CTP_CleavageSite=61; ConfidenceScore=5.11e-01
MCKQLALVLTLLAISLGHAAAAASVRMKVMHVDAGRGLTNRELLQRLSSRSKARAARLLPKAASAPVTPGAIPGAVPDTEYLAHLAIGTPPQPVQLTLDTGSDLVWTQCRPCISCFRQALPYFDP

SEQ ID NO: 84370 - protein, 137 aa, Setaria italica
  Transcript Sequence Number=SeqID_18396
  Gene Ontology: Cellular component=nucleus; Biological process =regulation of transcription, DNA-dependent
MPRANEMFRADSRMMVAFGALTSKPQQLTFEDSLRFVKKVKAHDYMLYLSLFDILGRMELSQLDAYQELQLLFRNHPDLCEELEKFRPPVRIKHATNNIWPWVIVCAVPLVAVSLIPALGNPVLWFVQQTIGEKMAT

SEQ ID NO: 84371 - protein, 119 aa, Setaria italica
  Transcript Sequence Number=SeqID_18397
KTCTCNHIEKLELIQANRHVELKWDMLFLFLLLPHHCQCCQNPLRPSLYVISLLPSFFIWVLYVVPLEGRIIFCLLQSLPIIEMVQMIKCDFWSILWFSNEPGDCCESITLVYDLDSLI

SEQ ID NO: 84372 - protein, 102 aa, Setaria italica
  Transcript Sequence Number=SeqID_18398
  Subcellular localization annotation: CTP_CleavageSite=34; ConfidenceScore=5.09e-01
LILRQLRRRPPPSVPAGSAETDPTIRSSSPLLCRSQALESPESPKTPGGVEAERNSTSHRCSRLRRLPTQQTQRPSTWIEATTARGNASKVIDWCHSQLTGR

SEQ ID NO: 84373 - protein, 81 aa, Setaria italica
  Transcript Sequence Number=SeqID_18399
LLLPTSKCQFVLECHYTNRHGANYIQKMATPSTGFNGFYIHWFFEVMCDHKAVCTTLLGISNVSGGILFVLIIAQSFSSFG

SEQ ID NO: 84374 - protein, 150 aa, Setaria italica
  Transcript Sequence Number=SeqID_18400
  Gene Ontology: Mol. function=electron carrier activity; Cellular component=intrinsic to endoplasmic reticulum membrane; Biological process=metabolic process
  Homolog annotation: Hit_ID=Q93WI6; Match level="QueryCoverage=83%, HitCoverage=28%, E-value=2e-45, Identity=64%"; Hit description =P0560B06.15 protein
FIGLPRTVAVPLFYEVQARWVAQVLSGRRSLPSPEEMMRSVEEYHRARETAGVPKRLSHAIFFDLEYCDEFGEKHCGFPRLPEWKKELLRAAVTRLCDDTETFRDDYHDSDLVLQGLRSEGWLKTEDNDGQDDDVIPEPEPLHPPPKICT

SEQ ID NO: 84375 - protein, 552 aa, Setaria italica
  misc_feature (128)..(128): Xaa can be any naturally occurring amino acid
  misc_feature (539)..(539): Xaa can be any naturally occurring amino acid
  Transcript Sequence Number=SeqID_18401
  Homolog annotation: Hit_ID=B6SWJ1; Match level="QueryCoverage=69%, HitCoverage=49%, E-value=5e-68, Identity=40%"; Hit description=FHA domain containing protein
PRHGHSDADQLYGYDDTQKNSQTSGSNIISSDNRSDLSDQFDNGAKGSKALPGIDQDQDGKKHGQFSGNSTGGLPKPGSIKEISPKWRSQEPSVLTWSMVLGVNSPDLLTDMGVLEPKTLMLCDVRKXETNVSDALASQSQANLDSLIPDSGSGSAVASEGGFMHSHLKGFSQKEDLEVLSGGLFSDSAVDTNQKDSGLHTFDATKYANHIDPVQRKQSVADVSEADTIPASSGMLYPEHNAKCVLNTEDSEIPFSDHIFIPCQSSLEPTSSMDQDSQHGTCLVLAKLINMENAQPSSPSPLVNLESGILEKNTMVSLNEGCIMGNEPRGLHGDFGGNNANMCVSALHSVDGDEEAAYGFVKHEYCDNLHNVTLNKSIQGPGQMNGEFLSDKPKIGCETAIKSCQLSDAFPDTEFDNPIGTISTLSQAEGSDSESSVPNYFDLEALILDHDLIPWDQESDFIQPEVSRFQYPESRKDLIRLEKGACSHINRSIMSKGAFAILYGQHLKCYIRDPEVTLGRQTGEVHVDIDLGKEGKAKXYPVRQAVIKMDDG

SEQ ID NO: 84376 - protein, 102 aa, Setaria italica
  Transcript Sequence Number=SeqID_18402
  Subcellular localization annotation: CTP_CleavageSite=60; ConfidenceScore=5.14e-01
FFFFFNFVNSTISFNSISHTFCKHTFPHFILDNSQTFLHTLHFFEKFHALGSTAAQVQVKHRHGGNIQFQTSSLADALFRRCCSLYPPVCLITDSPKCEDSV

SEQ ID NO: 84377 - protein, 143 aa, Setaria italica
  Transcript Sequence Number=SeqID_18403
  Homolog annotation: Hit_ID=B7ZD67; Match level="QueryCoverage=79%, HitCoverage=99%, E-value=2e-11, Identity=34%"; Hit description=Novel protein (Fragment)
PGDIQKNISINAETFGETKVKSMILHWDKEQASEILNTFDIIVASDCTFFKQFHESLARTVKSLLKHSATSQAIFLSPQRGDSLDKFLRIIKENGLNYELIENYDPTVWDLHKKYVAGDDRAWPNYDKEHCYPLLVRISSFCE

SEQ ID NO: 84378 - protein, 225 aa, Setaria italica
  Transcript Sequence Number=SeqID_18404
  Gene Ontology: Mol. function=glutathione transferase activity; Cellular component=chloroplast; Biological process=response to stress
  Homolog annotation: Hit_ID=Q9FQC6; Match level="QueryCoverage=100%, HitCoverage=100%, E-value=1e-118, Identity=88%"; Hit description =Glutathione S-transferase GST 13
  Pfam annotation: Domain name=GST_C; Domain location=110-208; Score =50.6; E_value=6.2e-12; Accession=PF00043.17; Description=Glutathione S-transferase, C-terminal domain
  Pfam annotation: Domain name=GST_N; Domain location=3-78; Score=48.0; E_value=3.8e-11; Accession=PF02798.12; Description=Glutathione S -transferase, N-terminal domain
  Pfam module annotation: Pfam domain module=GST_C::GST_N; Domain location=110-208::3-78
MAAGLQVFGQPASTDVARVLTCLFEKNLEFELVRIDTFKKSHKLPEFIKLRDPTGQVTFKHGDKTVVDSRAICRYLCTHFPEDGNKMLYGTGSLERASIEQWLQAEAQSFDAPSSELVFHLAFAPHLKDVNPDEARIAENEKKLQNMLGVYDEILSKHNFLAGDEFTLADLSHLPNSHYIVNSSDRGKKLFTAKKHVAKWYDKISNRESWRQVVKMQKEHPGAFE

SEQ ID NO: 84379 - protein, 90 aa, Setaria italica
  Transcript Sequence Number=SeqID_18405
  Homolog annotation: Hit_ID=UPI0000196D72; Match level="QueryCoverage =63%, HitCoverage=25%, E-value=7e-14, Identity=51%"; Hit description =RIC1 (ROP-INTERACTIVE CRIB MOTIF-CONTAINING PROTEIN 1); protein binding
  Pfam annotation: Domain name=PBD; Domain location=28-70; Score=25.6; E_value=0.00014; Accession=PF00786.20; Description=P21-Rho-binding domain
MAISMKGIFRGLKIIAQIFTVQREHEIEIGYPTDVRHVSHVGFGASGSCPSWMNEFRGAEEVAAAGGGGGGASISSAVQSRQTSWASLGK

SEQ ID NO: 84380 - protein, 90 aa, Setaria italica
  Transcript Sequence Number=SeqID_18406
  Homolog annotation: Hit_ID=UPI0000196D72; Match level="QueryCoverage =63%, HitCoverage=25%, E-value=8e-14, Identity=51%"; Hit description =RIC1 (ROP-INTERACTIVE CRIB MOTIF-CONTAINING PROTEIN 1); protein binding
  Pfam annotation: Domain name=PBD; Domain location=28-70; Score=25.6; E_value=0.00014; Accession=PF00786.20; Description=P21-Rho-binding domain
MAISMKGIFRGLKIIAQIFTVQREHEIEIGYPTDVRHVSHVGFGASGSCPSWMNEFRGAEEVAAAGGGGGGASISSAVQSRQTSLAFSTF

SEQ ID NO: 84381 - protein, 296 aa, Setaria italica
  Transcript Sequence Number=SeqID_18407
  Gene Ontology: Cellular component=integral to membrane
  Homolog annotation: Hit_ID=Q10SJ5; Match level="QueryCoverage=91%, HitCoverage=96%, E-value=1e-127, Identity=81%"; Hit description =Tobamovirus multiplication protein 3, putative, expressed
  Pfam annotation: Domain name=DUF1084; Domain location=14-296; Score =781.9; E_value=4.4e-232; Accession=PF06454.3; Description=Protein of unknown function (DUF1084)
MRGLLAVEAAGAAATSASASVLNGAVDWWRDVNDSPLWQDRIFHLLAVLYGIVSAIALVQLIRIECRVPEYGWTTQKVFHFLNFLVNGVRSVVFVLRRNVQLVQPEIIQHVLLDMPGLAFFTTYALLVLFWAEIYYQARAMSTDGLRPTFYWINGVVYAIQIILWLVLWWKPVRVMVILSKMFFAGVSLFAALGFLLYGGRLFLMLQRFPVESKGRRKKLQEVGYVTTICFSCFLIRCVMMCLNTFDKAADLDVLNHPILNFFYYLLVEIVPSALVLFILRKLPPKRGITQYHPIH

SEQ ID NO: 84382 - protein, 60 aa, Setaria italica
  misc_feature (23)..(23): Xaa can be any naturally occurring amino acid
  misc_feature (42)..(42): Xaa can be any naturally occurring amino acid
  Transcript Sequence Number=SeqID_18408
  Gene Ontology: Mol. function=hydrogen ion transporting ATP synthase activity, rotational mechanism; Cellular component=proton -transporting two-sector ATPase complex; Biological process=energy coupled proton transport, ...
  Gene Ontology: Biological process=against electrochemical gradient
  Homolog annotation: Hit_ID=Q9SZN1; Match level="QueryCoverage=75%, HitCoverage=9%, E-value=3e-16, Identity=88%"; Hit description=V-type proton ATPase subunit B2
SGSQVFAGIRWRSSRAYDTRNIXFQSLDLAWTLLRIFPRELXHRIPAKTLDQYYSRDATH

SEQ ID NO: 84383 - protein, 58 aa, Setaria italica
  Transcript Sequence Number=SeqID_18409
  Gene Ontology: Mol. function=hydrogen ion transporting ATP synthase activity, rotational mechanism; Cellular component=proton -transporting two-sector ATPase complex; Biological process=energy coupled proton transport, ...
  Gene Ontology: Biological process=against electrochemical gradient
  Homolog annotation: Hit_ID=Q010J1; Match level="QueryCoverage=100%, HitCoverage=8%, E-value=1e-26, Identity=94%"; Hit description =Putative vacuolar ATPase B subunit [Oryza sativa (ISS)
TSFPILTMPNDDITHPTPDLTGYITEGQIYIDRQLHNRQIYPPINVLPSLSRLMKSAI

SEQ ID NO: 84384 - protein, 55 aa, Setaria italica
  Transcript Sequence Number=SeqID_18410
  Gene Ontology: Mol. function=transferase activity; Cellular component= mitochondrion
  Homolog annotation: Hit_ID=B6TMG9; Match level="QueryCoverage=100%, HitCoverage=20%, E-value=7e-24, Identity=96%"; Hit description =Mitochondrial NADH ubiquinone oxidoreductase 29 kDa subunit
PARFVRKLTNEEIMEIPKLATAINDLMQSHFSEFLPYSTAYLEVEKLKKSFSIPL

SEQ ID NO: 84385 - protein, 143 aa, Setaria italica
  Transcript Sequence Number=SeqID_18411
  Gene Ontology: Mol. function=hydrogen ion transporting ATP synthase activity, rotational mechanism; Cellular component=proton -transporting two-sector ATPase complex; Biological process=energy coupled proton transport, ...
  Gene Ontology: Biological process=against electrochemical gradient
  Homolog annotation: Hit_ID=Q9SZN1; Match level="QueryCoverage=97%, HitCoverage=28%, E-value=1e-72, Identity=94%"; Hit description=V -type proton ATPase subunit B2
  Pfam annotation: Domain name=ATP-synt_ab_C; Domain location=49-143; Score=88.8; E_value=2e-23; Accession=PF00306.19; Description=ATP synthase alphabeta chain, C terminal domain
NRPSIRPARSYIDRQLHNRQIYPPINVLPSLSRLMKSAIGEGMTRRDHSDVSNQLYANYAIGKDVQAMKAVVGEEALSSEDLLYLEFLDKFERKFVAQGAYDTRNIFQSLDLAWTLLRIFPRELLHRIPAKTLDQYYSRDATH

SEQ ID NO: 84386 - protein, 82 aa, Setaria italica
  misc_feature (73)..(73): Xaa can be any naturally occurring amino acid
  Transcript Sequence Number=SeqID_18412
  Gene Ontology: Mol. function=hydrogen ion transporting ATP synthase activity, rotational mechanism; Cellular component=proton -transporting two-sector ATPase complex; Biological process=ATP metabolic process
  Homolog annotation: Hit_ID=Q75XW1; Match level="QueryCoverage=90%, HitCoverage=55%, E-value=4e-33, Identity=94%"; Hit description =Vacuolar ATPase B-subunit (Fragment)
RGPATPETVLYSIARGQKIPLFSAAGLPHNEIAAQICRQAGLVKRLEKGKHAEGGEDDNFAIVFAAMGVNMEXAQFFKRDFE

SEQ ID NO: 84387 - protein, 216 aa, Setaria italica
  misc_feature (20)..(20): Xaa can be any naturally occurring amino acid
  misc_feature (100)..(100): Xaa can be any naturally occurring amino acid
  Transcript Sequence Number=SeqID_18413
  Gene Ontology: Mol. function=hydrogen ion transporting ATP synthase activity, rotational mechanism; Cellular component=proton -transporting two-sector ATPase complex; Biological process=energy coupled proton transport, ...
  Gene Ontology: Biological process=against electrochemical gradient
  Homolog annotation: Hit_ID=Q9SZN1; Match level="QueryCoverage=100%, HitCoverage=43%, E-value=1e-111, Identity=94%"; Hit description=V -type proton ATPase subunit B2
  Pfam annotation: Domain name=ATP-synt_ab; Domain location=1-135; Score=76.9; E_value=7.2e-20; Accession=PF00006.17; Description=ATP synthase alphabeta family, nucleotide-binding domain
  Pfam annotation: Domain name=ATP-synt_ab_C; Domain location=152-215; Score=27.1; E_value=7.4e-05; Accession=PF00306.19; Description=ATP synthase alphabeta chain, C terminal domain
  Pfam module annotation: Pfam domain module=ATP-synt_ab::ATP-synt_ab _C; Domain location=1-135::152-215
IERIITPRIALTTAEYLAYXCGKHVLVILTDIVVFFIADALREVSAAREEVPGRRGYPGYMYTDLATIYERAGRIEGRKGSITQIPILTMPNDDITHPTXPEYLTGYITEGQIYIDRQLHNRQIYPPINVLPSLSRLMKSAIGEGMTRRDHSDVSNQLYANYAIGKDVQAMKAVVGEEALSSEDLLYLEFLDKFERKFVAQGAYDTEHFQSLDLAW

SEQ ID NO: 84388 - protein, 273 aa, Setaria italica
  misc_feature (31)..(31): Xaa can be any naturally occurring amino acid
  misc_feature (43)..(43): Xaa can be any naturally occurring amino acid
  misc_feature (52)..(52): Xaa can be any naturally occurring amino acid
  misc_feature (61)..(61): Xaa can be any naturally occurring amino acid
  misc_feature (71)..(71): Xaa can be any naturally occurring amino acid
  misc_feature (126)..(126): Xaa can be any naturally occurring amino acid
  misc_feature (161)..(161): Xaa can be any naturally occurring amino acid
  Transcript Sequence Number=SeqID_18414
MVPARVAPRLTATMDKNFAMQHINPEYKLEXNTEHLVFGYLYXPHSFSWTRXGNMLLQGNXERLLQLLYLXISSRVREELREMALHQIVDGRRELWNLHDLLICQLPDKPGWASSPEFTGRNPPSXGQDRACLKDRVGFNQRTFHKDGVLTNDALRLDGAXSQQRVGAHCHIPVNKSLSWKSCGSRPGGVEDASLLDVGAEAERDLVEVPPQHRAAPDGGAVVDGDLAGKHGLGGDVRVDGHLGHPLPQRHQLPHPFRLLLRHPSRPCTHAGT

SEQ ID NO: 84389 - protein, 489 aa, Setaria italica
  misc_feature (447)..(447): Xaa can be any naturally occurring amino acid
  Transcript Sequence Number=SeqID_18415
  Gene Ontology: Mol. function=hydrogen ion transporting ATP synthase activity, rotational mechanism; Cellular component=proton -transporting two-sector ATPase complex; Biological process=energy coupled proton transport, ...
  Gene Ontology: Biological process=against electrochemical gradient
  Homolog annotation: Hit_ID=Q9SZN1; Match level="QueryCoverage=100%, HitCoverage=100%, E-value=0.0, Identity=95%"; Hit description=V-type proton ATPase subunit B2
  Pfam annotation: Domain name=ATP-synt_ab; Domain location=146-377; Score=326.3; E_value=6.2e-95; Accession=PF00006.17; Description=ATP synthase alphabeta family, nucleotide-binding domain
  Pfam annotation: Domain name=ATP-synt_ab_C; Domain location=394-489; Score=80.4; E_value=6.6e-21; Accession=PF00306.19; Description=ATP synthase alphabeta chain, C terminal domain
  Pfam annotation: Domain name=ATP-synt_ab_N; Domain location=24-90; Score=62.9; E_value=1.2e-15; Accession=PF02874.15; Description=ATP synthase alphabeta family, beta-barrel domain
  Pfam annotation: Domain name=HAS-barrel; Domain location=17-94; Score= 20.2; E_value=0.0087; Accession=PF09378.2; Description=HAS barrel domain
  Pfam module annotation: Pfam domain module=ATP-synt_ab::ATP-synt_ab _C::ATP-synt_ab_N::HAS-barrel; Domain location=146-377::394-489::24 -90::17-94
MGVPKDGAELEEGTLEIGMEYRTVSGVAGPLVILEKVKGPKYQEIVNIRLGDGTTRRGQVLEVDGEKAVVQVFEGTSGIDNKYTTVQFTGEVLKTPVSLDMLGRIFNGSGKPIDNGPPILPEAYLDISGSSINPSERTYPEEMIQTGISTIDVMNSIARGQKIPLFSAAGLPHNEIAAQICRQAGLVKRLESSGKHKEGGDEDNFAIVFAAMGVNMETAQFFKRDFEENGSMERVTLFLNLANDPTIERIITPRIALTTAEYLAYECGKHVLVILTDMSSYADALREVSAAREEVPGRRGYPGYMYTDLATIYERAGRIEGRKGSITQIPILTMPNDDITHPTPDLTGYITEGQIYIDRQLHNRQIYPPINVLPSLSRLMKSAIGEGMTRRDHSDVSNQLYANYAIGKDVQAMKAVVGEEALSSEDLLYLEFLDKFERKFVAQGAYXDTRNIFQSLDLAWSLLRIFPRELLHRIPAKTLDQYYSRDATH

SEQ ID NO: 84390 - protein, 484 aa, Setaria italica
  misc_feature (194)..(194): Xaa can be any naturally occurring amino acid
  Transcript Sequence Number=SeqID_18416
  Gene Ontology: Mol. function=nucleotide binding; Biological process =defense response
  Homolog annotation: Hit_ID=Q9ZNV6; Match level="QueryCoverage=100%, HitCoverage=39%, E-value=1e-151, Identity=58%"; Hit description=Pib
  Pfam annotation: Domain name=ABC_tran; Domain location=296-444; Score= -53.6; E_value=0.048; Accession=PF00005.19; Description=ABC transporter
  Pfam annotation: Domain name=Arch_ATPase; Domain location=274-479; Score=-51.2; E_value=0.0066; Accession=PF01637.10; Description =Archaeal ATPase
  Pfam annotation: Domain name=NACHT; Domain location=297-465; Score= -39.5; E_value=0.09; Accession=PF05729.4; Description=NACHT domain
  Pfam annotation: Domain name=NB-ARC; Domain location=277-481; Score= -9.3; E_value=1.1e-08; Accession=PF00931.14; Description=NB-ARC domain
  Pfam module annotation: Pfam domain module=ABC_tran::Arch _ATPase::NACHT::NB-ARC; Domain location=296-444::274-479::297 -465::277-481
NVRYRLIKGSGSKATAATELSSIIAAAIFGVDDAKEENRRVDLLQLINKECDDLRVIAVWGTGGDMGQTSIIRAAYKNPDTQSKFPSRAWVRVTHPFSSKGFVQSLVNQFLAVEGFKDILDTEKTAHNLVQEFDGYVKEKRFLIVLTDLCTIEEWDQIEKCLPNNNKGSRIIVSTTQVEVASLCAGQDSQASEXKQLSADHTLYAFYDKDPQNEMVSVDPVSSPDVVTASTNAQTVAPSEITEDQCKNVDETKVDKKSLTRIRAGVGSLVESQLIGREKEISKIIGLISNKASQQSQVISVWGMGGLGKTTLANGIYQSPKLSDMFEKHAFVTIMRPFNPADLLRSLVGRLQEESSKKEELLNNRPSKTESLAMMGVEALTKELKRLLEKKSCLIVLDDLSSIEEWDHIRQGFSWMEKTTRIIVTTREESIAKHCSGKYGIVHNLEVLKEEDALNLFSLKVFGKVADFVKQNPEFVEEANQNLK

SEQ ID NO: 84391 - protein, 100 aa, Setaria italica
  Transcript Sequence Number=SeqID_18417
  Gene Ontology: Mol. function=voltage-gated chloride channel activity; Cellular component=integral to membrane; Biological process=chloride transport
  Homolog annotation: Hit_ID=Q8RXR2; Match level="QueryCoverage=100%, HitCoverage=12%, E-value=1e-33, Identity=70%"; Hit description =Chloride channel protein CLC-f
  Subcellular localization annotation: CTP_CleavageSite=22; ConfidenceScore=5.04e-01
RPLKAENSPPFTTAMIILASVVSSTVSNVLLGARPAFIVPAYELKSAAELPLYLILGMLCGVVSVVFDRLVAWFSRLFGRIKEKFNFPIIVYPALGGLGA

SEQ ID NO: 84392 - protein, 153 aa, Setaria italica
  misc_feature (42)..(42): Xaa can be any naturally occurring amino acid
  Transcript Sequence Number=SeqID_18418
  Gene Ontology: Mol. function=protein kinase activity; Biological process=protein amino acid phosphorylation
  Homolog annotation: Hit_ID=A6MGZ8; Match level="QueryCoverage=80%, HitCoverage=70%, E-value=5e-50, Identity=78%"; Hit description =Calcium-dependent protein kinase (Fragment)
  Pfam annotation: Domain name=SPARC_Ca_bdg; Domain location=12-120; Score=-26.0; E_value=0.0027; Accession=PF10591.1; Description =Secreted protein acidic and rich in cyst
  Pfam annotation: Domain name=efhand; Domain location=22-50; Score =14.3; E_value=0.53; Accession=PF00036.24; Description=EF hand
  Pfam annotation: Domain name=efhand; Domain location=64-92; Score =30.7; E_value=6e-06; Accession=PF00036.24; Description=EF hand
  Pfam annotation: Domain name=efhand; Domain location=96-124; Score =24.8; E_value=0.00036; Accession=PF00036.24; Description=EF hand
  Pfam module annotation: Pfam domain module=SPARC_Ca_bdg::efhand::efhan d::efhand; Domain location=12-120::22-50::64-92::96-124
LFVGRLRHALAKDLPWRLKGPRVLEIIQAIDSNTDGLVDFKXFVAATLHIHQMAELDNERWGDRCQAAFSKFDLDGDGYITPEELRMMQHTGLKGSIEPLLEEADIDKDGRISLSEFRKLLRTASMSNVPSPRGPPQSSSSVNCRAAIREEQI

SEQ ID NO: 84393 - protein, 166 aa, Setaria italica
  misc_feature (72)..(72): Xaa can be any naturally occurring amino acid
  Transcript Sequence Number=SeqID_18419
  Gene Ontology: Mol. function=protein serine/threonine kinase activity; Biological process=protein amino acid phosphorylation
  Homolog annotation: Hit_ID=Q7XJR9; Match level="QueryCoverage=93%, HitCoverage=25%, E-value=3e-74, Identity=87%"; Hit description =Calcium-dependent protein kinase 16
  Pfam annotation: Domain name=Pkinase; Domain location=1-166; Score= -5.8; E_value=3.8e-08; Accession=PF00069.17; Description=Protein kinase domain
TKRQFRRNRIRNVYIVMELCEGGELLDRILAKKNSRYSEKDAAVVVRQMLKVAAECHLRGLVHRDMKPEVMXDCTYFPSQNFLFKSNKEDSPLKATDFGLSDFIKPGKKFHDIVGSAYYVAPEVLKRRSGPESDVWSIGVITYILLCGRRPFWDKTEDGIFKEVSK

SEQ ID NO: 84394 - protein, 217 aa, Setaria italica
  Transcript Sequence Number=SeqID_18420
  Gene Ontology: Mol. function=protein serine/threonine kinase activity; Cellular component=plasma membrane; Biological process =protein amino acid phosphorylation
  Homolog annotation: Hit_ID=B2KTA4; Match level="QueryCoverage=96%, HitCoverage=41%, E-value=1e-105, Identity=87%"; Hit description =Calcium-dependent protein kinase
  Pfam annotation: Domain name=APH; Domain location=24-200; Score= -14.0; E_value=0.022; Accession=PF01636.15; Description =Phosphotransferase enzyme family
  Pfam annotation: Domain name=Pkinase; Domain location=22-217; Score =131.8; E_value=2.1e-36; Accession=PF00069.17; Description=Protein kinase domain
  Pfam annotation: Domain name=Pkinase_Tyr; Domain location=22-217; Score=-81.0; E_value=2.4e-08; Accession=PF07714.9; Description =Protein tyrosine kinase
  Pfam module annotation: Pfam domain module=APH::Pkinase::Pkinase_Tyr; Domain location=24-200::22-217::22-217
AAAAAAPVRVEFGYERDFEARYEVGRLLGHGQFGYTFAATDRQSGDRVAVKRIDKAKMTRPVAVEDVKREVKILKALKGHENIVHFYNAFEDDSYVYIVMELCEGGELLDRILAKKNSRYSEKDAAVVVRQMLKVAAECHLRGLVHRDMKPENFLFKSNKEDSPLKATDFGLSDFIKPGKKFHDIVGSAYYVAPEVLKRRSGPESDVWSIGVITYIL

SEQ ID NO: 84395 - protein, 188 aa, Setaria italica
  misc_feature (24)..(24): Xaa can be any naturally occurring amino acid
  Transcript Sequence Number=SeqID_18421
  Gene Ontology: Mol. function=transporter activity; Cellular component= membrane; Biological process=oligopeptide transport
  Homolog annotation: Hit_ID=Q7X619; Match level="QueryCoverage=100%, HitCoverage=31%, E-value=1e-55, Identity=56%"; Hit description =P0076O17.8 protein
AHLPQLRPPPCDMIAAAAACEEAXKGRGGLFFAALYLVAVGSGCLKPNIIAHGADQFRRGSAGDARRLSTYFNAAYFSFCVGELVALTVLVWVQTRSGMDVGFGVSAAAMAVGLVSLVAGVAFYRNKPPQGSIFTPIAKVFVAAVTKRKQVCPSTATVQANASITAHEMSVNTTNIRHINKFRFLDKA

SEQ ID NO: 84396 - protein, 370 aa, Setaria italica
  Transcript Sequence Number=SeqID_18422
  Homolog annotation: Hit_ID=B6TJS6; Match level="QueryCoverage=100%, HitCoverage=66%, E-value=0.0, Identity=90%"; Hit description =MAC/Perforin domain containing protein
SVTVGGKDEVYIKQHSSSQLSEMEFKNYVREIGRERFSDVENKSNAIPINYSEKDMTVIFRRRGGCDLVQSFSDWKGTVASAPDVIGMTFRSIVSLVDDVPGKKHLARAVELYLTYKPPIEELQYFLDFQVPLVWAPAPPGIAGHHRKEPVCPSLQFSLMGPKLFISTEQISVGRRPVVGLKLLLEGAKQNRLAIHLQHLGSLPKIFLPHWDSHITIGPPKWQGPEEQDSRWFEPIKWKNFAHVSTAPIEYTETNITDLSGVYIVTGAQLGVWDFGAKSVLHLKLLFSRVPGCTIRRSVWDHSPSSSSTQRTDESSSSSSDNAKLVKIVDMTETLKGPQDAPGHWLVTGAKLGVEKGRIVVRAKYSLLNY

SEQ ID NO: 84397 - protein, 114 aa, Setaria italica
  Transcript Sequence Number=SeqID_18423
AMSRSGATTVVAIISRAILEKQRRRRAVSNSIRPYLPAEWQHGTPGDHSSTLIIDGEKNEDLDTKLPSLCTAARIFPSPLPSPAPNRPPETEGTGRIAAGNLFRLLFVPLLSLV

SEQ ID NO: 84398 - protein, 95 aa, Setaria italica
  Transcript Sequence Number=SeqID_18424
  Gene Ontology: Mol. function=binding
  Homolog annotation: Hit_ID=Q9LNJ1; Match level="QueryCoverage=86%, HitCoverage=5%, E-value=2e-42, Identity=98%"; Hit description =F6F3.12 protein
HTELALKYVKRALYLLHLTCGPSHPNTAATYINVAMMEEGLGNVHVALRYLHKALKCNQKLLGPDHIQTAASYHAIAIALSLNGKLNYLRSSYKT

SEQ ID NO: 84399 - protein, 276 aa, Setaria italica
  misc_feature (32)..(32): Xaa can be any naturally occurring amino acid
  Transcript Sequence Number=SeqID_18425
  Gene Ontology: Mol. function=protein serine/threonine kinase activity; Biological process=protein amino acid phosphorylation
  Homolog annotation: Hit_ID=B6UIQ8; Match level="QueryCoverage=90%, HitCoverage=36%, E-value=1e-101, Identity=74%"; Hit description =Receptor-like protein kinase RK20-1
  Pfam annotation: Domain name=Pkinase; Domain location=103-276; Score =43.8; E_value=4.3e-11; Accession=PF00069.17; Description=Protein kinase domain
  Pfam annotation: Domain name=Pkinase_Tyr; Domain location=103-276; Score=3.9; E_value=5.5e-14; Accession=PF07714.9; Description=Protein tyrosine kinase
  Pfam module annotation: Pfam domain module=Pkinase::Pkinase_Tyr; Domain location=103-276::103-276
MNGEAAVPAPAPSVTVPGTTGCSTPEGVENQXNNSAGKLLGIILPIVLISVVAAITLYICNMRKKRRSPGTKLPRRTHTVEDFESIKSTLLSLSSLQVATNNFDESNKLGEGGFGSVYKGDLSGQEVAVKRLSKGSNQGLEELRNELVLVAKLHHKNLVRLEGFCLEEGERLLVYEYMANKSLDTILFDPEEKRRLEWKKRFNIIEGIARGLQYLHEDSQKKIVHRDMKASNVLLDADMNPKIGDFGLARLFEQDQTRDVTNRIVGTFGYMSPEYV

SEQ ID NO: 84400 - protein, 66 aa, Setaria italica
  Transcript Sequence Number=SeqID_18426
  Gene Ontology: Mol. function=hydrolase activity; Biological process =metabolic process
  Homolog annotation: Hit_ID=B6T2X8; Match level="QueryCoverage=100%, HitCoverage=21%, E-value=1e-27, Identity=90%"; Hit description =Gibberellin receptor GID1L2
LVCAGKKDPLYVRDRAYYEAVSASAWPGDVDWLESEEEEHVFFLPKPECENAKKLLDRVVAFIAGA

SEQ ID NO: 84401 - protein, 311 aa, Setaria italica
  Transcript Sequence Number=SeqID_18427
  Gene Ontology: Mol. function=hydrolase activity; Biological process =metabolic process
  Homolog annotation: Hit_ID=B6T2X8; Match level="QueryCoverage=100%, HitCoverage=100%, E-value=1e-150, Identity=84%"; Hit description =Gibberellin receptor GID1L2
  Pfam annotation: Domain name=Abhydrolase_3; Domain location=76-289; Score=193.2; E_value=7.1e-55; Accession=PF07859.5; Description =alphabeta hydrolase fold
  Pfam annotation: Domain name=Esterase_phd; Domain location=56-281; Score=-91.3; E_value=0.054; Accession=PF10503.1; Description =Esterase PHB depolymerase
  Pfam module annotation: Pfam domain module=Abhydrolase_3::Esterase _phd; Domain location=76-289::56-281
MEPAADEIAIESPAHFRLYKSGRIERLNRPPVLPAGLDEATGVTSKDVVLDPETGLSVRLYLPKVGQEPSKKLPVLVFFHGGGFMLESAGSATYHTYVNPLAAAAGVLVVSVCYRLAPEHPLPAAYEDSWAALQWAASARDEWIAEHGDVARLFLAGDSAGANIVHDMLLRASGNGGPSIEGAIMLHPWFGGNTPIEGEPEGASAATVGLWTYACPGAVGGADDPRMNPLAPGAPSLEKLGCARMLVCAGNKDGLYARGRAYYEAVAASAWPGDVAWHESDGEEHVFFLPKPECENAKQLMDRVVAFIAGA

SEQ ID NO: 84402 - protein, 90 aa, Setaria italica
  Transcript Sequence Number=SeqID_18428
  Gene Ontology: Mol. function=hydrolase activity, acting on acid anhydrides, catalyzing transmembrane movement of substances; Cellular component=integral to membrane; Biological process =metabolic process
  Homolog annotation: Hit_ID=Q7EZ84; Match level="QueryCoverage=77%, HitCoverage=6%, E-value=2e-30, Identity=82%"; Hit description =Putative calcium-transporting ATPase 8, plasma membrane-type
GLKIGMDFHDMRSKSSVIHVFPFNSDKKRGAVAVQSDEGVHVHWKGAAEIVLSSCKSWLSVDGSVQPMSAEKVISSPNLFVGYSETHLNF

SEQ ID NO: 84403 - protein, 138 aa, Setaria italica
  Transcript Sequence Number=SeqID_18429
  Gene Ontology: Mol. function=hydrolase activity, acting on acid anhydrides, catalyzing transmembrane movement of substances; Cellular component=integral to membrane; Biological process =metabolic process
  Homolog annotation: Hit_ID=Q7EZ84; Match level="QueryCoverage=97%, HitCoverage=12%, E-value=6e-60, Identity=80%"; Hit description =Putative calcium-transporting ATPase 8, plasma membrane-type
KGQKSSVIHVFPFNSDKKRGAVAVQSDEGVHVHWKGAAEIVLSSCKSWLSVDGSVQPMSAEKHDEYKKSIEDMAVNSLRCVAFAYCAPDGEMIPKEDIANWKLPEDDLILLGIVGIKDPCRPGVRGAVRLCTTAGVKV

SEQ ID NO: 84404 - protein, 642 aa, Setaria italica
  Transcript Sequence Number=SeqID_18430
  Gene Ontology: Mol. function=hydrolase activity, acting on acid anhydrides, catalyzing transmembrane movement of substances; Cellular component=integral to membrane; Biological process=calcium ion transport
  Homolog annotation: Hit_ID=Q7EZ84; Match level="QueryCoverage=96%, HitCoverage=57%, E-value=0.0, Identity=75%"; Hit description =Putative calcium-transporting ATPase 8, plasma membrane-type
  Pfam annotation: Domain name=Cation_ATPase_N; Domain location=138 -216; Score=44.8; E_value=3.4e-10; Accession=PF00690.18; Description =Cation transporterATPase, N-terminus
  Pfam annotation: Domain name=E1-E2_ATPase; Domain location=231-479; Score=245.0; E_value=1.8e-70; Accession=PF00122.12; Description=E1 -E2 ATPase
  Pfam module annotation: Pfam domain module=Cation_ATPase_N::E1-E2 _ATPase; Domain location=138-216::231-479
MALGRSPPPEIRSPDERGAAEDAEEAEAEEEEVFDDAFDIPHKNAPHDRLRRWRQAALVLNASRRFRYTLDLKKEEEKEIIRRKIRAHAQVIRAAFLFKEAGQKDIREAYSGINLATASRSFPIELEKLTTLNREHDTVLLQEVGGVKGLSDLLKSNLDKGVSPNEDELLQRRSIYGANTYPRKKRKNILRFVFEACQDLTLVILMVAAAISLTLGMTTEGADDGWYDGGSIFLAVFLVILVTAISDYRQSLQFRHLNEEKQNIQVEVVRGGKRSAASIFDLVVGDVVPLKIGDQVPADGVLISGHSLAIDESSMTGESKIVHKDQKAPFLMSGCKVADGYGSMLVTGVGTNTEWGQLMANLSEDNGEETPLQVRLNGVATFIGLVGLSVAGAVLVVLWIRYFTGHTENPDGTTQFVAGTTGVKQGFMGAIRILTIAVTIVVVAVPEGLPLAVTLTLAYSMKKMMRDKALVRRLSSCETMGSATTICSDKTGTLTLNKMTVVEAYFAGTKLDPCDDISQISDDSAAIILEGIAQNTTGTVFLPEDGGEPELTGSPTEKAILSWGLKIGMDFHDMRSKSSVIHVFPFNSDKKRGAVAVQSDEGVHVHWKGAAEIVMNICVKYLTYLLFHCFILVHLTLCSLGG

SEQ ID NO: 84405 - protein, 284 aa, Setaria italica
  misc_feature (112)..(112): Xaa can be any naturally occurring amino acid
  Transcript Sequence Number=SeqID_18431
  Gene Ontology: Mol. function=nucleotide binding; Biological process =defense response
  Homolog annotation: Hit_ID=Q9XEQ9; Match level="QueryCoverage=95%, HitCoverage=20%, E-value=2e-84, Identity=57%"; Hit description =Disease resistance protein RPM1 homolog
VVLQGIMVSVATGAMNSLLDKLTALLGKEFRLDNGVKRDIAFLKDELSCINALLEKLANMEVLDLQTKEWRKQVREMAYDIEDCIDNYMHQSCQKRSSGIIGFFHVYVQKVXKELSGHHGVAQQIKELKDRIVEAKHRRKRYKLDNEVDPETNNVLSIDPRLPALYVESSVLVGIDIPRHHLISMLDDGEQSLKVISIVGLGGLGKTTLANEAYKRISWQFDCKAFVSVSQKPDVKKILWVILSQVKNQDCANTETGDENQLINALRGFLKDKRCALFSYYESF

SEQ ID NO: 84406 - protein, 119 aa, Setaria italica
  misc_feature (15)..(15): Xaa can be any naturally occurring amino acid
  Transcript Sequence Number=SeqID_18432
  Gene Ontology: Cellular component=membrane
AGGSCQLPHVLQERXLHALSAAINALQLVDPSFAWLDSVCEADDQISPSKRPRNLLMENLAFGTDSELSRLQFCVDIEILEKEYTLTKAQFMLSTVKSTFNFSESQSIESLMDILINEK

SEQ ID NO: 84407 - protein, 1060 aa, Setaria italica
  Transcript Sequence Number=SeqID_18433
  Gene Ontology: Mol. function=nucleocytoplasmic transporter activity; Cellular component=membrane; Biological process=intracellular protein transmembrane transport
  Homolog annotation: Hit_ID=UPI000154D8C8; Match level="QueryCoverage =53%, HitCoverage=36%, E-value=7e-32, Identity=25%"; Hit description =nucleoporin 160
CQILKFQSLTANGLRKEILSIIEQEVSSQTASATAYHWKKILCTISPQIWCWNNRPYGLLLDTNKEVFGLIRKGSFSLFRCLEGVEMLIYGSSDELRNIDDLGMNLMDADIELLNEVLRCMGHIHHLLGRSSTAIYYESLISSVISSDEIASQIVKILETGFSPQSSSSLVTLLGTDAYVERRQAAHKSQRKFSVDMLLSFHKLRSSAASWSVVFDVIEKFMKCLNTNINVQDYESKRVCNVNSVLLVQATSQVARTMFESAFDLFLFLSYLVGVGGQVSLLQSDVARIKLKLFPMIQDILGQWIVLHFVGISPTSPPTIEDFSYQLSSLQLGKVDELSLHRKLGCSDFTLACLLDFPISPRVGVMSHCFPSPVEVINLVRSFSSLIMGGGNFDCVQTFLGSTINLSAVLIRHGQYEAAQNLLGILETYLNNEKVSRTGQDADTACSAYLHLNGFCLLMLAHDEANTVLRESKVHDAIRCFFRAASGHEASKALQKFSLETGFQVSGECRSISLWRLHYYEWAMQIFEQHSMSEGACQFALAALEQVDNIVDLDNGTEAESLPETAAMIKGRLWANVFKYSLDLKNFQDAYCAIISNPDDDSKYICLRRFIIVLCELGETKVLCNGEIPFTGLVEKVEQELFWKAERSDLSSRPNLYKVLYSFEAYRNNWRKAAGYMYRYFVRLNREGNAGGSCQLPHVLQERLHALSAAINALQLVDPSFAWLDSVCEADDQISPSKRPRNLLMENLAFGTDSELSRLQFCVDIEILEKEYTLTKAQFMLSTVKSTFNFSESQSIESLMDILINEKLYDLAFTIVLKFWKDSGMKRELERVFSAIAQQCCPNRSDKSGRNLTDSKQLLVLPSSEDDAWDGNIKSIAVTQQLQGNCHWDTLELFMKKYNDLHPRLPVVVAETLLYTDPEIELPLWLVQMFKTNKAGNRIWGMSGKEADPAALFRLYINYGRHAEATNLLVEYLELFASSRPADVLHRKKMSAAWFPYTAVERLWCHLGEMQRAGHSVDQCDRLKKLLHGALMSHLQQVVVDSEDVLSSVGGGQGMEGQSN

SEQ ID NO: 84408 - protein, 118 aa, Setaria italica
  Transcript Sequence Number=SeqID_18434
  Gene Ontology: Cellular component=plasma membrane
  Homolog annotation: Hit_ID=B9T165; Match level="QueryCoverage=100%, HitCoverage=20%, E-value=6e-38, Identity=59%"; Hit description=RNA binding protein, putative
LMSIGTRFGMNHSSISHITWKFIECLEERATGHLKWPDPEEMATIKAKFEEIQGLPNCCGAMDTTHILMCSSAQPNSNVWLDGENKNSMVLQTVVDPDMRFRDVVCGWPGSLDDSCIL

SEQ ID NO: 84409 - protein, 175 aa, Setaria italica
  Transcript Sequence Number=SeqID_18435
  Subcellular localization annotation: CTP_CleavageSite=55; ConfidenceScore=5.32e-01
GTTFPSPAPALAREIARPSLQIGAQSLTPSLQNRPPPVPRLPIRPSTSRPAAPVRCPAEEDPQRRLAAALRRLAAAVLLPQLHLRRQRHRSPLFSRRNSPADAAPLPAPTQWGSSYSESPPTAGLWPGSRESSGPSHSPHGNQSANPCGQVAGNRKDLVDHIWNKLGRNPNISTV

SEQ ID NO: 84410 - protein, 56 aa, Setaria italica
  Transcript Sequence Number=SeqID_18436
DICSLSNCIRRLVLSMYVLLMFVTKQGYWISFEKTYVLLSHSFLKTGIFIFRCMNC

SEQ ID NO: 84411 - protein, 50 aa, Setaria italica
  Transcript Sequence Number=SeqID_18437
  Gene Ontology: Mol. function=catalytic activity; Biological process =carbohydrate metabolic process
  Homolog annotation: Hit_ID=Q8L9B8; Match level="QueryCoverage=98%, HitCoverage=12%, E-value=2e-17, Identity=79%"; Hit description =Transaldolase ToTAL2
MQLVKWDQLSLAAAMGPAAEELLASGLEGYVNQARRVEELFGKIWPPPNV

SEQ ID NO: 84412 - protein, 396 aa, Setaria italica
  Transcript Sequence Number=SeqID_18438
  Gene Ontology: Mol. function=catalytic activity; Cellular component =cytoplasm; Biological process=carbohydrate metabolic process
  Homolog annotation: Hit_ID=Q8L9B8; Match level="QueryCoverage=94%, HitCoverage=95%, E-value=1e-130, Identity=60%"; Hit description =Transaldolase ToTAL2
  Pfam annotation: Domain name=Transaldolase; Domain location=71-387; Score=153.0; E_value=8.8e-43; Accession=PF00923.11; Description =Transaldolase
  Subcellular localization annotation: CTP_CleavageSite=45; ConfidenceScore=5.74e-01
MALSVSAPTSSSLLPPSRQVGRWSPLARSAKPVPFSLRSSPLAARAAAGNAPTSPVDEIVTELDAVAGFSEIVPDTVVFDDFERFAPTAATASSSLLLGIAGLPNTKFKSAIDTALADGECNALDKLEDRMSCYLTKALANVGAELAHQVPGRVSTEIDARLAYDTQGIIQRVHELLNLYNQHDVLTDRLLFKIPATWQGIEASRLLESDGIQTHLTFVYSFAQAAAAAQAGASVVQIFVGRLRDWARNHSGDPEIDEALKKGEDAGLALAEKVYAYIHRNGYKTKLMAAAIRNRQDVFSLLGIDYIIAPLKILQSLEESVTDPDVKYSYAPRLTPALGKTYNFTEEELVKWDQLSLAAAMGPAAEELLASGLEGYVNQARRVEELFGKIWPPPNV

SEQ ID NO: 84413 - protein, 108 aa, Setaria italica
  Transcript Sequence Number=SeqID_18439
LPRRVVHHILAQALWRVEALEVPLRQGRAAGAVDVTNLVAAIQSALQGCNIFRIAASGKSCAYQKQSSMLEFITVSTKKTEPVCCCTSAANVLQAPLFKNLLTRYYLS

SEQ ID NO: 84414 - protein, 98 aa, Setaria italica
  Transcript Sequence Number=SeqID_18440
QREFLGSMLPMKFVGSLVHPDPTPDVFKHMMLEQTVHWYLPNNSKELRQFSAKDAIIWTPSEYGSTTLIIILGTGKQLILGLKEGKKSLFPSETCIGR

SEQ ID NO: 84415 - protein, 184 aa, Setaria italica
  Transcript Sequence Number=SeqID_18441
  Gene Ontology: Mol. function=nucleotide binding; Cellular component =intracellular; Biological process=small GTPase mediated signal transduction
  Homolog annotation: Hit_ID=Q2R1Y6; Match level="QueryCoverage=100%, HitCoverage=100%, E-value=1e-102, Identity=97%"; Hit description=ADP- ribosylation factor-like protein 5, putative, expressed
  Pfam annotation: Domain name=Arf; Domain location=5-177; Score=308.3; E_value=1.6e-89; Accession=PF00025.13; Description=ADP-ribosylation factor family
  Pfam annotation: Domain name=GTP_EFTU; Domain location=19-176; Score=- 86.4; E_value=0.014; Accession=PF00009.19; Description=Elongation factor Tu GTP binding domain
  Pfam annotation: Domain name=MMR_HSR1; Domain location=18-129; Score =10.6; E_value=0.00011; Accession=PF01926.15; Description=GTPase of unknown function
  Pfam annotation: Domain name=Miro; Domain location=19-129; Score =33.3; E_value=9.9e-07; Accession=PF08477.5; Description=Miro-like protein
  Pfam annotation: Domain name=Ras; Domain location=19-179; Score= -38.4; E_value=2e-06; Accession=PF00071.14; Description=Ras family
  Pfam annotation: Domain name=SRPRB; Domain location=15-177; Score= -40.3; E_value=0.00014; Accession=PF09439.2; Description=Signal recognition particle receptor beta su
  Pfam module annotation: Pfam domain module=Arf::GTP_EFTU::MMR _HSR1::Miro::Ras::SRPRB; Domain location=5-177::19-176::18-129::19 -129::19-179::15-177
MGAWMSRVWFLMFPAREYKLVVVGLDNAGKTTTLYKLHLGEAVTAAPTIGSNVEEVVFKNLRFEVWDLGGQESLRTSWATYYRGTHAVIVVIDSTDRARINIIKDELFRLLQHADLEGAVVLVFANKQDLKDAMSPAEITDALSLHSIKNHDWHIQASCAITGEGLYDGLGWIAQKVAGKATAS

SEQ ID NO: 84416 - protein, 179 aa, Setaria italica
  Transcript Sequence Number=SeqID_18442
  Gene Ontology: Mol. function=actin binding; Cellular component =intracellular
  Homolog annotation: Hit_ID=B3TLN2; Match level="QueryCoverage=77%, HitCoverage=99%, E-value=5e-65, Identity=84%"; Hit description=Actin depolymerizing factor
  Pfam annotation: Domain name=Cofilin_ADF; Domain location=52-179; Score=192.7; E_value=1e-54; Accession=PF00241.12; Description =Cofilintropomyosin-type actin-binding pr
HHRPVPRFLLLRRRPPLPFPGRFPLLLAPPTPGTCLPLRKQANAASGMAVDDDCKRRFLELKAKRTYRFVVFRIDEEQKQVVVEKLGEPNLTYDVFAAILPADECRYCIYDFDFVTEEGCQKSKIFFIAWSPDTAKIRSKMLYASSKDRFKRELDGIQVELQATDPTEMGLDVIRGRAN

SEQ ID NO: 84417 - protein, 58 aa, Setaria italica
  Transcript Sequence Number=SeqID_18443
  Gene Ontology: Mol. function=protoheme IX farnesyltransferase activity; Cellular component=mitochondrial membrane; Biological process=heme biosynthetic process
  Homolog annotation: Hit_ID=B9SG90; Match level="QueryCoverage=55%, HitCoverage=9%, E-value=5e-10, Identity=90%"; Hit description =Protoheme IX farnesyltransferase, putative
MQNLARFVQANGLAAGLAASNLVLYAFVYTPLKQIHPVNTWVGAVVGAIPPLLGYVTC

SEQ ID NO: 84418 - protein, 425 aa, Setaria italica
  Transcript Sequence Number=SeqID_18444
  Gene Ontology: Mol. function=protoheme IX farnesyltransferase activity; Cellular component=mitochondrial membrane; Biological process=heme biosynthetic process
  Homolog annotation: Hit_ID=B6UAI8; Match level="QueryCoverage=100%, HitCoverage=100%, E-value=0.0, Identity=75%"; Hit description =Protoheme IX farnesyltransferase
  Pfam annotation: Domain name=UbiA; Domain location=91-358; Score =207.2; E_value=4.4e-59; Accession=PF01040.10; Description=UbiA prenyltransferase family
  Subcellular localization annotation: CTP_CleavageSite=45; ConfidenceScore=5.05e-01
MWRGGATAAYAARALRSRLLPDPIHHPVASLALIASTRASSSAPSAAAANNVVEEAAAAAAVSVSQQAGSVSDALRHYGRCYWELSKARLSALVVATSGAGYVLGSGNIVDIAGLCCTCAGTMMVAASANTLNQVFEIKNDAKMKRTMRRPLPSGRISPAHAAMWATSVGATGTALLAWKANGLAAGLAASNLVLYAFVYTPLKQIHPVNTWVGAVVGAIPPLLGWAAACTELSLNAMILPAALYYWQIPHFMALAYLCRNDYLAGGYRMFSFADPTGKRTAWVSLRNCLYMLPLGLFAYNWGLTSEWFGVEASLLTMGLTIGALSFVLEPSPKTARRMFYGSLLYLPAFMAGLLLHRLPNKQNAHNLAETSELGGVLYRADLQDNERARQKHEDRKPSRVQSRPPVAYASVAPFPFLPVPIYES

SEQ ID NO: 84419 - protein, 406 aa, Setaria italica
  Transcript Sequence Number=SeqID_18445
  Gene Ontology: Mol. function=nucleotide binding; Biological process =defense response
  Homolog annotation: Hit_ID=Q5Z5Z4; Match level="QueryCoverage=96%, HitCoverage=34%, E-value=3e-89, Identity=50%"; Hit description =Putative Pib
  Pfam annotation: Domain name=LRR_1; Domain location=197-219; Score =15.0; E_value=0.31; Accession=PF00560.25; Description=Leucine Rich Repeat
  Pfam annotation: Domain name=LRR_1; Domain location=221-245; Score =4.0; E_value=51; Accession=PF00560.25; Description=Leucine Rich Repeat
  Pfam module annotation: Pfam domain module=LRR_1::LRR_1; Domain location=197-219::221-245
SDLFSWVDSFFRSCPDSLKPCIFYLSIFPVNHKIRRRRLVRRWIAEGYSRDTKDMTAEEKGEESFEKLCFRNMVQVPGSTSLSYMTRMPLWQVNGFLREYIVSRSMEENLVFELAGHCSVNSQRHAGRHLTIGSTWDRDKSVYESIDFSRLRSLTVFGKWETFFISDKMSILRVLDLEDASSVTDGDLEQMVMLLPRLKFLSLRGCREITRLPDSFGGLRQLQTVDIRHTSIVKLPLCITKIKKLQHIRAGTTVQLDHATSIVESLPPSPEAGSATATGPSLSIPSMRRPPAATPVSRFWFPESWTRRWQLLPGSQNGGVKVPRGIGKMMMVHNISVIDVSGAKGPAILEELKNLTQLRKLGVSGVKPGNCKELCSAISGYAHLESLSLWLDKIKMAVWIPFSHHL

SEQ ID NO: 84420 - protein, 76 aa, Setaria italica
  Transcript Sequence Number=SeqID_18446
KLARSKVRRATTAGLTEGVPCLGYCNCHVHDYSAAVSEAAEQYPGARKIQCKATGKKWTTNPVKQDWISMLQVTRL

SEQ ID NO: 84421 - protein, 289 aa, Setaria italica
  misc_feature (278)..(278): Xaa can be any naturally occurring amino acid
  Transcript Sequence Number=SeqID_18447
  Gene Ontology: Mol. function=transferase activity, transferring glycosyl groups; Biological process=metabolic process
  Homolog annotation: Hit_ID=B6TIY9; Match level="QueryCoverage=93%, HitCoverage=63%, E-value=2e-72, Identity=53%"; Hit description =Cytokinin-N-glucosyltransferase 1
VSIRDGVPPELAESSDVAPFVLTLNRSCAAPFREYLAGARDVVCVVADVDWFAPLGVARELGVKALPLMTSSAAKFRMYLAFPLLEEKGYLPIRESNLDTDVKELPPLLVRDLHHERDATRHRAYADLLTHMVAEARQSSGLILNTLDAIEGTDISNICQDIVVPVFAVGPLHILSPSVDSSLLLQDRSCIEWLDAQPPSSVIYVSFGSLVSIDAHELTEMAWGLAGSKRSFLWVVRPRLVRGCESSELPAELREEVRGRGRIVSWAPQQEVLKHPAXGAFLTHCGWNS

SEQ ID NO: 84422 - protein, 109 aa, Setaria italica
  Transcript Sequence Number=SeqID_18448
  Gene Ontology: Mol. function=protein disulfide oxidoreductase activity; Cellular component=chloroplast; Biological process =glycerol ether metabolic process
  Homolog annotation: Hit_ID=A7LNX7; Match level="QueryCoverage=95%, HitCoverage=55%, E-value=4e-37, Identity=62%"; Hit description =Thioredoxin
  Pfam annotation: Domain name=Thioredoxin; Domain location=5-108; Score=127.9; E_value=3.2e-35; Accession=PF00085.12; Description =Thioredoxin
DDDQLVLDVAESTWDDLVLHCESPVLVEFWAPWCGPCRLMHPVIADVAKAYTGRLRCLKLNTDENQDVATWYGIRSIPTILIFKNGERKETVIGAVKDTTLAMTVERFL

SEQ ID NO: 84423 - protein, 175 aa, Setaria italica
  Transcript Sequence Number=SeqID_18449
AFLNGRERVSRSRKVDSTILSTDNISSALVDVCEECESLLVEAGRSYRTALSIDSGDVKALYNWGLALIFRAQLLADIGPEAAVDADQVYLAAIDKFDAMLSRSNTYAPEALYRWGTALQQRSHLRPRNNREKIRLLEQAKSLFEDVLYVEADNKMVREALSSCISELNYHGRWL

SEQ ID NO: 84424 - protein, 111 aa, Setaria italica
  Transcript Sequence Number=SeqID_18450
  Gene Ontology: Mol. function=transporter activity; Cellular component= integral to membrane; Biological process=transport
  Homolog annotation: Hit_ID=B6U4R9; Match level="QueryCoverage=94%, HitCoverage=21%, E-value=4e-28, Identity=58%"; Hit description =Synaptic vesicle 2-related protein
MFLHLVLEFVPARNRGTCMIVLSLFWTLGTILEASLAWVVLPVLNWRWLLAFTALPCFLLLPFFGLTPESPRYLCVQNRMSDATAVLERMASSNQSILPPGVLTYHRETKS

SEQ ID NO: 84425 - protein, 174 aa, Setaria italica
  Transcript Sequence Number=SeqID_18451
  Gene Ontology: Mol. function=transporter activity; Cellular component= integral to membrane; Biological process=transport
  Homolog annotation: Hit_ID=B6SW90; Match level="QueryCoverage=100%, HitCoverage=51%, E-value=2e-67, Identity=74%"; Hit description =Synaptic vesicle 2-related protein
  Pfam annotation: Domain name=DUF1228; Domain location=36-101; Score= -24.6; E_value=0.064; Accession=PF06779.6; Description=Protein of unknown function (DUF1228)
LTMMGFGRFQALVLVYAGIGWVAESMELMLLSFLGPFIREEWNLSPENESMISSVVFAGMLLGACSWGFVSDKYGRRTGLLFSTIFTSGMGFLSALSPNYLCLVALRFLVGVGVGGSHVFTSWFLEFVPARNRGTCMIVLSLFWTLGTILEASLAWVVLPVLNWRWLLAFTALP

SEQ ID NO: 84426 - protein, 353 aa, Setaria italica
  misc_feature (249)..(249): Xaa can be any naturally occurring amino acid
  Transcript Sequence Number=SeqID_18452
  Gene Ontology: Mol. function=transporter activity; Cellular component= integral to membrane; Biological process=transport
  Homolog annotation: Hit_ID=B6U4R9; Match level="QueryCoverage=87%, HitCoverage=64%, E-value=1e-124, Identity=73%"; Hit description =Synaptic vesicle 2-related protein
  Pfam annotation: Domain name=Sugar_tr; Domain location=2-346; Score= -169.9; E_value=0.027; Accession=PF00083.16; Description=Sugar (and other) transporter
  Subcellular localization annotation: CTP_CleavageSite=82; ConfidenceScore=5.38e-01
NLHFPYFRTGLLFSTIFTSGMGFLSALSPNYLCLVALRFLVGVGVGGSHVFTSWFLEFVPARNRGTCMIVLSLFWTLGTILEASLAWVVLPVLNWRWLLAFTALPCFLLLPFFRITPESPRYLCAQNRMSDATAVLERMANANQAALPLGVLTYHGEPKTDCVTHNISEDEHLIPIREKKHTVVNAICSNTGAIATLRTLLSHNLLRSTLLLWFVYYASSFAYYGIALLTSQLSDVNRSCSSDLIFEMXQKDGNLYKDTFITSLAEIPGLILSAILVDWFGRKASMWSMMFACCAFLGPLVLHENELLTTILLFGARACAMGSFTILCLYAPEVCISFLWHIALFAIPLLINL

SEQ ID NO: 84427 - protein, 408 aa, Setaria italica
  Transcript Sequence Number=SeqID_18453
  Gene Ontology: Mol. function=transporter activity; Cellular component= integral to membrane; Biological process=transport
  Homolog annotation: Hit_ID=B6U4R9; Match level="QueryCoverage=92%, HitCoverage=78%, E-value=1e-138, Identity=64%"; Hit description =Synaptic vesicle 2-related protein
  Pfam annotation: Domain name=MFS_1; Domain location=1-365; Score= -16.6; E_value=0.098; Accession=PF07690.8; Description=Major Facilitator Superfamily
  Pfam annotation: Domain name=Sugar_tr; Domain location=2-407; Score= -58.3; E_value=1.2e-06; Accession=PF00083.16; Description=Sugar (and other) transporter
  Pfam module annotation: Pfam domain module=MFS_1::Sugar_tr; Domain location=1-365::2-407
  Subcellular localization annotation: CTP_CleavageSite=88; ConfidenceScore=5.37e-01
FTRITVKLTFPYFRTGLLFSTIFTSGMGFLSALSPNYLCLVALRFLVGVGVGGSHVFTSWFLEFVPARNRGTCMIVLSLFWTLGTILEASLAWVVLPVLNWRWLLAFTALPCFLLLPFFGLTPESPRYLCVQNRMSDATAVLERMASSNQSILPPGVLTYHRETKVDHNSLASESECLLPVKEKDCTVDDAMSSESGSLAALRTLLSRNLLRSTLLLWFVFYANSFAYYGIVLLTSELSDANKSCATGVIFGLHQKKDTNIYKDTFITSLAEIPGLILSAILVDWFGRKASMWSMMFACCAFLGPLVLHENELLTTILLFGARACAMGSFTILCLYAPEVYPSYVRSTGAGIATAIGRVGGVVCPLVAVAMLRSCHQMEAIVVFEVVLCLAAVGCIFFPVETKGRGMD

SEQ ID NO: 84428 - protein, 188 aa, Setaria italica
  misc_feature (23)..(23): Xaa can be any naturally occurring amino acid
  Transcript Sequence Number=SeqID_18454
  Gene Ontology: Mol. function=nucleotide binding; Biological process =defense response
  Homolog annotation: Hit_ID=Q2QZQ7; Match level="QueryCoverage=99%, HitCoverage=17%, E-value=1e-60, Identity=64%"; Hit description=NB -ARC domain containing protein
  Pfam annotation: Domain name=LRR_1; Domain location=119-140; Score =6.9; E_value=15; Accession=PF00560.25; Description=Leucine Rich Repeat
  Pfam annotation: Domain name=LRR_1; Domain location=49-70; Score=2.0; E_value=1.3e+02; Accession=PF00560.25; Description=Leucine Rich Repeat
  Pfam annotation: Domain name=LRR_1; Domain location=72-93; Score =13.3; E_value=0.88; Accession=PF00560.25; Description=Leucine Rich Repeat
  Pfam annotation: Domain name=LRR_1; Domain location=95-117; Score =6.4; E_value=18; Accession=PF00560.25; Description=Leucine Rich Repeat
  Pfam module annotation: Pfam domain module=LRR_1::LRR_1::LRR_1::LRR _1; Domain location=119-140::49-70::72-93::95-117
FRRISVVTMKDMVVLPSIDKEQXYKVRTWRTSYEKSLRVGNKIFRKLQCIRVLDLTDSVIQGMPDCIGRLIHLRLLDLDGTDISSLPESICCLINLQILNLQRCVALYSLPLGITRLCNLRCLGLAGSPINQVPKGIAKLKFLNDLEGFPIGGGSDNSARTQDGWNLDELGPLSQLRNLRIIKLERAS

SEQ ID NO: 84429 - protein, 196 aa, Setaria italica
  Transcript Sequence Number=SeqID_18455
  Gene Ontology: Mol. function=transporter activity; Cellular component= membrane; Biological process=oligopeptide transport
  Homolog annotation: Hit_ID=B6SWJ7; Match level="QueryCoverage=85%, HitCoverage=28%, E-value=1e-73, Identity=82%"; Hit description =Peptide transporter PTR2
  Subcellular localization annotation: CTP_CleavageSite=52; ConfidenceScore=5.37e-01
AGSFSVFLFISILLFTSLNERVLVPLAARATGRPQGLTSLQRVGTGLVLSVAAMVVSALVEKKRRDASVGDGHVAISAFWLVPQFFLVGAGEAFAYVGQLEFFIREAPERMKSMSTGLFLVTLSMGFFLSSFLVFAVDAATRGTWIRNNLDRGKLDRFYWMLAVLGVANFAVFLVFARRHQYKPSAVPAAVAPAAG

SEQ ID NO: 84430 - protein, 458 aa, Setaria italica
  Transcript Sequence Number=SeqID_18456
  Gene Ontology: Cellular component=integral to membrane
  Homolog annotation: Hit_ID=Q5ZAW6; Match level="QueryCoverage=91%, HitCoverage=91%, E-value=1e-146, Identity=67%"; Hit description =Membrane protein-like
  Pfam annotation: Domain name=DUF81; Domain location=69-431; Score =60.7; E_value=5.6e-15; Accession=PF01925.11; Description=Domain of unknown function DUF81
  Subcellular localization annotation: CTP_CleavageSite=63; ConfidenceScore=5.22e-01
MTRTTELAPLLAAAIAVSFLSAAAASNTTTSSHPGRLQGLLAEVSRWRERHLAEPSSPSGGVRPNTVAAWVLSFFAASVSSAGGVGGGSLFLPILNLVAGLSLKRATAYSSFMVTGGAASNVLYNLACAGGGGRRLIDYDVALLFQPCLLLGVSIGVVCNVMFPEWLITVLFSLFLAFCTVKTCRAGLKIWRSETRAGDARCAAHLSITEPLLLASDGQDGGRGNVAGFPWKDVALLVVVWLCFFALHVLIGDKHGKGVIRIKPCGVTYWLITSSQLPAAVAFTGYIIYAKRKKRVVCSQEDGKAELVGATATMETLPSLTLPLAALVTGALSGLFGIGGGLLLNPVLLQIGINPQTAAATSSFMVLFCASMSMVQFILLGMEGIGQASVYAGICFVASVVGLVVIERAIRKSGRVSLIVFLVTAIMALSTVIVTCFGAQDVLMQYTSGAYMGFKLPC

SEQ ID NO: 84431 - protein, 109 aa, Setaria italica
  Transcript Sequence Number=SeqID_18457
  Gene Ontology: Mol. function=protein tyrosine/serine/threonine phosphatase activity; Cellular component=chloroplast; Biological process=protein amino acid dephosphorylation
  Homolog annotation: Hit_ID=Q3S4H5; Match level="QueryCoverage=100%, HitCoverage=38%, E-value=2e-52, Identity=86%"; Hit description=Dual -specificity protein-like phosphatase 3
KGARKMEDYNIAMKRMMRNPYEYHHDLGMNYAVISDSLIVGSQPQTPEDIDHLKNEENVAYILCLQQDKDIEFWGIDFPAILSRCKELGIKHIRRPAVDFDPDSLRSQL

SEQ ID NO: 84432 - protein, 166 aa, Setaria italica
  Transcript Sequence Number=SeqID_18458
  Gene Ontology: Mol. function=protein tyrosine/serine/threonine phosphatase activity; Cellular component=chloroplast; Biological process=protein amino acid dephosphorylation
  Homolog annotation: Hit_ID=Q3S4H5; Match level="QueryCoverage=97%, HitCoverage=57%, E-value=9e-79, Identity=85%"; Hit description=Dual -specificity protein-like phosphatase 3
  Pfam annotation: Domain name=DSPc; Domain location=7-126; Score=21.2; E_value=4.1e-06; Accession=PF00782.12; Description=Dual specificity phosphatase, catalytic domain
VGPYYFFCFTSLGPKDIEYWGIDFLAILSRCKELGIKHIRRPAVDFDPDSLRSQLPKAVSALEWAISQRKGRIYVHCTAGLGRAPAVAIAYMFWFENVDLNTAYKKLTSIRPCGPNKRAIRAATYDLAKNDPLKEPFETLPEHAFEGIADWERKLIRDQVRALREA

SEQ ID NO: 84433 - protein, 84 aa, Setaria italica
  misc_feature (80)..(80): Xaa can be any naturally occurring amino acid
  Transcript Sequence Number=SeqID_18459
  Gene Ontology: Mol. function=metal ion binding; Cellular component =vacuole
  Homolog annotation: Hit_ID=Q8W5R2; Match level="QueryCoverage=98%, HitCoverage=8%, E-value=6e-27, Identity=66%"; Hit description=Shoot gravitropism 2
IRRLEDAIKHCAARHKYLARTNSPSDGQEVRWYFCKLPLADKVLSSSVPRTEIVGKGDYFRFSERDSLALEASFLEREEXLLAY

SEQ ID NO: 84434 - protein, 295 aa, Setaria italica
  misc_feature (18)..(18): Xaa can be any naturally occurring amino acid
  Transcript Sequence Number=SeqID_18460
  Gene Ontology: Mol. function=protein kinase activity; Cellular component=integral to membrane; Biological process=protein amino acid phosphorylation
  Homolog annotation: Hit_ID=B9RBW0; Match level="QueryCoverage=99%, HitCoverage=32%, E-value=1e-117, Identity=69%"; Hit description =Leucine-rich repeat transmembrane protein kinase, putative
  Pfam annotation: Domain name=Pkinase; Domain location=6-288; Score =52.2; E_value=2e-12; Accession=PF00069.17; Description=Protein kinase domain
  Pfam annotation: Domain name=Pkinase_Tyr; Domain location=6-288; Score=30.3; E_value=9.7e-16; Accession=PF07714.9; Description =Protein tyrosine kinase
  Pfam module annotation: Pfam domain module=Pkinase::Pkinase_Tyr; Domain location=6-288::6-288
GTKALLDKDCLIGGGSIXTVYKASFENGLSIAVKKLETLGRVRGQDEFEHEMSQLGNLSHPNLVAFQGYYWSSTMQLLLSEFMANGSLYDHLHGNRPYAFSESSSRGGGGELFWERRFNIALGAARALSYLHHDCRPQILHLNIKSSNIMLDGKYEAKLADYGLGKLLPILGSIELSRIHTAIGYIAPELASPSLRYSDKSDVFSFGVVLLEIVTGRKPVDSPGVATAVVLRDYVREILEDGTTSDCFDRSLRGFVEAEFVQVLKLGLVCTSNTPSSRPSMAEVVQYLESIRTSS

SEQ ID NO: 84435 - protein, 96 aa, Setaria italica
  Transcript Sequence Number=SeqID_18461
  Subcellular localization annotation: CTP_CleavageSite=39; ConfidenceScore=5.23e-01
TDAATLPIAAAALLIPAAAGGRLLHQLLCTFSSHGKTVRATSSSSSKQGFRYWVPQEEEEEKKGSTEGFAGEGEEEENRGAQEVSFVISFRMICCR

SEQ ID NO: 84436 - protein, 120 aa, Setaria italica
  Transcript Sequence Number=SeqID_18462
  Pfam annotation: Domain name=DUF581; Domain location=28-85; Score =33.8; E_value=6.8e-07; Accession=PF04570.6; Description=Protein of unknown function (DUF581)
TILEPCTVRVSGGESMNAMEVKEGAESYWLVKCFDDGEAGEEILSSCVSCKKKLDGNDSCIYRGEKAFCSGNCRDNEILTEENSIAISSLSSASSSSSFNDDIFMAEMVVLTAPVDAYLP

SEQ ID NO: 84437 - protein, 208 aa, Setaria italica
  Transcript Sequence Number=SeqID_18463
  Homolog annotation: Hit_ID=Q8LGS1; Match level="QueryCoverage=53%, HitCoverage=36%, E-value=9e-14, Identity=37%"; Hit description =Senescence-associated protein SAG102
  Pfam annotation: Domain name=DUF581; Domain location=116-173; Score =33.8; E_value=6.8e-07; Accession=PF04570.6; Description=Protein of unknown function (DUF581)
GKPVLCSRSYGDVKSGPEVTVPGGAQPGASSHPADLGKLRASGSLPASIGGPRRYIGSVSATEVEQSEDYTCIIAHGPNPKTTRIYGDCILEPCTVRVSGGESMNAMEVKEGAESYWLVKCFDDGEAGEEILSSCVSCKKKLDGNDSCIYRGEKAFCSGNCRDNEILTEENSIAISSLSSASSSSSFNDDIFMAEMVVLTAPVDAYLP

SEQ ID NO: 84438 - protein, 111 aa, Setaria italica
  Transcript Sequence Number=SeqID_18464
TRSRRRSSGWMADIGKQVTAWSLGGVMVIFGRFIGDSDQNHDKAAANKTCMFLLTSAFASGLGLMFLMNFGSGGRPARVVINAATNILACSALGMIAAAALAIYGVVVMKS

SEQ ID NO: 84439 - protein, 194 aa, Setaria italica
  Transcript Sequence Number=SeqID_18465
  Gene Ontology: Mol. function=protein dimerization activity; Cellular component=nucleus; Biological process=regulation of transcription, DNA-dependent
  Homolog annotation: Hit_ID=B9SGM7; Match level="QueryCoverage=82%, HitCoverage=55%, E-value=3e-50, Identity=62%"; Hit description =Transcription factor RF2a, putative
  Pfam annotation: Domain name=bZIP_1; Domain location=55-118; Score =32.5; E_value=1.7e-06; Accession=PF00170.13; Description=bZIP transcription factor
  Pfam annotation: Domain name=bZIP_2; Domain location=55-109; Score =37.9; E_value=4e-08; Accession=PF07716.7; Description=Basic region leucine zipper
  Pfam module annotation: Pfam domain module=bZIP_1::bZIP_2; Domain location=55-118::55-109
QQQAAPAPAPVASSSSPSDHNSINDEKTDRGETEEAQSKCHGDDAAPGQPASAAAVDPKRVKRILANRQSAQRSRVRKLQYISELERSVTSLQTEVSALSPRVAFLDHQRSLLTLGNSHLKQRIAALAQDKIFKDAHQEALKKEIERLRQIYHQQSLKKAESPPAPDAAPIRSDKDLIASEGTAAPAPPQRQHH

SEQ ID NO: 84440 - protein, 80 aa, Setaria italica
  Transcript Sequence Number=SeqID_18466
MDYNPYGGASPDPYGGGGTIRLVCDNCSIADDYSADDAEDGQYTCRTCSAVHATQATAADPHDFPVTGSISVRRVATQPT

SEQ ID NO: 84441 - protein, 162 aa, Setaria italica
  Transcript Sequence Number=SeqID_18467
  Gene Ontology: Mol. function=molecular_function; Cellular component =integral to membrane
  Homolog annotation: Hit_ID=Q94AA1; Match level="QueryCoverage=96%, HitCoverage=33%, E-value=2e-45, Identity=60%"; Hit description=UNC93- like protein
  Pfam annotation: Domain name=DUF895; Domain location=3-134; Score= -5.9; E_value=2.4e-07; Accession=PF05978.8; Description=Eukaryotic protein of unknown function (DUF895)
  Subcellular localization annotation: CTP_CleavageSite=22; ConfidenceScore=5.35e-01
EGGLGTVSMGILYTSFTLFSVAASPVVTRVGPKRALVVGSSGYVLFILANLVPKWYTMVPASLYLGFTASIIWVGQGTYLTSAALSHARENNLPEGPTLGSFNGEFWGMFASTQVIGNLISLALLRNGKDGGSVTGKNLLFAVFLGCMIVGIVLMCLLSEKR

SEQ ID NO: 84442 - protein, 85 aa, Setaria italica
  Transcript Sequence Number=SeqID_18468
  Gene Ontology: Mol. function=nucleobase transmembrane transporter activity; Cellular component=membrane; Biological process=nucleobase, nucleoside, nucleotide and nucleic acid transport
  Homolog annotation: Hit_ID=Q9LZD0; Match level="QueryCoverage=97%, HitCoverage=13%, E-value=1e-29, Identity=69%"; Hit description =Uracil transporter-like protein
PPRLTGAEFRKVFFPSLTANISFWATVAINIPDFARYARSQADQVLGQAGLPVFMGMFTFAGLAITSATEAIFGHVVSDPIELLG

SEQ ID NO: 84443 - protein, 70 aa, Setaria italica
  misc_feature (69)..(69): Xaa can be any naturally occurring amino acid
  Transcript Sequence Number=SeqID_18469
  Gene Ontology: Biological process=DNA repair
  Homolog annotation: Hit_ID=B6TI43; Match level="QueryCoverage=100%, HitCoverage=15%, E-value=7e-31, Identity=92%"; Hit description=Auxin response factor 75
MELSMSGSSLRTFGRCVTFLARVASELVLQAHPAKLELHTLNSSRSAYGSVSLARDFFDHYHLDAAASXP

SEQ ID NO: 84444 - protein, 400 aa, Setaria italica
  misc_feature (14)..(14): Xaa can be any naturally occurring amino acid
  misc_feature (38)..(38): Xaa can be any naturally occurring amino acid
  misc_feature (55)..(55): Xaa can be any naturally occurring amino acid
  Transcript Sequence Number=SeqID_18470
  Gene Ontology: Cellular component=integral to membrane
  Homolog annotation: Hit_ID=B9SDP5; Match level="QueryCoverage=84%, HitCoverage=80%, E-value=1e-102, Identity=56%"; Hit description =Amino acid transporter, putative
  Pfam annotation: Domain name=Aa_trans; Domain location=1-398; Score =228.1; E_value=2.2e-65; Accession=PF01490.10; Description =Transmembrane amino acid transporter protein
  Subcellular localization annotation: CTP_CleavageSite=39; ConfidenceScore=5.61e-01
RTSAQTLGNVVVSXSWAPACSASPTPSAPPAGSRAPSXVAAAGFATLYCMLLLVXVDCRDKLEEDETEECYHGHYTYGDLGERCFGTVGRCLTEILILVSQAGGSVAYLIFIGQNLHSIFSQQMSPAGFIFAILLPVQIALSFIRSLSSLSPFSIFADVCNVLAMAIVIKEDLQLFDHPFANRSAFNGLWAVPFTFGVAVFCFEGFSMTLALEASMAERRKFRGVLSQAVAAIITVYVCFGVCGYLAYGDATKDIITLNLPNNWSSVAVKVGLCVALALTFPVMMHPIHEIVETRFRSSGCFQKLSRNVRGAEWLGLHSSRILVVAILTVVASFIPAFGSFISFIGSTMCALLSFVLPALFHLSIVGSSMSLWRRVLDYVILLFGLAFAGYGLVTALSPH

SEQ ID NO: 84445 - protein, 311 aa, Setaria italica
  Transcript Sequence Number=SeqID_18471
  Gene Ontology: Mol. function=electron carrier activity; Biological process=oxidation reduction
  Homolog annotation: Hit_ID=Q8L9A1; Match level="QueryCoverage=98%, HitCoverage=58%, E-value=1e-100, Identity=58%"; Hit description =Cytochrom P450-like protein
  Pfam annotation: Domain name=p450; Domain location=1-306; Score=0.7; E_value=1.1e-11; Accession=PF00067.14; Description=Cytochrome P450
VRIDAVMKRVLLAVGVRMDDYLPFLRPFFWRHQRRALAVRAEQVVTLLPLINRRRAILREMQGSSPPPDPSVAAPFSYLDSLLDLRVEGRDGAPSDDELVTLCAELINGGTDTTATAIEWGMARIVDNPSIQARLHEEIARQVGDARPVDEKDTDAMPYLQAFVKELLRKHPPTYFSLTHAAVRPGSKLAGYDVPADANLDIFLPTISEDPKLWERPAEFDPERFLSGGEAADMTGSAGIRMIPFGAGRRICPGLAMGTTHIALMVARMVQAFEWRAHPSQPPPDFKDKVEFTVVMDRPLLAAVKPRSLAF

SEQ ID NO: 84446 - protein, 96 aa, Setaria italica
  misc_feature (6)..(6): Xaa can be any naturally occurring amino acid
  Transcript Sequence Number=SeqID_18472
EVFHCXRGTWEILPGMWQLDVPPNQIVAVADRLFSSGDCLNSWKGHVEVYDGELNIWSIWDHSALPDLSLLASLPSSAQRLYLTMAAVGTQLYFLA

SEQ ID NO: 84447 - protein, 144 aa, Setaria italica
  Transcript Sequence Number=SeqID_18473
  Gene Ontology: Mol. function=protein kinase activity; Cellular component=chloroplast; Biological process=protein amino acid phosphorylation
  Homolog annotation: Hit_ID=B6U7F0; Match level="QueryCoverage=99%, HitCoverage=23%, E-value=8e-57, Identity=75%"; Hit description =Protein kinase domain containing protein
DKRKRAGELATGRISHIHPNGCLVVKFPGKFSLGEVCSCLADPSEVEVVSFDKCEGIVKKYEHLEDFHWAVRPLFIAIGFFTALKLGVIVGKSIARPRSRKVASISDQNDDYPQQQVVQNNANAAWLPPPVANMFFIDGAASSG

SEQ ID NO: 84448 - protein, 557 aa, Setaria italica
  Transcript Sequence Number=SeqID_18474
  Gene Ontology: Mol. function=protein kinase activity; Cellular component=chloroplast; Biological process=protein amino acid phosphorylation
  Homolog annotation: Hit_ID=B6U7F0; Match level="QueryCoverage=100%, HitCoverage=88%, E-value=0.0, Identity=85%"; Hit description=Protein kinase domain containing protein
  Pfam annotation: Domain name=Pkinase; Domain location=2-237; Score =53.1; E_value=1.1e-12; Accession=PF00069.17; Description=Protein kinase domain
  Pfam annotation: Domain name=Pkinase_Tyr; Domain location=1-237; Score=-60.7; E_value=1.1e-09; Accession=PF07714.9; Description =Protein tyrosine kinase
  Pfam module annotation: Pfam domain module=Pkinase::Pkinase_Tyr; Domain location=2-237::1-237
RYHEVAVKMLHPIKEDQLQLFSARFDEIFSKCQGLSNICFLHGISTQNGRICIAMKFYEGSVGDKMARLKGGRLPLPDVLRYGTDLARGILDLHNRGILILNLKPCNFLIDEHDRAVLGDFGIPSLLFGLSLPHPDLIQRLGTPNYMAPEQWQPNIRGPISYETDSWGFACSILEMLSGIQPWRGKSPDEIYQLVVLKKEKPIFPYSLPPDIENVLSGCFEYDFRNRPSMKDILHAFESAKDADHDNIGWDNSENVSVDRPTMTNHTNWLLFKDKLQVGDKIRSRKLKNSCSPETMEIPDGTIVGMEDDGERDGYILVRVHGLHDPLRVRCSSVERVTYGFAAGDWVRLREEDNKRSQVGILHSIDRDGTVAVGLIGMDTLWKGNYSDLQMAEAYCVGQFVRLKANISSPRFEWQRKRAGELATGRISHIHPNGCLVVKFPGKFSLGEVCSCLADPSEVEVVSFDKCEGIVKKYEHLEDFHWAVRPLFIAIGFFTALKLGVIVGKSIARPRSRKVASISDQNDDYPQQQVVQNNANAAWLPPPVANMFFIDGAASSG

SEQ ID NO: 84449 - protein, 77 aa, Setaria italica
  Transcript Sequence Number=SeqID_18475
  Gene Ontology: Mol. function=voltage-gated potassium channel activity; Cellular component=voltage-gated potassium channel complex; Biological process=potassium ion transport
GEWWAPLVGWSGKADYLEAPAPVVAVAQDGAAAARRQFVGGLTEEKARELRARMAQTESFHDAMYHSAIASRLARSA

SEQ ID NO: 84450 - protein, 89 aa, Setaria italica
  Transcript Sequence Number=SeqID_18476
  Gene Ontology: Mol. function=voltage-gated potassium channel activity; Cellular component=voltage-gated potassium channel complex; Biological process=potassium ion transport
WPAPRRVAGRAVGKWWAPLLGWSGKADYIEAPAPAAKEAASAATPGRAFVGGLTEEKARELRARMAQTESFHDAMYHSAIASRLARSSA

SEQ ID NO: 84451 - protein, 48 aa, Setaria italica
  Transcript Sequence Number=SeqID_18477
THSCCFRIPLLIVFFWFCFFFWGFFHVFLHRYILRLDKLSRTKRSDTI

SEQ ID NO: 84452 - protein, 169 aa, Setaria italica
  Transcript Sequence Number=SeqID_18478
  Subcellular localization annotation: CTP_CleavageSite=6; ConfidenceScore=5.48e-01
WLWPVGSAARVSTHELSSAGLTSSSFPDFPSGFREPDTVTFYTGGGGGAGGRRTRPRRVRNRRRSRGESRVDREYDMVIVPSDGGGCLSGSDSDDSDWSIGWLEPQAPELQTDGDPENCFAVLVPCYRHGRQEQPGRREGRFLGAGALADGGLSDEKNFVEQWLSSLQN

SEQ ID NO: 84453 - protein, 153 aa, Setaria italica
  Transcript Sequence Number=SeqID_18479
  Gene Ontology: Mol. function=transferase activity, transferring glycosyl groups; Biological process=metabolic process
  Homolog annotation: Hit_ID=B6TR02; Match level="QueryCoverage=100%, HitCoverage=32%, E-value=3e-51, Identity=63%"; Hit description =Indole-3-acetate beta-glucosyltransferase
EGLCNCGKPFLWVVRASETAKIPENFAEKAKERGLVVTWSPQLEVLAHPAVGCFVTHCGWNSTTEALSAGVPMVAMPQWSDQPTNAKYIEDVWRVGVRVRPDEEGVVRKEEVERCVREVMDGERSMEYQQNATGWKEKAKRAVSEGGSSDNNI

SEQ ID NO: 84454 - protein, 99 aa, Setaria italica
  misc_feature (52)..(52): Xaa can be any naturally occurring amino acid
  misc_feature (83)..(83): Xaa can be any naturally occurring amino acid
  Transcript Sequence Number=SeqID_18480
  Gene Ontology: Mol. function=zinc ion binding; Cellular component =nucleus; Biological process=oxidation reduction
  Homolog annotation: Hit_ID=Q6RYE2; Match level="QueryCoverage=100%, HitCoverage=13%, E-value=5e-47, Identity=87%"; Hit description =Putative transposase
GQAGSMLKYFQDKITENPSFQYVLQMDCEEQIANIFWVDAKMIMDYAHFGDXVVSFDTTFGTDKENKPFGVFVGFNHFRETVXFGAALMYDETFESFKW

SEQ ID NO: 84455 - protein, 110 aa, Setaria italica
  Transcript Sequence Number=SeqID_18481
  Gene Ontology: Mol. function=metal ion binding; Cellular component =integral to membrane; Biological process=multicellular organismal development
  Homolog annotation: Hit_ID=B6TJT8; Match level="QueryCoverage=73%, HitCoverage=18%, E-value=1e-30, Identity=75%"; Hit description =Palmitoyltransferase ZDHHC9
ILADLYFFYLSIVQRNYRYFFLFVSSSSLLCIYVFAISALYIKFLMDGDYPTVWKALKHSPASLALMIYCFIALWFVGGLTGFHTYLISTNQCKVCLGESTSHPLDNLRP

SEQ ID NO: 84456 - protein, 76 aa, Setaria italica
  Transcript Sequence Number=SeqID_18482
MQGDPGYGYGGYGYGYGYGYGAGAGGYDYDVAGYGGGGAYYTANDRYPAAPAAYGNPLSGRRQHDFPAPLTGLEFQ

SEQ ID NO: 84457 - protein, 245 aa, Setaria italica
  misc_feature (22)..(22): Xaa can be any naturally occurring amino acid
  misc_feature (55)..(55): Xaa can be any naturally occurring amino acid
  Transcript Sequence Number=SeqID_18483
  Gene Ontology: Mol. function=transcription regulator activity; Cellular component=nucleus; Biological process=regulation of transcription
  Homolog annotation: Hit_ID=B6TAV6; Match level="QueryCoverage=100%, HitCoverage=88%, E-value=3e-91, Identity=70%"; Hit description=BHLH transcription factor GBOF-1
  Pfam annotation: Domain name=HLH; Domain location=83-133; Score=34.7; E_value=3.7e-07; Accession=PF00010.18; Description=Helix-loop-helix DNA-binding domain
DSSSLETSSGVLDTPPRGTAFXEDKKIRKTREDCASLSSAQSKDSNSKESTKRGXKRERSSKEVDEEEEPKGYIHVRARRGQATDSHSLAERVRRERISERMRMLQALVPGCDKVTGKALILDEIINYVQSLQNQVEFLSMRIASLSPVLYGFGMDSDAFSDHTQKMEGMLHHEALAMPTSVMNRAPSQAIMDTNTSNSSPSYELHGDGSANITFPQDSGSYMVQEPRQELFNQVAFSNHMCSFQ

SEQ ID NO: 84458 - protein, 117 aa, Setaria italica
  Transcript Sequence Number=SeqID_18484
  Gene Ontology: Mol. function=methyltransferase activity; Cellular component=nucleus; Biological process=protein amino acid methylation
  Homolog annotation: Hit_ID=B6TIG8; Match level="QueryCoverage=88%, HitCoverage=27%, E-value=8e-55, Identity=95%"; Hit description =Protein arginine N-methyltransferase 1
KEQAMMEPLVDTVDANQIVTNCQLLKTMDISKMTPGDASFTVPFKLTAERNDYIHALVAYFNVSFTKCHKLMGFSTGPRSKATHWKQTVLYLEDVITICEGETLGHLSFAHFGHRIL

SEQ ID NO: 84459 - protein, 384 aa, Setaria italica
  Transcript Sequence Number=SeqID_18485
  Gene Ontology: Mol. function=methyltransferase activity; Cellular component=nucleus; Biological process=cell surface receptor linked signal transduction
  Homolog annotation: Hit_ID=B6TIG8; Match level="QueryCoverage=100%, HitCoverage=99%, E-value=0.0, Identity=86%"; Hit description=Protein arginine N-methyltransferase 1
  Pfam annotation: Domain name=Methyltransf_11; Domain location=106 -206; Score=8.1; E_value=0.016; Accession=PF08241.4; Description =Methyltransferase domain
  Pfam annotation: Domain name=Methyltransf_12; Domain location=106 -204; Score=22.4; E_value=0.0018; Accession=PF08242.4; Description =Methyltransferase domain
  Pfam annotation: Domain name=PrmA; Domain location=10-214; Score= -162.2; E_value=0.072; Accession=PF06325.5; Description=Ribosomal protein L11 methyltransferase (PrmA)
  Pfam module annotation: Pfam domain module=Methyltransf _11::Methyltransf_12::PrmA; Domain location=106-206::106-204::10-214
DRRKGGDRDANGGLAEATASRLRFDSDEEAEGVEMEVEESPEAAEGEEQQAEEEVIGSDKTSADYYFDSYSHFGIHEEMLKDIVRTKTYQNVITQSSFLIKDKIVLDVGAGTGILSLFCAKAGAKHVYAIECSQMADMAKEIVKTNGYSDVITVIKGKVEEIELPVPKVDVIISEWMGYFLLFENMLNTVLYARDKWLADDGVVLPDKASLHLTAIEDAEYKEDKIEFWNNVYGFDMSCIKKQAMMEPLVDTVDANQIVTNCQLLKTMDISKMTPGDASFTVPFKLTAERNDYIHALVAYFNVSFTKCHKLMGFSTGPRSKATHWKQTVLYLEDVITICEGETLTGSMTVTPNKKNPRDIDIKLKYMLNGHRCQVSRTQFYKMR

SEQ ID NO: 84460 - protein, 110 aa, Setaria italica
  Transcript Sequence Number=SeqID_18486
  Gene Ontology: Cellular component=integral to membrane
  Homolog annotation: Hit_ID=B9RIQ3; Match level="QueryCoverage=98%, HitCoverage=17%, E-value=2e-34, Identity=64%"; Hit description =Tellurite resistance protein tehA, putative
  Subcellular localization annotation: CTP_CleavageSite=76; ConfidenceScore=5.20e-01
FDAGARIGFFIALFLYMSLAVRINFFRGFRFSLAWWAYTFPMTGASVATITYATEVTNVLTRTLSIGLSGIATVTVAGLLVTTVFHAFVLRDLFPNDVSIAITRKKPKFS

SEQ ID NO: 84461 - protein, 287 aa, Setaria italica
  Transcript Sequence Number=SeqID_18487
  Gene Ontology: Cellular component=integral to membrane
  Homolog annotation: Hit_ID=B6SWN8; Match level="QueryCoverage=99%, HitCoverage=45%, E-value=1e-126, Identity=77%"; Hit description=C4 -dicarboxylate transporter/malic acid transport protein
  Pfam annotation: Domain name=C4dic_mal_tran; Domain location=1-201; Score=112.2; E_value=1.7e-30; Accession=PF03595.9; Description=C4 -dicarboxylate transportermalic acid transport protein
VRREFYHPIRANFFFAPWVACLFLVLGAPRLVAEMHHGVWYGLMAPIFCLELKIYGQWMSGGQRRLSKVANPSNHLSIVGNFVGALLGAKMGLREGPTFFFAVGLAHYMVLFVTLYQRLPTNVTLPKELHPVFFLFVAAPSVASMAWARISGEFDYGARIAYFISLFLYMSLVVRINFFSGFRFSLAWWAYTFPMTSAAIATTRYSTEVDNTFTKALCVALSAIAMLTVTALFATTLVQAFVLRNLFPNDISIAITERKMKPIMELHEGQGEDGSTNSSNDIEAGAK

SEQ ID NO: 84462 - protein, 82 aa, Setaria italica
  Transcript Sequence Number=SeqID_18488
DQLKAHCIFSNLDSAFETSWQPLERPQRGIHAIFQLKQYFSILQYCGTRPRWELLWKLFTYSITQVQILRCLQLFNLKVGGS

SEQ ID NO: 84463 - protein, 79 aa, Setaria italica
  Transcript Sequence Number=SeqID_18489
  Gene Ontology: Mol. function=hydrolase activity
  Homolog annotation: Hit_ID=B4FRE0; Match level="QueryCoverage=94%, HitCoverage=21%, E-value=3e-23, Identity=61%"; Hit description =Monoglyceride lipase
IENNLDKVTLPFIIVHGGGDAVTDPSVSEALYTLAESKDKTLKLYPGMCHALTSGEPKENIDSVFSDIIKWLNERVSTS

SEQ ID NO: 84464 - protein, 154 aa, Setaria italica
  misc_feature (6)..(6): Xaa can be any naturally occurring amino acid
  Transcript Sequence Number=SeqID_18490
  Gene Ontology: Mol. function=serine-type endopeptidase activity; Cellular component=intracellular; Biological process=protein modification process
  Homolog annotation: Hit_ID=P93501; Match level="QueryCoverage=99%, HitCoverage=88%, E-value=3e-80, Identity=95%"; Hit description =Ubiquitin-like protein
  Pfam annotation: Domain name=ubiquitin; Domain location=7-75; Score =138.0; E_value=2.9e-38; Accession=PF00240.15; Description=Ubiquitin family
  Pfam annotation: Domain name=ubiquitin; Domain location=83-151; Score= 138.0; E_value=2.9e-38; Accession=PF00240.15; Description=Ubiquitin family
  Pfam module annotation: Pfam domain module=ubiquitin::ubiquitin; Domain location=7-75::83-151
MQIFVXKTLTGKTITLEVESSDTIDNVKAKIQDKEGIPPDQQRLIFAGKQLEDGRTLADYNIQKESTLHLVLRLRGGMQIFVKTLTGKTITLEVESSDTIDNVKAKIQDKEGIPPDQQRLIFAGKQLEDGRTLADYNIQKESTLHLVLRLRGGQ

SEQ ID NO: 84465 - protein, 98 aa, Setaria italica
  Transcript Sequence Number=SeqID_18491
  Gene Ontology: Mol. function=structural constituent of ribosome; Cellular component=intracellular; Biological process=translation
  Pfam annotation: Domain name=DUF1666; Domain location=2-98; Score= -72.8; E_value=4.9e-07; Accession=PF07891.4; Description=Protein of unknown function (DUF1666)
MVITSEELEEIMEEAMHILWEFIKADKVETTPTSVIKGLSSTHVELQDPSDHDLMAHIHAALQKKEKRLKDLLRTGNCIVKKFKKPKEDRSNQNLFFS

SEQ ID NO: 84466 - protein, 208 aa, Setaria italica
  misc_feature (84)..(84): Xaa can be any naturally occurring amino acid
  misc_feature (133)..(133): Xaa can be any naturally occurring amino acid
  Transcript Sequence Number=SeqID_18492
  Subcellular localization annotation: CTP_CleavageSite=28; ConfidenceScore=5.65e-01
KPDACESVASSRKRSPPRSRKPASSPSVASKGSAVGARMSFASEFSGFGDSDSESSGSDGYSVKDLVVDSDSDWFLSEKDFPAXQDSATTVSPGSVCQGSPDTIPDGSPKFPEDMWSRSPSPDVEYKEDEEKXQKKTEEQYDEDVEHRSVVEEEGRRRHERREHSPKGKKVESAPVYDLAPADNSMDHSEKETITLNDYSGEAISDYF

SEQ ID NO: 84467 - protein, 920 aa, Setaria italica
  misc_feature (192)..(192): Xaa can be any naturally occurring amino acid
  Transcript Sequence Number=SeqID_18493
  Gene Ontology: Mol. function=structural constituent of ribosome; Cellular component=intracellular; Biological process=translation
  Homolog annotation: Hit_ID=B9T740; Match level="QueryCoverage=41%, HitCoverage=50%, E-value=1e-107, Identity=54%"; Hit description=60S ribosomal protein L34, putative
  Pfam annotation: Domain name=DUF1666; Domain location=671-920; Score =558.3; E_value=8.8e-165; Accession=PF07891.4; Description=Protein of unknown function (DUF1666)
MRTPSRSRKPADEPDVCESVASSGKRTPSWSRKTADEPDACESVASSGKRTPSWSRKTADEPDACESVASSRKRSPPRSRKPASSPSVASKGSAVGARMSFASEFSGFGDSDSESSGSDGYSVKDLVVDSDSDWFLSEKDFPASARNSGNLKSYKAKVLKAMEALEAAAKLEQSYQDSATTVSPGSVCQGSXPDTIPDGSPKFPEDMWSRSPSPDVEYKEDEEKVTKEAEEQYDEDVEHRSVVEEEGSVDMSDDEHSPKGKKVESAPVYDLAPADNSMDHSEKETITLNDYSGEAISDTQKGPEAVSAKELAAVSSDQVAGPAKRSPEPSEKEFIGLVDHSLEHSSDDRRETSSESGQSYEIVFDDKRRPEPSETEFVGTNDQSHELISDVWKQIISRNDQTSTVAYANEGGLDASEEEFVGRNDRTNEFISNEKKVTFSTINDQSFAVISDEKSIPETPEEQFSLTDHRNGVVHEAKNISETGEDEEQASANDYMDDAARQAYISVTGKAKIYEEEGEDPEVKWKDLTEEEEDELESLWEHQDLIEQLKLELKKVRSIGLPTILEESETPKAPMEDLKPWRIDAKFLREDPMDELNKFYKSYRERMRKFDILCYQKMYAIDFLQLRGPQQSANSLKSLSPTVASILSHNFRPSRRRSPEDPSERFLKELRYDLETVYVGQMCLSWEFLRWQYEQARDLPESDPYHSHQYNQVAGEFQQFQVVVQRFVEDESFKGPRLPNYINNRCVLRNLLQVPVIKEDSLKDRMEDQRKGNYVITSEELEEIMEEAMHILWEFIKADKVETTPTSVIKGLSSTHVELQDPSDHDLMAHIHAALQKKEKRLKDLLRTGNCIVKKFKKPKEDRSNQNLFFSQVDMKLVARVLRMPRITSEQLQWCKAKLDKIILVDRKIHREASFLLFPC

SEQ ID NO: 84468 - protein, 185 aa, Setaria italica
  Transcript Sequence Number=SeqID_18494
  Gene Ontology: Mol. function=protein dimerization activity
  Homolog annotation: Hit_ID=B6TAY4; Match level="QueryCoverage=100%, HitCoverage=51%, E-value=1e-71, Identity=72%"; Hit description=O -methyltransferase ZRP4
  Pfam annotation: Domain name=Methyltransf_2; Domain location=17-185; Score=60.8; E_value=5e-15; Accession=PF00891.10; Description=O -methyltransferase
LMRVLTVTGVFSVQHHSADGGGDELLYGLTPASRLLVGSALNVSPFLTLMLDTLFVSPFLGLREWFQHEMPNPSPFKMANGRDLWDLNDHDASFGKLFDRGMVADSDFIMDIVVRECGNVFQGISSLVDVAGGLGGATQAIAKAFPHVECSVLELSRVVARAPTGTDVKYIAGDMFESIPSANAV

SEQ ID NO: 84469 - protein, 118 aa, Setaria italica
  Transcript Sequence Number=SeqID_18495
  Gene Ontology: Mol. function=protein serine/threonine kinase activity; Biological process=protein amino acid phosphorylation
RHYHVKPHAVPRSPPKHNSTHAASGSGKNIEISREAATTIVALAGLAMLSFIGATIWFVKKKRRRIEPPAALPTQQPAPPPPPNYIPSSAGSSLASDGFYLRSPGYPFMRYSTGSHGY

SEQ ID NO: 84470 - protein, 634 aa, Setaria italica
  Transcript Sequence Number=SeqID_18496
  Gene Ontology: Mol. function=DNA binding
  Homolog annotation: Hit_ID=A2Q342; Match level="QueryCoverage=31%, HitCoverage=26%, E-value=3e-41, Identity=48%"; Hit description =Homeodomain-like
VGLVPNFPSTIGYCPSLTGFALDPSRNHGISTRPEIPVGKACSALSSGDIIKFLTGDFRLSKARSNDLFWEAVWPRLLSRGWHSEQPKDSSQVGKHALVFLIPGVKKFSRKKLVKGNHYFDSVSDVLSKVASEPRLLEFGVQGGNDDSGIKHENGWIHDSEHDRNTLPNKKPSYNRPTEPGCSPELMKFTVVDTSLVQGEEPSKVRSLRNLPTDSSHGYMSSPSSEDSGSDSAEEHSDSEDSSQPYEHVSTDRCTTGAQYASEERKSKLPTIVKMDSSVIQKAASSGTLTSINGHISTDQGFSTMSNACSSTASILPVDVKRVHATTSTEISFQFDQRANAESQVFLAPFSKRRRLVSSKTERTGRRNTTTNENHYWKQADEPLQHDVSGANEASGEAKSFVWGAIPNSSTNISFDVNNKKPYCRRLDNVPPNAETMVYRESIQNRHVIDLNIPQMPSDYESTVSYIASPSDKNMQTMARPPRSSGTEEVADQLPDMDASSDVLYEELSFNSRRHSSRSRPPTARALEALACGFLGTKQKGREANFPSSSRSSRPVRRPRRSPDVSLPFPSDGKGCISHFPDPPTDVNGWNMSNPPFQMIHSSPSDKSTDKVTPDLFGADKSTDKGVHELFSIP

SEQ ID NO: 84471 - protein, 281 aa, Setaria italica
  Transcript Sequence Number=SeqID_18497
  Gene Ontology: Mol. function=binding
  Homolog annotation: Hit_ID=Q10D20; Match level="QueryCoverage=100%, HitCoverage=7%, E-value=1e-132, Identity=85%"; Hit description=WD-40 repeat family protein, putative, expressed
VNIILPFLVSESHRSGVLRLLSCLIIEDSLQAHPEEIGSLVEILKSGTQSTSSGSQFKLDNDAKCDTFGALWRILGANSSAQRIFGEATGFSLLLTMLHSFQNDSENEETESSLHTHMKIFGFLLRAMTAAVCNNSVNRVRLHTILSSNTFYDLLSESGLLCVDCEKQVILLLLELALEIVLPPTSNLQVECISSETSEDESSFLSATSFGLSRLDKERVYNASAVVVLIRSLLVFTPKVQLELLRFIEKLANAGPFNQENLTSVGCVGLLLETISPFLEG

SEQ ID NO: 84472 - protein, 55 aa, Setaria italica
  Transcript Sequence Number=SeqID_18498
  Subcellular localization annotation: CTP_CleavageSite=33; ConfidenceScore=5.04e-01
RGRRVIKAAVWALTTLLTLMFASRVAPLMPPVVAAAVWTMAVATATAGFWAFFLN

SEQ ID NO: 84473 - protein, 90 aa, Setaria italica
  Transcript Sequence Number=SeqID_18499
CLARSSLAWTHQSSSLQTEKEQLKLISANYNSRSGTQEKRGNLLLDFELYSALSMNKSSRISPSSNIGIRTQQQEKRVHQTTEQGKGDGR

SEQ ID NO: 84474 - protein, 794 aa, Setaria italica
  misc_feature (694)..(694): Xaa can be any naturally occurring amino acid
  Transcript Sequence Number=SeqID_18500
  Gene Ontology: Mol. function=nucleic acid binding; Cellular component= intracellular; Biological process=regulation of transcription from RNA polymerase III promoter
  Homolog annotation: Hit_ID=Q10RP4; Match level="QueryCoverage=85%, HitCoverage=100%, E-value=0.0, Identity=55%"; Hit description=Zinc finger, C2H2 type family protein, expressed
  Pfam annotation: Domain name=zf-C2H2; Domain location=684-709; Score =22.9; E_value=0.0013; Accession=PF00096.18; Description=Zinc finger, C2H2 type
  Pfam annotation: Domain name=zf-C2H2; Domain location=712-731; Score =10.6; E_value=0.84; Accession=PF00096.18; Description=Zinc finger, C2H2 type
  Pfam annotation: Domain name=zf-C2H2; Domain location=737-761; Score =21.6; E_value=0.0032; Accession=PF00096.18; Description=Zinc finger, C2H2 type
  Pfam annotation: Domain name=zf-C2H2; Domain location=767-793; Score =22.4; E_value=0.0019; Accession=PF00096.18; Description=Zinc finger, C2H2 type
  Pfam module annotation: Pfam domain module=zf-C2H2::zf-C2H2::zf -C2H2::zf-C2H2; Domain location=684-709::712-731::737-761::767-793
VDIDVQAVESCDGTISWNTSSTFARPRIFCLQHALEIEELLEGKGGVRALIICHSDYIKLKALAISIAEEIEFQFDCTDVPLANASKSDLHLINISIDDEGHEEDGRDWTSQMGLNLKYCAKLRKETSGIRDQSPLSVWELFSNPSPVSVVPNLKWLCRKARTPYKVIGIITSSGTSATAEEVKPEVKKETCTTGNVHEDDSRQHISQQSGLVQPSGLHDSDDRENKSSCSEENDHDRHCLIDIPIAVAEYPMKHQVCEGAVGVSTCNDTICSSDSQDSSPLATSPVDVTRYQGCIQSTELSSSSTFSVRQFLNDESTSVEGSMNCMSNHEYLQSQDVTLQCRDECLQVQQDQEEMRLCNSSNRTSVDPCLKEDLVISEEKHGSNVSAALENEHDCAKTSKCSYKTNESAAVNQLKTHDAGAVPEKQKSSCDEMTCGSADVQCSITFGCLGSADVPGSTQPQSVPHDLMSDELQVDSHHCVVKAVELKSNNSAKHESPQIDNLILEDAQAAATTAIPGHDGKSVHAGSNSFDILLGALAEESKVTDAPGKDEVGKASLTLMTLASNDHSADEIAEGKVVEVAKTNTIFGATKDDEQVDRPHDFHLSDVVSRSIGNSNRTEIICYVRRKHKRKKDSQSNTDSSQSLGNFIRSPCESLRPRTKPAVVETIEVSAGKKGKRAKVVLFQCDIDLCDMXFETRAELNAHKRNICTDESCGKRFSSHKYLKRHQCVHSDKRPFKCPWDGCEMTFKWLWAQTEHVRVHTGERPYKCSAPSCGQTFRYVSDYSRHRKKFNHY

SEQ ID NO: 84475 - protein, 160 aa, Setaria italica
  misc_feature (63)..(63): Xaa can be any naturally occurring amino acid
  Transcript Sequence Number=SeqID_18501
  Gene Ontology: Mol. function=transferase activity, transferring groups other than amino-acyl groups
  Homolog annotation: Hit_ID=B6TXE4; Match level="QueryCoverage=90%, HitCoverage=49%, E-value=4e-63, Identity=81%"; Hit description =Transferase family protein
LLVKESLSEAVADHPEMAGRLRRRADGSWEVKLNDTGVRLVLATVEASVDDFVGGARRAASAXEAALVPWTDVDAEDPDMCALCFVQLTRFQGDGGYAVGVSCSLMLCDPLALARFLLSWARVHAEIKARDKAATIPMMQYAGYFQNPGTMTRRIRSVPL

SEQ ID NO: 84476 - protein, 179 aa, Setaria italica
  Transcript Sequence Number=SeqID_18502
  Homolog annotation: Hit_ID=B6U5P1; Match level="QueryCoverage=88%, HitCoverage=63%, E-value=2e-82, Identity=91%"; Hit description=Lil3 protein
EAPPAKAVEAVAAAAPVPVPAFRDARWVNGTWDLSKFEKGGVVDWDAVIDAEARRRKWLEDYPEATNTDEAVVFDTSVIPWWAWMKRFHLPEAEKLNGRAAMVGFFMAYFVDSLTGVGLVDQMGNFFCKTLLFVAVAGVLLIRKNEDLDSLKKIIDETTFYDKQWQATWQDETTGGPKN

SEQ ID NO: 84477 - protein, 53 aa, Setaria italica
  Transcript Sequence Number=SeqID_18503
VIRYSNYVCISHYLISCICDMIGSGINLLFHKALDSVRSLTRFTSNACSINEE

SEQ ID NO: 84478 - protein, 450 aa, Setaria italica
  Transcript Sequence Number=SeqID_18504
  Gene Ontology: Mol. function=protein serine/threonine kinase activity; Biological process=protein amino acid phosphorylation
  Homolog annotation: Hit_ID=Q7XNC0; Match level="QueryCoverage=90%, HitCoverage=65%, E-value=3e-82, Identity=42%"; Hit description =OSJNBa0029C04.8 protein
  Pfam annotation: Domain name=Lectin_legB; Domain location=40-273; Score=152.5; E_value=1.3e-42; Accession=PF00139.11; Description =Legume lectin domain
  Pfam annotation: Domain name=Pkinase_Tyr; Domain location=354-448; Score=-166.5; E_value=0.012; Accession=PF07714.9; Description =Protein tyrosine kinase
  Pfam module annotation: Pfam domain module=Lectin_legB::Pkinase_Tyr; Domain location=40-273::354-448
MASAASSRSVQILLLICTCFLLPLSLAAQGADDKNSVQLVDSKFSFSFDFANESSYQVGDLSFEGNASRQSNRIDLTCDSRGSIQSCQGRMSYNEPVTFYDDTGALACFSTSFTFAILAENYSTAGDGLAFFLSDYPSKMMPDSAGGRLGFLSETTLPSQPQHFVAVEFDTYQNRWDPSTSHIGVDISSIRSSNYTNLPRLNGTMTAKVQFDNTTNMLLASLWFDDHLDIDPVVVTYVLTDPKSLLPGQVAVGFSSTTGTSTELHQMLAWSFNSTLPARSPHKGCDNCTGQDNRKSTIITVGGALALVLLVLGAWSIISCWKWRRNRHHGFEKLGKHEPTRFEYHDLEAATDHFSEERKLGEGSFGVVYRGYLKKLGCEVAIKKILDKSQVVGPNMDFYAELDTITSVNHKNLVKLVGWCRGKSWNFFEFLCWCWKKENDELFLVYELVP

SEQ ID NO: 84479 - protein, 183 aa, Setaria italica
  Transcript Sequence Number=SeqID_18505
MCFTFLRSQNMAQACTVSHAENKRSLPAWMLKASSGNEVPKTEDRNRQALESNVKIGTVDPTKPIKRNTGRRLKSVDSEGASELVVLQWCQGKENARRKSKGAVQDVVEEIRDVPIKKGRKVSEGAAPKNNRKRKLENIKSETSSPVSVDDDVELTVEDLLSIAEEYVNADKQKQHEFEAMKT

SEQ ID NO: 84480 - protein, 100 aa, Setaria italica
  Transcript Sequence Number=SeqID_18506
  Homolog annotation: Hit_ID=B6SPC3; Match level="QueryCoverage=100%, HitCoverage=16%, E-value=1e-14, Identity=50%"; Hit description =Calmodulin binding protein
  Subcellular localization annotation: CTP_CleavageSite=35; ConfidenceScore=5.51e-01
MSLSLLNTERNHLLSPKPRSPRDGCFSPVRTSSPRATAKMARGGLERSLSFKNWEAQVAAPPQDPESAAPAGRGGSGINGARPGTLALQPAPQQQSPRRA

SEQ ID NO: 84481 - protein, 55 aa, Setaria italica
  Transcript Sequence Number=SeqID_18507
  Homolog annotation: Hit_ID=B6U831; Match level="QueryCoverage=98%, HitCoverage=22%, E-value=4e-11, Identity=75%"; Hit description=Zinc finger protein 7
MNSKEMCQEPCDELSEISSQAASNTEASNSSGRVSLDLSLTVAAAAAAESSTTDK

SEQ ID NO: 84482 - protein, 374 aa, Setaria italica
  Transcript Sequence Number=SeqID_18508
  Gene Ontology: Cellular component=intracellular; Biological process =RNA processing
  Homolog annotation: Hit_ID=B9RXI9; Match level="QueryCoverage=98%, HitCoverage=56%, E-value=6e-85, Identity=45%"; Hit description =Hepatocellular carcinoma-associated antigen, putative
LTLRKKFLEILNSVDLAHSEEMKIEVLDDLKKDFSHCEDYWDWFARLQLTDLNKSSTLNGKDALSNKLNKSIQVYDEAVRRLPTSKMHSLYANFWMDVLYPDREDSIASFQNSEFDASEFTSSILKVYESAESCGCLTEDLACQYVSLCLKLERLEEAKNLAEKLCNGPLSDAANLWSLRASMEINSFATAGSSPFSKENLSCLFDLFNTVLSKLPITQTEGLWHMAMKLFSNEKIYFEKLVKCAMLSLSLAGGSDLGASVSSAIVGWYLQRDGMKQARKMYKRLLALPRPSLKFFQYCIELEANLASLGDNGALANARKLYDSAIDHYPQEREVWRNYYNLELKVGTSETANTVYWRARKVLGDSTALTAPSS

SEQ ID NO: 84483 - protein, 233 aa, Setaria italica
  Transcript Sequence Number=SeqID_18509
SRPRESIERRDSADREPPSSSRKRKGHEGGGRGDEADRDVGKRARASVDPPPPKEERPRRERRRFEDVDANGKDGDVRSKGSKQEGELAVNGDLQSGAAQNAGSQQPFNAASAVVPSSVPVSSKVSSITTNNENEGVSIRSDEVTGKSSTDGSAISAAGKSSNLSLDALAKAKKALQLKKELSEKLKKLPMLNDKLGTTGSGTQIKKEDAKTLSAVEVQPLPKRRSKVYWCSF

SEQ ID NO: 84484 - protein, 39 aa, Setaria italica
  Transcript Sequence Number=SeqID_18510
TSCAADDYTTHAQPIFSLPKPSPQKSGTKGQGERGKKIG

SEQ ID NO: 84485 - protein, 130 aa, Setaria italica
  misc_feature (102)..(102): Xaa can be any naturally occurring amino acid
  Transcript Sequence Number=SeqID_18511
VYGGGYGGYEYDNQGGYGGYGHPGGYGHQGGYGNQGGYGHNQGGYGGYGYNQGGYGGYENGGGWNYNRSRGGGGGRGRGNWGYGGPGYDRGGRGAGGPGGRXGYVRGRGRMGGGRGRGNQNSRLSRVGCA

SEQ ID NO: 84486 - protein, 96 aa, Setaria italica
  Transcript Sequence Number=SeqID_18512
  Pfam annotation: Domain name=GRP; Domain location=2-69; Score=-18.3; E_value=0.0063; Accession=PF07172.3; Description=Glycine rich protein family
YLIGACPFRLIEFARSSLSVPLASYTTTCGAQLYTGPGYDRGGRGAGGPGGRGYVRGRGRMGGGRGRGNQKLLDYQGLDVPNPLLVSVCQWKGEKR

SEQ ID NO: 84487 - protein, 276 aa, Setaria italica
  Transcript Sequence Number=SeqID_18513
  Gene Ontology: Mol. function=nucleic acid binding; Cellular component= nucleus
  Homolog annotation: Hit_ID=Q9M8Z6; Match level="QueryCoverage=49%, HitCoverage=27%, E-value=2e-56, Identity=77%"; Hit description =F17A9.19 protein
  Pfam annotation: Domain name=Alba; Domain location=18-88; Score =102.3; E_value=1.7e-27; Accession=PF01918.13; Description=Alba
MDRYQRVEKPRPEAAAISENEIRITTQGLIRNYVTYATSLLQEKRVKEIVLKAMGQAISKTVAIAEIIKKRIPGLHQDAIISSVSITDVWEPIEEGLVPLEMTRHVSMISISLSPKELNKNSPGYQAPLHSEQVKPQRYQQPQQYQQHQPRQNQGQTDSYGRGRGRGRGRGRGWGGRGGYGGGYGGYEYDNQGGYGGYGHPGGYGHQGGYGNQGGYGHNQGGYGGYGYNQGGYGGYENGGPGYDRGGRGAGGAGGRGYVRGRGRMGGGRGRGNQNY

SEQ ID NO: 84488 - protein, 84 aa, Setaria italica
  Transcript Sequence Number=SeqID_18514
  Gene Ontology: Mol. function=protein serine/threonine kinase activity; Biological process=protein amino acid phosphorylation
  Homolog annotation: Hit_ID=Q653D1; Match level="QueryCoverage=89%, HitCoverage=9%, E-value=6e-15, Identity=51%"; Hit description =Putative wall-associated kinase 4
  Pfam annotation: Domain name=EGF_CA; Domain location=16-56; Score =21.6; E_value=0.0013; Accession=PF07645.7; Description=Calcium binding EGF domain
GYEGNPYLLDDRGCKDINECQHLDKYPCYGVCTNVLGGYKCDCHPGFSGDAIKNDCRPKDKFTLALKVVTGVSVGVFLSVFMCF

SEQ ID NO: 84489 - protein, 149 aa, Setaria italica
  Transcript Sequence Number=SeqID_18515
  Gene Ontology: Cellular component=membrane; Biological process =intracellular signaling cascade
  Homolog annotation: Hit_ID=B6T2L9; Match level="QueryCoverage=100%, HitCoverage=100%, E-value=1e-73, Identity=91%"; Hit description=ER -derived vesicles protein ERV14
  Pfam annotation: Domain name=Cornichon; Domain location=4-127; Score =121.6; E_value=2.6e-33; Accession=PF03311.6; Description=Cornichon protein
MSVELILWLFSFASVMVLIGLTAYQLICLSDLEYDYINPYDSSSRINAVVLIEYSLQAALCASFLLTLHWFPFLVMAPVTYYHVKLYMDQKHLVDVTEIFRQLNGEKKYRMIKLAFYFCLFIITIYRLVMTAVMLFIDEDVNLVETRTI

SEQ ID NO: 84490 - protein, 205 aa, Setaria italica
  misc_feature (12)..(12): Xaa can be any naturally occurring amino acid
  Transcript Sequence Number=SeqID_18516
  Gene Ontology: Mol. function=protein serine/threonine kinase activity; Biological process=protein amino acid phosphorylation
  Homolog annotation: Hit_ID=B6UD76; Match level="QueryCoverage=97%, HitCoverage=37%, E-value=4e-94, Identity=81%"; Hit description=ATP binding protein
  Pfam annotation: Domain name=Pkinase; Domain location=84-205; Score= -71.6; E_value=0.00031; Accession=PF00069.17; Description=Protein kinase domain
  Pfam annotation: Domain name=Pkinase_Tyr; Domain location=84-205; Score=-71.5; E_value=5.7e-09; Accession=PF07714.9; Description =Protein tyrosine kinase
  Pfam module annotation: Pfam domain module=Pkinase::Pkinase_Tyr; Domain location=84-205::84-205
SALLSDIGLNIXEAHVFSTTDGYSLDVFVVDGWPIEDTEGLHKALEASILRNEGSWSGSDSSASGKSLPFLAQDCESDIDTRLLKIVKKVASGSCGAMFLGTYGGEEVAVKILNPENLDQNAWSEFKQEIYILREVDHPNIVRFIGSCTKPPQFYLVTECMSRGSLFDFLHNEHNVLDLPAVLKYALDVCRGMSYLHQKGIIHRD

SEQ ID NO: 84491 - protein, 137 aa, Setaria italica
  misc_feature (101)..(102): Xaa can be any naturally occurring amino acid
  misc_feature (126)..(126): Xaa can be any naturally occurring amino acid
  Transcript Sequence Number=SeqID_18517
  Gene Ontology: Mol. function=receptor activity
  Homolog annotation: Hit_ID=Q6Z027; Match level="QueryCoverage=99%, HitCoverage=6%, E-value=1e-47, Identity=69%"; Hit description =Putative death receptor interacting protein
STRYAFHDPTRIELQQQATESFFSCVGLSKRNDEASEEDVQLQILGEHTSNISAMPGEVSLPELHKEIMSCLTEPMYDVRITVLKRILQLTKSIRYGHSKXXLRQWAGANLQPVLMERLFAEEHPXCLYYNLKIILF

SEQ ID NO: 84492 - protein, 101 aa, Setaria italica
  Transcript Sequence Number=SeqID_18518
  Pfam annotation: Domain name=DUF822; Domain location=1-82; Score= -42.4; E_value=0.0076; Accession=PF05687.5; Description=Plant protein of unknown function (DUF822)
  Subcellular localization annotation: CTP_CleavageSite=78; ConfidenceScore=5.85e-01
PGMMSPCSSSQLLSAPSSSYPSPVPSYHASPASSSFPSPTRLDHSSGSNTNNPGAAAAASSLLPFLRGLPNLPPLRVSSSAPVTPPLSSPTAASRPPTKVR

SEQ ID NO: 84493 - protein, 182 aa, Setaria italica
  Transcript Sequence Number=SeqID_18519
  Gene Ontology: Mol. function=hydrolase activity
  Homolog annotation: Hit_ID=Q9XI20; Match level="QueryCoverage=84%, HitCoverage=23%, E-value=5e-63, Identity=74%"; Hit description =F9L1.44 protein
  Pfam annotation: Domain name=Abhydrolase_4; Domain location=75-176; Score=-6.4; E_value=0.0071; Accession=PF08386.2; Description=TAP -like protein
EESIIKVEVKGVVLVGVSLSREVIPAFARILLHTPLRKKHMVRPLLRTEITQVINRRAWYDATKLTTEVLNLYKAPLFVEGWDEALHEVGRLSFSTVLSSKRAADLLRSVEDLPVLVVAGSEDALVSVKSAQAMASKLVNSRIVTVSGCGHLPHEECPKALLSALSPFISRLVPSEDSLQRL

SEQ ID NO: 84494 - protein, 66 aa, Setaria italica
  Transcript Sequence Number=SeqID_18520
LTRVWRTWGFYKGDIYARFREEAAGGGEGRGQVDGRLPVGQPRRRVEAAAEEEEEREAGAVNSRKG

SEQ ID NO: 84495 - protein, 75 aa, Setaria italica
  misc_feature (32)..(32): Xaa can be any naturally occurring amino acid
  Transcript Sequence Number=SeqID_18521
  Pfam annotation: Domain name=DUF1298; Domain location=41-75; Score= -97.9; E_value=0.068; Accession=PF06974.5; Description=Protein of unknown function (DUF1298)
QVRQDCHETVNDVLIGVTSAGLSRYYFRKTSXLAEMMDSSKNNGAKWGNLIGYVILPFHIAMHDDPLEYIRQGKS

SEQ ID NO: 84496 - protein, 63 aa, Setaria italica
  Transcript Sequence Number=SeqID_18522
GDEVSNKNGSKVEKEGDEEGDQEEEEAQEEEENSDDDYNQNIEFDDDDDDWNQAEEAHEDYYD

SEQ ID NO: 84497 - protein, 80 aa, Setaria italica
  Transcript Sequence Number=SeqID_18523
NYTPYSKLTDGRTVINIMTDKREALCSVLTHSQISYSQEPPKSLVLRLGTQTEWNFPIEQPNGAPFMSTLRGCLVPPPKV

SEQ ID NO: 84498 - protein, 59 aa, Setaria italica
  Transcript Sequence Number=SeqID_18524
TWWRPTILYQPQRQYQEALLKSCQSWVSPIDHSPIGSSSFMSVALSPCSTVAIETIRGN

SEQ ID NO: 84499 - protein, 117 aa, Setaria italica
  Transcript Sequence Number=SeqID_18525
TEQTHIEIRHGSNEWSFWIFSFVHHRLVLIGLGPLLLWFMLLHFPLVGAALLAEKGAEEGRVHVVNHLLLLRRRRHKLGFRPFSSPASAYVMKGCAGCGAEGLWTRLTEVLEWARID

SEQ ID NO: 84500 - protein, 171 aa, Setaria italica
  Transcript Sequence Number=SeqID_18526
  Gene Ontology: Mol. function=protein binding; Cellular component=SCF ubiquitin ligase complex; Biological process=ubiquitin-dependent protein catabolic process
  Homolog annotation: Hit_ID=B6TE19; Match level="QueryCoverage=81%, HitCoverage=58%, E-value=6e-43, Identity=72%"; Hit description=F-box protein GID2
  Pfam annotation: Domain name=F-box; Domain location=26-73; Score =28.5; E_value=2.7e-05; Accession=PF00646.25; Description=F-box domain
SPSAQDAREGEQPPPGADAEVGGEQERVPDLGEDLVFEVLMRAEARTLATAACVNRGWRQLARDERLWEAACVRECSNLGFSEQMLRMVVLSFGGFRRLYELYIRPVQRRAAGAPPGQRRGQVPVRLGPDQVQVSLSMLSTSFFLKMPNAPPPPKKDKDNDRDKNGGGQCG

SEQ ID NO: 84501 - protein, 267 aa, Setaria italica
  Transcript Sequence Number=SeqID_18527
  Gene Ontology: Mol. function=nucleotide binding; Cellular component =intracellular
  Homolog annotation: Hit_ID=Q7EZT3; Match level="QueryCoverage=100%, HitCoverage=58%, E-value=1e-141, Identity=87%"; Hit description =Putative GTP-binding protein
  Pfam annotation: Domain name=DUF1967; Domain location=172-241; Score =112.9; E_value=1.1e-30; Accession=PF09269.3; Description=Domain of unknown function (DUF1967)
  Pfam annotation: Domain name=MMR_HSR1; Domain location=1-91; Score =14.1; E_value=4.9e-05; Accession=PF01926.15; Description=GTPase of unknown function
  Pfam module annotation: Pfam domain module=DUF1967::MMR_HSR1; Domain location=172-241::1-91
TLLPNLGVVSLDFDATMVVADLPGLLEGAHRGYGLGYEFLRHSERCSVLVHVVDGSAQQPDYEFEAVRLELELFSPSLVDKPYVVVYNKMDLPEASDRWNTFREKLQAQGIEPYCISAINRQGTHDVIHAAYKLLQKERQRIKETEEWSGTENLNHVSDAIKRERRAPMNEFEIFHDKGTSTWTVVGAGIERFVQMTNWQYSDSLKRFQHALEACGVNKTLIKRGVKEGDTVIIGEMEMVWNDEAKSNRPSKTMNTKDDAVRWPEFG

SEQ ID NO: 84502 - protein, 135 aa, Setaria italica
  misc_feature (32)..(32): Xaa can be any naturally occurring amino acid
  misc_feature (74)..(74): Xaa can be any naturally occurring amino acid
  Transcript Sequence Number=SeqID_18528
  Gene Ontology: Mol. function=heat shock protein binding
  Pfam annotation: Domain name=DnaJ_CXXCXGXG; Domain location=38-127; Score=-21.4; E_value=0.0014; Accession=PF00684.11; Description=DnaJ central domain (4 repeats)
  Subcellular localization annotation: CTP_CleavageSite=47; ConfidenceScore=5.61e-01
SPPMPAAPGTGPGCLGSPAQAPSGSLAGVQGXAPRRLGTSKPLGIVRTESNVRRERPKRPDPPCTICKGTGRNXDCRNCFGRGRTNHAELVMLPKGEWPHWCRICGGSGLDYCFRCHGTGEYREPMGFHFTVKSK

SEQ ID NO: 84503 - protein, 179 aa, Setaria italica
  Transcript Sequence Number=SeqID_18529
  Gene Ontology: Mol. function=electron transporter, transferring electrons within the cyclic electron transport pathway of photosynthesis activity; Cellular component=plasma membrane light -harvesting complex; Biological ...
  Gene Ontology: Cellular component=process=photosynthetic electron transport in photosystem II
  Homolog annotation: Hit_ID=Q5UVA7; Match level="QueryCoverage=94%, HitCoverage=60%, E-value=2e-84, Identity=91%"; Hit description =Photosystem II 32 kDa protein (Fragment)
  Pfam annotation: Domain name=Photo_RC; Domain location=17-179; Score =61.9; E_value=2.5e-15; Accession=PF00124.11; Description =Photosynthetic reaction centre protein
GYDLLDKLGITSTENRLYIGWFGVLMIPTLLTATSVFIIAFIAAPPVDIDGIREPVSGSLLYGNNIISGAIIPTSAAIGLHFYPIWEAASVDEWLYNGGPYELIVLHFLLGVACYMGREWELSFRLGMRPWIAVAYSAPVAAATAVFLIYPIGQGSFSDGMPLGISGTFNFMIVFQAEH

SEQ ID NO: 84504 - protein, 52 aa, Setaria italica
  Transcript Sequence Number=SeqID_18530
MGMVLGKITVETPKHEVLHTGAGYEIRRYPPCVAAEFTYDPKEWKGDPDGGF

SEQ ID NO: 84505 - protein, 61 aa, Setaria italica
  Transcript Sequence Number=SeqID_18531
  Gene Ontology: Mol. function=nucleic acid binding; Cellular component= intracellular
  Homolog annotation: Hit_ID=B6TPH8; Match level="QueryCoverage=91%, HitCoverage=15%, E-value=1e-21, Identity=83%"; Hit description =Transcription repressor TRM protein
MQAAARRRFRWVKEWVPQDLVVAGGPCALFKWVREDRLAALKAKDKEQGAESATPEPNTEV

SEQ ID NO: 84506 - protein, 330 aa, Setaria italica
  Transcript Sequence Number=SeqID_18532
  Gene Ontology: Mol. function=nucleic acid binding; Cellular component= intracellular; Biological process=regulation of transcription, DNA -dependent
  Homolog annotation: Hit_ID=B6TPH8; Match level="QueryCoverage=93%, HitCoverage=88%, E-value=1e-133, Identity=76%"; Hit description =Transcription repressor TRM protein
  Pfam annotation: Domain name=zf-BED; Domain location=87-127; Score =5.0; E_value=0.062; Accession=PF02892.7; Description=BED zinc finger
  Pfam annotation: Domain name=zf-C2H2; Domain location=102-126; Score =34.3; E_value=4.7e-07; Accession=PF00096.18; Description=Zinc finger, C2H2 type
  Pfam annotation: Domain name=zf-C2H2; Domain location=132-157; Score =33.1; E_value=1.1e-06; Accession=PF00096.18; Description=Zinc finger, C2H2 type
  Pfam annotation: Domain name=zf-C2H2; Domain location=201-226; Score =27.9; E_value=4.2e-05; Accession=PF00096.18; Description=Zinc finger, C2H2 type
  Pfam annotation: Domain name=zf-C2H2; Domain location=43-67; Score =24.9; E_value=0.00033; Accession=PF00096.18; Description=Zinc finger, C2H2 type
  Pfam annotation: Domain name=zf-C2H2; Domain location=72-96; Score =27.1; E_value=7.1e-05; Accession=PF00096.18; Description=Zinc finger, C2H2 type
  Pfam module annotation: Pfam domain module=zf-BED::zf-C2H2::zf -C2H2::zf-C2H2::zf-C2H2::zf-C2H2; Domain location=87-127::102 -126::132-157::201-226::43-67::72-96
LTETNKVSDSVALGEDRLAALKAKDKEQGAESATPEPNTEVLFLCSYEGCGKTFFDAGALRKHAHVHGERQYICHYDNCGKKFLDSSKLKRHFLIHTGEKNFVCPHEGCGKAFSLDFNLKAHMKTHSADNYHVCQYPECGRRFTQESKLRAHIRSQHEKVVGLQNPGVSTVNHNALGDYHQPPKPVKASATPPAPSAERPYVCPYDGCDKAYIHEYKLNLHLKKEHPNHYQDNGPQGAAPSSKRSISKSSHRSKPDITARIPPPKIPKRKGGYAAPLPAVTAPEEHQWSRKATYEDDSEETEEEGDNNVGDAWRYSKPASSDDEETEDEE

SEQ ID NO: 84507 - protein, 136 aa, Setaria italica
  Transcript Sequence Number=SeqID_18533
  Gene Ontology: Mol. function=pantoate-beta-alanine ligase activity; Cellular component=cytoplasm; Biological process=pantothenate biosynthetic process
  Homolog annotation: Hit_ID=O24210; Match level="QueryCoverage=92%, HitCoverage=40%, E-value=2e-59, Identity=87%"; Hit description =Pantoate--beta-alanine ligase
  Pfam annotation: Domain name=Pantoate_ligase; Domain location=4-136; Score=-53.7; E_value=3.2e-10; Accession=PF02569.7; Description =Pantoate-beta-alanine ligase
PLCPRGRPDASESGGAISCLEQGDGYGHETWIRVERLEKGLCGSSRPVFFRGVATVVAKLFNIVEPDIAVFGKKDYQQWRVICRMVHDLDFAIEIIGSEIVREADGLAMSSRNVHLSCEEREKALSISRSLVNART

SEQ ID NO: 84508 - protein, 172 aa, Setaria italica
  Transcript Sequence Number=SeqID_18534
  Gene Ontology: Mol. function=DNA binding; Cellular component =chromosome; Biological process=nucleosome assembly
  Homolog annotation: Hit_ID=B6SLM0; Match level="QueryCoverage=49%, HitCoverage=36%, E-value=1e-37, Identity=91%"; Hit description =Histone H1
  Pfam annotation: Domain name=Linker_histone; Domain location=71-141; Score=73.2; E_value=9.9e-19; Accession=PF00538.11; Description =linker histone H1 and H5 family
MATATEEVAPVVAEAPAPEKVEEVKEAGAVEAPEKVEEEPKPAAEEGKKPEEVEKKVKKPRSRKPKSAGPHHPPYFEMIKEAILSQDGKAGASPYAIAKHMGEKHRDVLPANYRKVLAVQLRNFAAKGRLVKVKASFKLAAGEEKKAFFASAGRPASSSWRARRTPPPSCAS

SEQ ID NO: 84509 - protein, 202 aa, Setaria italica
  Transcript Sequence Number=SeqID_18535
  Gene Ontology: Mol. function=DNA binding; Cellular component =chromosome; Biological process=nucleosome assembly
  Homolog annotation: Hit_ID=B6SLM0; Match level="QueryCoverage=39%, HitCoverage=34%, E-value=4e-35, Identity=93%"; Hit description =Histone H1
  Pfam annotation: Domain name=Linker_histone; Domain location=79-149; Score=73.2; E_value=9.9e-19; Accession=PF00538.11; Description =linker histone H1 and H5 family
MATATEEVAPVVAEAPAPEKVEEVKEAGAVEAPEKVEEEPKPAAEEGKKAEEAEGKKPEEVEKKVKKPRSRKPKSAGPHHPPYFEMIKEAILSQDGKAGASPYAIAKHMGEKHRDVLPANYRKVLAVQLRNFAAKGRLVKVKASFKLAAAEEKKAAAAMARAKAPAAGKRKRAAASAAPAKKKKPAAPAEAKKARAKRARKA

SEQ ID NO: 84510 - protein, 105 aa, Setaria italica
  Transcript Sequence Number=SeqID_18536
  Homolog annotation: Hit_ID=B3VTD1; Match level="QueryCoverage=100%, HitCoverage=10%, E-value=2e-31, Identity=65%"; Hit description =Replication protein A1-like protein
VIIVIQLEILRSEFALIGSPAIYEANPTQHIGVSCSGGLESHEPCFMPDAEQVVSNSSCFSSHGLLDSLITPSAEPAVNNMPFGGCLSPMQAQSTVNAKMQQLSL

SEQ ID NO: 84511 - protein, 169 aa, Setaria italica
  Transcript Sequence Number=SeqID_18537
RHLPPHGPWTKQEGARATDGVGNEAPPPESNPPRPRRTRRATPAQCGWEQGLSSSFLAPNQHRRPRLRPTRASQEKREPHRRPQTRSSPESGRREPLAKAPRLLTTTASVLLLLLLCSGSLDRAAKNRPRLLGRPRARRDRGGGSVGRRRRRGGQAGGEDAAWISGGRG

SEQ ID NO: 84512 - protein, 106 aa, Setaria italica
  Transcript Sequence Number=SeqID_18538
FTTCNCKQGIIDEPARIDDVVIPSVPLPCDDVDGGAAALGGEEYAGGVGGAALAAEVVDAHARAFQSRPDSGDDGDAGGGLRQKFPERRGKGNEKERGLPITVRFW

SEQ ID NO: 84513 - protein, 80 aa, Setaria italica
  misc_feature (60)..(60): Xaa can be any naturally occurring amino acid
  Transcript Sequence Number=SeqID_18539
QAWDHLNSTVEALNSEAMEIQAKAEKNMRLVSRGINTLELVTILTVSLNLVAVLVLLVGXPLRLQKLCYLCLALCWILTA

SEQ ID NO: 84514 - protein, 126 aa, Setaria italica
  Transcript Sequence Number=SeqID_18540
  Homolog annotation: Hit_ID=Q9M878; Match level="QueryCoverage=57%, HitCoverage=39%, E-value=5e-16, Identity=53%"; Hit description =F16B3.27 protein
  Subcellular localization annotation: CTP_CleavageSite=57; ConfidenceScore=5.17e-01
PSPCGLLLLFLHALTAVFSAAGCSGSFTAPATPAQWHNAHTAGAALTAIFQGAVALLAFTRTSDFLAELQSYVRDEDGAVILKMVGGLGTAIFVLEWAALALAFSLRLDDEDDDDLHAKNWQSYNV

SEQ ID NO: 84515 - protein, 49 aa, Setaria italica
  Transcript Sequence Number=SeqID_18541
  Homolog annotation: Hit_ID=B6TC58; Match level="QueryCoverage=100%, HitCoverage=20%, E-value=6e-16, Identity=86%"; Hit description=Ids4 -like protein
VAALLTMQEVRSGSSTVGHFSLPPMTPLPESDWLAQSVQPPPSPLIPTQ

SEQ ID NO: 84516 - protein, 110 aa, Setaria italica
  Transcript Sequence Number=SeqID_18542
  Gene Ontology: Mol. function=serine-type endopeptidase activity
MQDKKGNAVAPKKFDKLQTPASHKDVGLFRVTGVFPSISMDGKRLAFVDNEFKAVWVADKDGLRVIHKENGENKVFSTAWSNSKEKTILYICDGPAFTRAKTVEIKAIVK

SEQ ID NO: 84517 - protein, 67 aa, Setaria italica
  Transcript Sequence Number=SeqID_18543
MTEEVIKEVITSTPASADPKCEDLLINSPVIIDGTSTTLDVKRKEKPVPHYLRASSRSCHCTNLSKF

SEQ ID NO: 84518 - protein, 58 aa, Setaria italica
  Transcript Sequence Number=SeqID_18544
  Gene Ontology: Mol. function=translation initiation factor activity; Cellular component=plasma membrane; Biological process=translation
  Homolog annotation: Hit_ID=P35683; Match level="QueryCoverage=100%, HitCoverage=14%, E-value=1e-25, Identity=96%"; Hit description =Eukaryotic initiation factor 4A-1
MAGMAPEGSQFDAKHYDSKMQELLNTGETEEFFTSYDEVFESFDDMGLQENLLRGIYA

SEQ ID NO: 84519 - protein, 69 aa, Setaria italica
  Transcript Sequence Number=SeqID_18545
  Gene Ontology: Mol. function=nucleic acid binding; Cellular component= plasma membrane; Biological process=translation
  Homolog annotation: Hit_ID=P35683; Match level="QueryCoverage=71%, HitCoverage=11%, E-value=3e-20, Identity=95%"; Hit description =Eukaryotic initiation factor 4A-1
CDQDGETAYATCQTHVQVSLVINYDLPTQPENYLHRIGRSGRFGRKGVAINFVTRDDERMLFGRQLLNH

SEQ ID NO: 84520 - protein, 66 aa, Setaria italica
  Transcript Sequence Number=SeqID_18546
  Gene Ontology: Mol. function=metallopeptidase activity; Biological process=proteolysis
MVFCFSLKKLLFILLQAQFLLDGSSGPGMWIVPITAGCGSYGMQKKFLLKGKSDRLDIRNISSQCR

SEQ ID NO: 84521 - protein, 35 aa, Setaria italica
  Transcript Sequence Number=SeqID_18547
MCHLLQIYDIFQLLPSKIQVGVFSATMPPEALEIT

SEQ ID NO: 84522 - protein, 91 aa, Setaria italica
  Transcript Sequence Number=SeqID_18548
  Homolog annotation: Hit_ID=P35683; Match level="QueryCoverage=43%, HitCoverage=9%, E-value=9e-12, Identity=85%"; Hit description =Eukaryotic initiation factor 4A-1
  Subcellular localization annotation: CTP_CleavageSite=44; ConfidenceScore=5.11e-01
PRLDIETPPTLSLHPTYGDISTKTSLIRSPYHFFLFCFVFSSTRSQKVSDVGRQLLNHHFVTRDDERMLFDIQRFYNVVIEELPANVADLL

SEQ ID NO: 84523 - protein, 188 aa, Setaria italica
  Transcript Sequence Number=SeqID_18549
  Gene Ontology: Mol. function=translation initiation factor activity; Cellular component=plasma membrane; Biological process=translation
  Homolog annotation: Hit_ID=P35683; Match level="QueryCoverage=76%, HitCoverage=34%, E-value=9e-69, Identity=90%"; Hit description =Eukaryotic initiation factor 4A-1
  Pfam annotation: Domain name=DEAD; Domain location=9-176; Score =136.2; E_value=1e-37; Accession=PF00270.21; Description=DEADDEAH box helicase
WFLKTVGIDASQKVLFCKGLDVIQQAQSGTGKTATFCSGILQQLDYGLVECQALVLAPTRELAQQIEKVMRALGDYLGVKVHACVGGTSVREDQRILASGVHVVVGTPGRVFDMLRRQSLRPDNIKMFVLDEADEMLSRGFKDQVCFLLLFMLQLWCYDHSCFILVMLLLSVFCLVMLHAPVVYPVVC

SEQ ID NO: 84524 - protein, 67 aa, Setaria italica
  misc_feature (39)..(39): Xaa can be any naturally occurring amino acid
  misc_feature (43)..(43): Xaa can be any naturally occurring amino acid
  Transcript Sequence Number=SeqID_18550
MTQINTIIRSYIVLNKNTKDEKTPAPAASPLHTNEPPQXHIAXRPRQLQKFPKHGIRKNHKLSMTTT

SEQ ID NO: 84525 - protein, 188 aa, Setaria italica
  misc_feature (9)..(9): Xaa can be any naturally occurring amino acid
  Transcript Sequence Number=SeqID_18551
  Gene Ontology: Mol. function=metallopeptidase activity; Cellular component=plasma membrane; Biological process=proteolysis
  Homolog annotation: Hit_ID=Q6K4E7; Match level="QueryCoverage=100%, HitCoverage=21%, E-value=2e-75, Identity=73%"; Hit description =Putative puromycin-sensitive aminopeptidase
ASEVDEIFXAISYDKGASVIRMLQNYLGAERFQKALASYIKKFAYSNAKTEDLWAVLEEKSGEPIKNLMTTWTKQQGYPVINAKLKGNFLELEQAQFLLDGSSGPGMWIVPITAGCGSYGMQKKFLLKGKSDRLDIRNISSQCGNQEKSGNFWIKLNINQTGFYRVQYDDNLSAALQNPLQRASWTVM

SEQ ID NO: 84526 - protein, 62 aa, Setaria italica
  Transcript Sequence Number=SeqID_18552
  Gene Ontology: Mol. function=nucleic acid binding; Cellular component= plasma membrane; Biological process=translation
  Homolog annotation: Hit_ID=P35683; Match level="QueryCoverage=100%, HitCoverage=14%, E-value=8e-29, Identity=95%"; Hit description =Eukaryotic initiation factor 4A-1
INYDLPTQPENYLHRIGRSGRFGRKGVAINFVTRDDERMLFDIQKFYNVTVEELPANVADLL

SEQ ID NO: 84527 - protein, 172 aa, Setaria italica
  misc_feature (89)..(89): Xaa can be any naturally occurring amino acid
  Transcript Sequence Number=SeqID_18553
  Gene Ontology: Mol. function=translation initiation factor activity; Cellular component=plasma membrane; Biological process=translation
  Homolog annotation: Hit_ID=P35683; Match level="QueryCoverage=100%, HitCoverage=41%, E-value=9e-95, Identity=97%"; Hit description =Eukaryotic initiation factor 4A-1
  Pfam annotation: Domain name=Helicase_C; Domain location=57-133; Score=118.0; E_value=3.1e-32; Accession=PF00271.23; Description =Helicase conserved C-terminal domain
LVKRDELTLEGIKQFYANVEKEDWKLDTLCDLYETLAITQSVIFVNTRRKVDWLTDKMRSRDHTVSATHGDMDQNTRDIIMREFRSGSXRVLITTDLLARGIDVQQVSLVINYDLPTQPENYLHRIGRSGRFGRKGVAINFVTRDDERMLFDIQRFYNVVIEELPANVADLL

SEQ ID NO: 84528 - protein, 216 aa, Setaria italica
  misc_feature (145)..(145): Xaa can be any naturally occurring amino acid
  Transcript Sequence Number=SeqID_18554
  Gene Ontology: Mol. function=translation initiation factor activity; Cellular component=plasma membrane; Biological process=translation
  Homolog annotation: Hit_ID=P35683; Match level="QueryCoverage=99%, HitCoverage=51%, E-value=1e-116, Identity=95%"; Hit description =Eukaryotic initiation factor 4A-1
  Pfam annotation: Domain name=Helicase_C; Domain location=98-177; Score=94.0; E_value=5.2e-25; Accession=PF00271.23; Description =Helicase conserved C-terminal domain
MQIYDIFQLLPSKIQVGVFSATMPPEALEITRKFMNKPVRILVKRDELTLEGIKQFYVNVEKEDWKLDTLCDLYETLAITQSVIFVNTRRKVDWLTDKMRSRDHTVSATHGDMDQNTRDIIMREFRSGSSRVLITTDLLARGIDXVTRQGSTLVINYDLPTQPENYLHRIGRSGRFGRKGVAINFVTRDDERMLFDIQRFYNVVIEELPANVADLL

SEQ ID NO: 84529 - protein, 104 aa, Setaria italica
  Transcript Sequence Number=SeqID_18555
  Subcellular localization annotation: CTP_CleavageSite=33; ConfidenceScore=5.12e-01
QMSNLKGWILLIRTASSNQSDQTTKITRQIQIRIAKPRQRSARHPLSTSTALQNHSKPTTITIHPRNAGNKQAKRLGNQSIARESGGRGGDRTHGGGGAAGVLG

SEQ ID NO: 84530 - protein, 811 aa, Setaria italica
  misc_feature (373)..(373): Xaa can be any naturally occurring amino acid
  misc_feature (412)..(412): Xaa can be any naturally occurring amino acid
  Transcript Sequence Number=SeqID_18556
  Gene Ontology: Mol. function=metallopeptidase activity; Cellular component=plasma membrane; Biological process=proteolysis
  Homolog annotation: Hit_ID=Q6K4E7; Match level="QueryCoverage=99%, HitCoverage=94%, E-value=0.0, Identity=70%"; Hit description =Putative puromycin-sensitive aminopeptidase
  Pfam annotation: Domain name=Peptidase_M1; Domain location=1-349; Score=504.9; E_value=1e-148; Accession=PF01433.12; Description =Peptidase family M1
AVSAPTRFLVLNAADLSVDRASIRFRDLAPKDVVFFEDDEILVLGFSNELPLGEGVLSMKFNGTLNDQMRGFYRSKYQYKGKMKNMAVTQFESVDARRCFPCWDEPSFKAKFKLTLEVPPGLVALSNMPIANQTLTGPFKTISYEESPLMSTYLVAIVVGLLEYIEGVTPEGTKVRVYTQVGKSNQGKFALDVGVKSLHLYKDYFGTPYPLPKLDMVAIPDFSAGAMENYGLVTFREVALLFDEESSSESSKQNIAITVAHELAHQWFGNLVTMEWWTHLWLNEGFATWMSHLAVDSFFPQWNIWTQFLDDTTAGLKLDSLEESHPIEVEIHHASEVDEIFDAISYDKGASVIRMLQNYLGAERFQKALASYXKKFAYSNAKTEDLWAVLEEKSGEPIKNLMTTWTKQQGHXLLDGSSGPGMWIVPITAGCGSYGMQKKFLLKGKSDRLDIRNISSQCGNQEKSGNFWIKLNINQTGFYRVQYDDNLSAALQNALLSKKLSVMDKIGIVEDSHALSMACKQTLTSLLRLLYAYRDEADYSVLSHINTVSLSVAKISVDATPGLVGDIKQLLIKLLLPPAVKLGWDPKNSESHLDALLRPVLLVALVKLGHDKTINEGVRRFGIFVHDRNTSLLPPDTRKAAYLAAMQNVTSSYRSAYNDLLKVYRESDEAEEKSRVLSTLCFCKDKNIVLESLNLLFTNEVRSQDAYYVLQGLGVETRETAWLWLKSSWDRITKKYSDTQDGGFIRYIVTLFSSNEKAAEFSSFFASRKKPEFQRTLKQSLESVRVNARWIQGIRSETRLAQTVQELLRRP

SEQ ID NO: 84531 - protein, 114 aa, Setaria italica
  misc_feature (16)..(16): Xaa can be any naturally occurring amino acid
  Transcript Sequence Number=SeqID_18557
  Pfam annotation: Domain name=PsbX; Domain location=77-114; Score =31.6; E_value=3.1e-06; Accession=PF06596.3; Description=Photosystem II reaction centre X prot
  Subcellular localization annotation: CTP_CleavageSite=42; ConfidenceScore=5.75e-01
MATASLSAVAAPLSVXPGLRKPTSSFQPLQLRARPAARMAVRASASMKEKAAAGLTAAAMAAALVLPDVAEAAQSGLTPSLKNFLLSIVSGGVVLVAIVGAVVAVSNFDPVKRA

SEQ ID NO: 84532 - protein, 411 aa, Setaria italica
  misc_feature (223)..(223): Xaa can be any naturally occurring amino acid
  Transcript Sequence Number=SeqID_18558
  Gene Ontology: Mol. function=translation initiation factor activity; Cellular component=plasma membrane; Biological process=translation
  Homolog annotation: Hit_ID=P35683; Match level="QueryCoverage=100%, HitCoverage=100%, E-value=0.0, Identity=95%"; Hit description =Eukaryotic initiation factor 4A-1
  Pfam annotation: Domain name=DEAD; Domain location=61-228; Score =221.8; E_value=1.8e-63; Accession=PF00270.21; Description=DEADDEAH box helicase
  Pfam annotation: Domain name=Helicase_C; Domain location=296-372; Score=119.3; E_value=1.3e-32; Accession=PF00271.23; Description =Helicase conserved C-terminal domain
  Pfam module annotation: Pfam domain module=DEAD::Helicase_C; Domain location=61-228::296-372
MAGLAPEGSQFDGKQYDNKMQELLTEEFFTSYDEVCESFDNMGLQENLLRGIYAYGFEKPSAIQQRGIVPFCKGLDVIQQAQSGTGKTATFCSGILQQLDYGLVECQALVLAPTRELAQQIEKVMRALGDYLGVKVHACVGGTSVREDQRILASGVHVVVGTPGRVFDMLRRQSLRPDNIKMFVLDEADEMLSRGFKDQIYDIFQLLPSKIQVGVFSATMPPXEALEITRKFMNKPVRILVKRDELTLEGIKQFYVNVEKEDWKLDTLCDLYETLAITQSVIFVNTRRKVDWLTDKMRSRDHTVSATHGDMDQNTRDIIMREFRSGSSRVLITTDLLARGIDVQQVSLVINYDLPTQPENYLHRIGRSGRFGRKGVAINFVTRDDERMLFDIQKFYNVTVEELPANVADLL

SEQ ID NO: 84533 - protein, 418 aa, Setaria italica
  misc_feature (76)..(76): Xaa can be any naturally occurring amino acid
  misc_feature (187)..(187): Xaa can be any naturally occurring amino acid
  misc_feature (230)..(230): Xaa can be any naturally occurring amino acid
  Transcript Sequence Number=SeqID_18559
  Gene Ontology: Mol. function=translation initiation factor activity; Cellular component=plasma membrane; Biological process=translation
  Homolog annotation: Hit_ID=P35683; Match level="QueryCoverage=100%, HitCoverage=100%, E-value=0.0, Identity=90%"; Hit description =Eukaryotic initiation factor 4A-1
  Pfam annotation: Domain name=DEAD; Domain location=65-235; Score =181.4; E_value=2.5e-51; Accession=PF00270.21; Description=DEADDEAH box helicase
  Pfam annotation: Domain name=Helicase_C; Domain location=303-379; Score=119.3; E_value=1.3e-32; Accession=PF00271.23; Description =Helicase conserved C-terminal domain
  Pfam module annotation: Pfam domain module=DEAD::Helicase_C; Domain location=65-235::303-379
MAGMAPEGSQFDAKHYDSKMQELLNTGETEEFFTSYDEVFESFDDMGLQENLLRGIYAYGFEKPSAIQQRGIVPFXKGLDVIQQAQSGTGKTATFCSGILQQLDYGLVECQALVLAPTRELAQQIEKVMRALGDYLGVKVHACKWVELQSARTKGFLLGGVHVVVGTPGRVFDMLRRQSLRPCILLXKMFVLDEADEMLSRGFKDQIYDIFQLLPSKIQVGVFSATMPPXEALEITRKFMNKPVRILVKRDELTLEGIKQFYVNVEKEDWKLDTLCDLYETLAITQSVIFVNTRRKVDWLTDKMRSRDHTVSATHGDMDQNTRDIIMREFRSGSSRVLITTDLLARGIDVQQVSLVINYDLPTQPENYLHRIGRSGRFGRKGVAINFVTRDDERMLFDIQRFYNVVIEELPANVADLL

SEQ ID NO: 84534 - protein, 430 aa, Setaria italica
  Transcript Sequence Number=SeqID_18560
  Gene Ontology: Mol. function=binding; Cellular component=nuclear pore; Biological process=protein import into nucleus, docking
  Homolog annotation: Hit_ID=Q5VN12; Match level="QueryCoverage=100%, HitCoverage=36%, E-value=0.0, Identity=76%"; Hit description =Putative Importin 9
AQHIADPFISIDAIEVLEAIKNAPGCLQPLVSRILPTIGSILGKPKIQPDGLVAGSLDLLAMILKNAPTVVVKAVFDTCFVSTVQIVLQSDDHGEMQNATECLAAFISGGRQELLVWGGEQGHTLKMLLDAASRLLDPMLESSVSLFVGSFVLQLILQMPSHLSAHIPDLIAAIVRRMQTSSIAGLKSSLIVIIARLVHLSVPNVDQFINLLLSIPAQGYGNSLVYIMSAWSELQGEIQGAYQIKVTTTALALLISTRHPELSKVEVQGHLIKTSTGITTRSKARVAPDQWTKIPLPAKIFSLLADTLAEIQEQIGGGSDDDCEEDSDWEEVHNGDTSIPDDIIYSASVPSNANPSVEHLNAMAKVFDEDEDDSYDDDLTKNDPVNEVKLADFLTNIFTNLWENDRPLFEYLCQGLSDSQRSAVEKVLRK

SEQ ID NO: 84535 - protein, 228 aa, Setaria italica
  misc_feature (46)..(46): Xaa can be any naturally occurring amino acid
  misc_feature (179)..(179): Xaa can be any naturally occurring amino acid
  Transcript Sequence Number=SeqID_18561
  Gene Ontology: Mol. function=zinc ion binding; Cellular component =intracellular
  Homolog annotation: Hit_ID=B6TCQ2; Match level="QueryCoverage=72%, HitCoverage=36%, E-value=4e-64, Identity=77%"; Hit description=CCT motif family protein
  Pfam annotation: Domain name=CCT; Domain location=191-228; Score =52.7; E_value=1.4e-12; Accession=PF06203.6; Description=CCT motif
SATLMSDLDTCDKPLVGSSSGAGVNLLPLATDQAAGSVDSTTPKNXNYSPLLLHNLLPCAIYVPYTPDKDMFSKDSIYEDFCVDDVDLAFENYEELFGTSHIQTEQLFDDAGIDSYFEVNEVPAGNSTEPKLVQPANSNAVSADSGMSNPGVKGDSSVCIPARQARSSLSLSFSGLTGXPGPESSTPGGSRDSAITRYKEKKKRRKFDKKIRYASRKARADVRKRVKG

SEQ ID NO: 84536 - protein, 324 aa, Setaria italica
  Transcript Sequence Number=SeqID_18562
  Gene Ontology: Mol. function=zinc ion binding; Cellular component =intracellular
  Homolog annotation: Hit_ID=B6TCQ2; Match level="QueryCoverage=99%, HitCoverage=79%, E-value=1e-132, Identity=75%"; Hit description=CCT motif family protein
  Pfam annotation: Domain name=CCT; Domain location=267-311; Score =84.3; E_value=4.5e-22; Accession=PF06203.6; Description=CCT motif
PDTKGQTINCYSGCPSSAELSRIWSFVSDIPNVAPEPNCEQGISMMSISDSGVSNQDNAAGDNNLLDMASATLMSDLDTCDKPLVGSSSGAGVNLLPLATDQAAGSVDSTTPKVPYTPDKDMFSKDSIYEDFCVDDVDLAFENYEELFGTSHIQTEQLFDDAGIDSYFEVNEVPAGNSTEQPKLVQPANSNAVSADSGMSNPGVKGDSSVCIPARQARSSLSLSFSGLTGESSAGDHQDCVVSSLLLMGEPPWQAPGPESSTPGGSRDSAITRYKEKKKRRKFDKKIRYASRKARADVRKRVKGRFVKAGEAYDYDPLSQTRSY

SEQ ID NO: 84537 - protein, 49 aa, Setaria italica
  Transcript Sequence Number=SeqID_18563
MSHAFQQPKLVQPANSNAVSADSGMSNPGVKGDSLSSLDNTLDKGQALV

SEQ ID NO: 84538 - protein, 123 aa, Setaria italica
  misc_feature (17)..(17): Xaa can be any naturally occurring amino acid
  misc_feature (45)..(45): Xaa can be any naturally occurring amino acid
  misc_feature (99)..(99): Xaa can be any naturally occurring amino acid
  Transcript Sequence Number=SeqID_18564
  Gene Ontology: Mol. function=amino acid transmembrane transporter activity; Cellular component=integral to membrane; Biological process=amino acid transport
  Homolog annotation: Hit_ID=B9HWC4; Match level="QueryCoverage=99%, HitCoverage=27%, E-value=2e-33, Identity=63%"; Hit description=Amino acid transporter
THFNNDNSAGIHNNLYXFVLGLLMSQYTLSGYDASAHMTEETKNXADRNGPIGIISAIGISIIVGWGYIIGITFAVKDIPYLLNPDNDAGGYAIAEVFXYLPSKSRYGNGVGGIICLWIVAIT

SEQ ID NO: 84539 - protein, 278 aa, Setaria italica
  Transcript Sequence Number=SeqID_18565
  Gene Ontology: Mol. function=nucleoside-triphosphatase activity; Biological process=cell division
  Homolog annotation: Hit_ID=B9RIQ4; Match level="QueryCoverage=80%, HitCoverage=26%, E-value=1e-100, Identity=77%"; Hit description=ATP binding protein, putative
  Pfam annotation: Domain name=AAA; Domain location=35-219; Score =280.1; E_value=4.9e-81; Accession=PF00004.21; Description=ATPase family associated with various cellular activities (AAA)
  Pfam annotation: Domain name=AAA_2; Domain location=31-162; Score= -50.4; E_value=0.087; Accession=PF07724.6; Description=ATPase family associated with various
  Pfam annotation: Domain name=AAA_3; Domain location=35-161; Score= -18.9; E_value=0.043; Accession=PF07726.3; Description=ATPase family associated with various
  Pfam annotation: Domain name=AAA_5; Domain location=35-167; Score =2.1; E_value=0.00064; Accession=PF07728.6; Description=ATPase family associated with various
  Pfam module annotation: Pfam domain module=AAA::AAA_2::AAA_3::AAA_5; Domain location=35-219::31-162::35-161::35-167
IGALADIKESIQELVMLPLQRPDLFNGGLLKPCRGILLFGPPGTGKTMLAKAVANEAGASFINISMSTIVSKWYGEAEKSIRALFSLATKIAPAIIFVDEVDSMLGSRERSNEHEVSRRIKNEFMTHWDGLLSKPNERILVLAATNRPFDLDEAIIRRFEHRVMVGLPTLESRELILKKLLSKEKVEDIDFKELAKMTEGYSGSDLKNLCVTAAYRPVRELLQKEKEMKKDKKAKDEEGKKVQAEEPTNQGSGKEKPEAAKPRKSNQGKKVPKGAKTQ

SEQ ID NO: 84540 - protein, 455 aa, Setaria italica
  Transcript Sequence Number=SeqID_18566
  Gene Ontology: Cellular component=membrane; Biological process =transport
  Homolog annotation: Hit_ID=C1E744; Match level="QueryCoverage=73%, HitCoverage=86%, E-value=1e-16, Identity=25%"; Hit description =Drug/Metabolite transporter superfamily
  Pfam annotation: Domain name=DUF6; Domain location=282-417; Score =10.0; E_value=0.021; Accession=PF00892.12; Description=Integral membrane protein DUF6
  Pfam annotation: Domain name=DUF6; Domain location=50-256; Score=5.9; E_value=0.035; Accession=PF00892.12; Description=Integral membrane protein DUF6
  Pfam annotation: Domain name=DUF914; Domain location=181-448; Score= -208.5; E_value=0.037; Accession=PF06027.4; Description=Eukaryotic protein of unknown function (DUF914)
  Pfam module annotation: Pfam domain module=DUF6::DUF6::DUF914; Domain location=282-417::50-256::181-448
MGSMDSSQHDSTSAPGSLEGVDGSRSSINKWTKMTSTDSWRWCLGLIYIVAVASIWIAASYVVQSVVDGGVSPFLITYICNSLFVVYIPIIEVARYFEGSVSNFWTKLKCKDAESLQQSADLESVNLLQSGGHEINAALDQSPTRSPEGTLTPDARFPAQTELNVADCSKGLDAKGRWTRARVAKVSMIVCPFWFLAQLTFNLSLRYTTVTSNTILSSTSSLFTFLVALVFLGETFTWLKLVSVLLCMGGTIIVSLADSSSSVNAIATNPLLGDFLSIVSAGCYAIYITLIRKKLPDEKEGEGQVSMAQFLGFLGLFNLLFFLPVALVLNFAKLEPFHRLTWEQVGLIVGKGLLDNVLSDYLWAKAVLLTTTTVATAGLTIQVPIAAVVDTLTGHAPHLLNYVGAAAVLVGFAGINIPVGESPQAAQQEQETPIASMVDDPLHLPTSRNATDAIS

SEQ ID NO: 84541 - protein, 111 aa, Setaria italica
  Transcript Sequence Number=SeqID_18567
  Gene Ontology: Mol. function=serine-type endopeptidase inhibitor activity; Cellular component=extracellular region
  Homolog annotation: Hit_ID=B6SQU8; Match level="QueryCoverage=60%, HitCoverage=58%, E-value=3e-16, Identity=54%"; Hit description =Bowman-Birk type trypsin inhibitor
  Pfam annotation: Domain name=Bowman-Birk_leg; Domain location=46-72; Score=18.2; E_value=0.01; Accession=PF00228.12; Description=Bowman -Birk serine protease inhibitor family
  Pfam annotation: Domain name=Bowman-Birk_leg; Domain location=74-101; Score=6.1; E_value=0.81; Accession=PF00228.12; Description=Bowman -Birk serine protease inhibitor family
  Pfam module annotation: Pfam domain module=Bowman-Birk_leg::Bowman -Birk_leg; Domain location=46-72::74-101
MRPQVLLVTLAVLAVLATLPLLSKGSGEEGGAAVADDAANASSWPCCNQCGFCNRKNPPDCSCLDISFQGCHPACMNCVKYTSTTEAPVYRCVDVLTNFCKRRCTPTAAAI

SEQ ID NO: 84542 - protein, 139 aa, Setaria italica
  Transcript Sequence Number=SeqID_18568
  Gene Ontology: Mol. function=DNA binding; Biological process =regulation of transcription
  Homolog annotation: Hit_ID=Q9SNM6; Match level="QueryCoverage=63%, HitCoverage=20%, E-value=2e-16, Identity=57%"; Hit description =Putative NAM (No apical meristem) protein
SSPPPAAIRGAAGDQAAAQEQEGWVICRVFKKKNLLHHGQSSGGGATASVTGHTGAASSKMAAPMEGSPSNCSSVTVSDHAKAQLLHSASDDALDHILQYIGGRPCGSNTKHHDTKPALLDHHHHHHLATTTTATACTG

SEQ ID NO: 84543 - protein, 156 aa, Setaria italica
  Transcript Sequence Number=SeqID_18569
  Gene Ontology: Mol. function=zinc ion binding
  Homolog annotation: Hit_ID=Q259G9; Match level="QueryCoverage=98%, HitCoverage=17%, E-value=5e-37, Identity=50%"; Hit description =H0103C06.5 protein
  Pfam annotation: Domain name=DUF789; Domain location=1-151; Score= -18.1; E_value=1.7e-10; Accession=PF05623.4; Description=Protein of unknown function (DUF789)
ELIAGVKSVNGQIFGDPKGLELSLHDLHPASWYCVAWYPIYRIPDGKLQAAFLTYHSLGHWIRRSSSADEAVVLPVIGLQSYNDKAERWFEMRKSDSEGGEPAELQYSEASEVLKERVRALNEAAAGMSRAKVVKNGPIMSRNRHPDYEFFLSRYR

SEQ ID NO: 84544 - protein, 108 aa, Setaria italica
  Transcript Sequence Number=SeqID_18570
STARGRGGKKGDGRREGRRRKERVAGRGQERRRRPQPPGEKERSSDRFVRKASRSLAGPASQRAWYVIASSIHGMRSTKLELLCSNCCYTSWNSEEKSSVNTKLWEWS

SEQ ID NO: 84545 - protein, 268 aa, Setaria italica
  Transcript Sequence Number=SeqID_18571
  Gene Ontology: Mol. function=transferase activity, transferring nitrogenous groups; Cellular component=mitochondrial matrix; Biological process=amino acid metabolic process
  Homolog annotation: Hit_ID=Q43057; Match level="QueryCoverage=90%, HitCoverage=33%, E-value=1e-77, Identity=93%"; Hit description =Aspartate aminotransferase
MAALSRAASSAIRRPLPRLQLQARAMASSLFGHVEPAPKDPILGVTEAFLADPSPDKVNVGVGAYRDDNGQPVVLDCVREAERRIAGNLNMEYLPMGGSIKMIEESLKLAYGEDSEFIKDKRIAAVPALFGHVEPAPKDPILGVTEAFLADPSPDKVNVGVGAYRDDNGQPVVLDCVREAERRIAGNLNMEYLPMGGSIKMIEESLKLAYGEDSEFIKDKRIAAVQALSGTGACRLFADFQKRFLPDSQIYIPTPTWSNHHNIWRDAQ

SEQ ID NO: 84546 - protein, 781 aa, Setaria italica
  Transcript Sequence Number=SeqID_18572
  Gene Ontology: Cellular component=plasma membrane
  Homolog annotation: Hit_ID=Q5GAP5; Match level="QueryCoverage=92%, HitCoverage=92%, E-value=1e-175, Identity=49%"; Hit description =Putative paramyosin
  Pfam annotation: Domain name=DUF827; Domain location=145-675; Score =806.1; E_value=2.2e-239; Accession=PF05701.3; Description=Plant protein of unknown function (DUF827)
MEVLDSNGHRETRMQNTENPAPVSVKSPDMSLEVQEKLPHNLAEHQKELTSPVGHTVSSSPEMLSHIRPAQASKEEGDHAILPNKTEAKNISENGFTSVNTMPAAEMKSKENNMNHHKNIAVAQENIVKSEKGSEGSYRGLVDTTAPFESVKEAVTKFGGIIDWKAYRAKSLERRRVMQLELEKVQQEIPQFKEDWETAEVAKSHVMEELERTSRLVEELKHKLERAQLEVDQAKQDSELALLRAQEMEQGIDDEASVIAQTQMTVAKERHQKAVEELKLLKEELTSMHEQYAVLATERDVAIKRAEEVVAAAKDTEKQVEELTLELIASKESLEVAHASHHEAEEHRLGAALAKEQDCLAWEKELQQVQEELHQLNEQIVSKANVEAEIDGNEHKLLSLKSELAAYVDNKLNEEAGVIQEQGSDEAKEISRSIKQALVSKRKELDEYRGKLENAKTEANLIRVIAESLRSELDREKASLSTLQQSEGMASITVSSLDAELERTKQEIEMIHKKEAETREKMAELPRMLQQAAKEAEDAKMAAQSAQEELRKAKEEAEQTKAAATTADIRLRAVLKEIEASKASERLAVVAAQAMQESEETGSVGDSPRGVTLPINEYHALSKRVHEAEEVANEKVAAALAQIELAKESESRSLEKLHEASKEMDEKKSDLRIALERAEKANEGKLGAEQELRRWRAEHMQRRKAHEATKHAVSTVSTPPRTFDEHKSSHQEDDVFLTDPKLHRSTGSVDHFVSDEKKVQKKKSFFPQLSTLLSRKAQTQT

SEQ ID NO: 84547 - protein, 241 aa, Setaria italica
  Transcript Sequence Number=SeqID_18573
  Gene Ontology: Mol. function=transferase activity, transferring nitrogenous groups; Cellular component=mitochondrial matrix; Biological process=amino acid metabolic process
  Homolog annotation: Hit_ID=Q43057; Match level="QueryCoverage=79%, HitCoverage=44%, E-value=1e-110, Identity=94%"; Hit description =Aspartate aminotransferase
  Pfam annotation: Domain name=Aminotran_1_2; Domain location=10-240; Score=6.4; E_value=1.9e-07; Accession=PF00155.13; Description =Aminotransferase class I and II
SSRTKVLTFGRSVVLTGYVLTVLVPFVVLDCVREAERRIAGNLNMEYLPMGGSIKMIEESLKLAYGEDSEFIKDKRIAAVQALSGTGACRLFADFQKRFLPDSQIYIPTPTWSNHHNIWRDAQVPQKTFTYYHPESRGLDFSGLMNDIKNAPDGSFFLLHACAHNPTGVDPTEEQWREISHQFKVKKHFPFFDMAYQGFASGDPERDAKAIQLFFEDASFQKQNSQKWPVTILHFTKACTS

SEQ ID NO: 84548 - protein, 112 aa, Setaria italica
  Transcript Sequence Number=SeqID_18574
  Gene Ontology: Mol. function=transferase activity, transferring groups other than amino-acyl groups
  Homolog annotation: Hit_ID=Q657X9; Match level="QueryCoverage=100%, HitCoverage=33%, E-value=8e-37, Identity=70%"; Hit description =Hsr201-like
VWRAWVRALDPPGALRVKLLFSVNVRRRVKPELPRGYYGNGFVLGCAESTAAQLVSPSPSAAARYGVRLVQEAKECVDDDYVRSMVDLLEERRGARPDLAASLVISAWTRLG

SEQ ID NO: 84549 - protein, 58 aa, Setaria italica
  misc_feature (51)..(51): Xaa can be any naturally occurring amino acid
  Transcript Sequence Number=SeqID_18575
  Gene Ontology: Mol. function=transcription initiation factor activity; Cellular component=transcription factor TFIID complex; Biological process=transcription initiation
  Homolog annotation: Hit_ID=Q5N902; Match level="QueryCoverage=100%, HitCoverage=19%, E-value=6e-19, Identity=81%"; Hit description =Transcription initiation factor IID (TFIID) subunit A-like protein
  Pfam annotation: Domain name=TFIID_20kDa; Domain location=1-42; Score= 34.9; E_value=3.2e-07; Accession=PF03847.5; Description=Transcription initiation factor TFIID sub
VSYADDCFKQVATFACSLAKHRKSNTLEAKDVLLHAERSWNITLPGFSGDXEIKLYKK

SEQ ID NO: 84550 - protein, 93 aa, Setaria italica
  Transcript Sequence Number=SeqID_18576
  Gene Ontology: Mol. function=transcription initiation factor activity; Cellular component=transcription factor TFIID complex; Biological process=transcription initiation
  Homolog annotation: Hit_ID=Q5N902; Match level="QueryCoverage=88%, HitCoverage=27%, E-value=6e-39, Identity=91%"; Hit description =Transcription initiation factor IID (TFIID) subunit A-like protein
  Pfam annotation: Domain name=TFIID_20kDa; Domain location=1-53; Score= 97.8; E_value=3.7e-26; Accession=PF03847.5; Description=Transcription initiation factor TFIID sub
EKLDPEVEDVLMDIAEDFVESVATFACSLAKHRKSNTLEAKDVLLHAERSWNITLPGFSGDEIKLYKKQHINDIHRERLALVPTFFKFQQLSI

SEQ ID NO: 84551 - protein, 425 aa, Setaria italica
  misc_feature (262)..(262): Xaa can be any naturally occurring amino acid
  Transcript Sequence Number=SeqID_18577
  Gene Ontology: Mol. function=transcription initiation factor activity; Cellular component=transcription factor TFIID complex; Biological process=transcription initiation
  Homolog annotation: Hit_ID=Q5N902; Match level="QueryCoverage=40%, HitCoverage=58%, E-value=4e-58, Identity=68%"; Hit description =Transcription initiation factor IID (TFIID) subunit A-like protein
  Pfam annotation: Domain name=CBFD_NFYB_HMF; Domain location=294-358; Score=10.1; E_value=0.021; Accession=PF00808.15; Description=Histone- like transcription factor (CBFNF-Y) and archaeal histone
  Pfam annotation: Domain name=Histone; Domain location=292-361; Score=- 0.3; E_value=0.096; Accession=PF00125.16; Description=Core histone H2AH2BH3H4
  Pfam annotation: Domain name=TFIID_20kDa; Domain location=297-364; Score=149.6; E_value=9.3e-42; Accession=PF03847.5; Description =Transcription initiation factor TFIID sub
  Pfam module annotation: Pfam domain module=CBFD_NFYB_HMF::Histone::TFI ID_20kDa; Domain location=294-358::292-361::297-364
  Subcellular localization annotation: CTP_CleavageSite=79; ConfidenceScore=5.67e-01
RPRMRPPYTHLASPITMSSASSAATAAASSSASVPSSSSSAPPVPRGGVVIGVPAPRPAQTPAGYTGFVPPPSLAHQFGSMHRGPDQPPPPSSQFRQPSPGIQNIGMVGSLSTSQMRPGIISGPQQPRPGLPSSTTPIPSGSQMPGSQRTPSHALMRPMSVSSPSPSPALQQTPQNSSTFRPQQRPQVPQPRPQQSSPVTPHQQNIISAQQQQLPHNQLLQQQQQKQQQQSSSQQTQQNTTPKNQQQHSQQQAARTPVTMAXRKPDSPAIAKATVLQSADTAATDADGSETGTRLLNKRSIHELVAQIDPNEKLDPEVEDVLMDIAEDFVESVATFACSLAKHRKSNTLEAKDVLLHAERSWNITLPGFSGDEIKLYKKQHINDIHRERLALIKKSMATDTKNSAAQAATNQKNQTPKPPAPASP

SEQ ID NO: 84552 - protein, 427 aa, Setaria italica
  Transcript Sequence Number=SeqID_18578
  Gene Ontology: Mol. function=transferase activity, transferring groups other than amino-acyl groups
  Homolog annotation: Hit_ID=B6TZ41; Match level="QueryCoverage=97%, HitCoverage=95%, E-value=1e-100, Identity=51%"; Hit description =Transferase
  Pfam annotation: Domain name=Transferase; Domain location=12-423; Score=-17.1; E_value=4.6e-10; Accession=PF02458.7; Description =Transferase family
MVFEQEEEVAPGAVHGHRLSTVVPSSVTGEVDYALADADLAFKLHYLRGVYYYPAGDVARGITTKVLKDPMFPWLDDYFPVAGRVRRADDDAAGRRPYIKCNDCGVRIVEAKCDRDMADWLRDDAPDRLRQLCYDKVLGPELFFSPLLYVQITNFKCGGLALGFSWAHLIGDVQSAATCFNKWAQILSGKKPEATVLTPENKPLQGQSPAGAAAPRSVKQVGPIEDHWLVPAGRDMACYSFHVTEATLKKLEQQQGRHAAAAGTFELVSALLWQAVARIRGGTQTVTVVKTDAAARSGRALANEMKVGYVEASGSSPAKTDVAELAALLAKGVVDETAAVAAFPGDVLVYGGAHLTLVDMERVDVYGLEIKGQRPVHVEYGMDGVGEEGAVLVQPDADGRGRLVTAVLPKDEIESLRAAIGSALQVA

SEQ ID NO: 84553 - protein, 166 aa, Setaria italica
  Transcript Sequence Number=SeqID_18579
MVEPGRSAAAREANKNKSSTSTGAAMKKKLMSKKPEKEKDGGSGGCMTTRKQSSHCREPESPSYRLALKSIFSCRNSQQQPDSGSRSSNKLGCSAPSICKLKDSDSSQSQRVAQRPAADETAGEPCKRRASVSGGSERRVKKPLSEVSSVSKQLQLQRGGSSLSSS

SEQ ID NO: 84554 - protein, 80 aa, Setaria italica
  Transcript Sequence Number=SeqID_18580
LPLVFHALSSIIQLVIVPLISHTISDERRQCNHSNGNGSTQLLQRQKGSPSKLVSQPCNGKFKAEGTNGPQPQPFFLLNA

SEQ ID NO: 84555 - protein, 530 aa, Setaria italica
  misc_feature (53)..(53): Xaa can be any naturally occurring amino acid
  Transcript Sequence Number=SeqID_18581
  Gene Ontology: Mol. function=DNA-directed DNA polymerase activity; Cellular component=intracellular; Biological process=DNA replication
  Homolog annotation: Hit_ID=Q588V7; Match level="QueryCoverage=98%, HitCoverage=24%, E-value=0.0, Identity=62%"; Hit description =Helicase and polymerase containing protein TEBICHI
  Pfam annotation: Domain name=DNA_pol_A; Domain location=99-522; Score= 222.6; E_value=1e-63; Accession=PF00476.12; Description=DNA polymerase family A
AWVLWPDEESRTVPNLEKLVKRRLHSEGASAANRDGRWRNQMHKAAHNGCCRXRAAQTKALYTVLNKLLVSQNLYDLVHTIEGPLVNVLADMELWGIGADMDACLRARHIIIKKLKELEKEAYRLAGKSFSLNATADIADILYTHLKLPVPKGCEKGKLHPSTDKQSLDHLRDQHPIIPIIKEHRTLAKLLNGTLGSICSRAQLCTQSQRYIIHGNWLQTSTATGRLSMEEPNLQCVEHVVEFNTGKTDKEYSSVSEVDHHQINAREFFIPTQENWLLVTADYSQIELRLMAHFSKDPMLIELLSKPDGDVFTMIASRWVGKEEALISSKERENTKRFIYGILYGMGANSLAEQLECSTEEAAQKIQSFKRYFPGVSSWLHEAVASCRQKGYVETLMGRRRFLTKIMAGNGKEKAKAQRQAVNSICQGSAADIIKVAMIRVHSLITNRMKEDDSTDEVTRNFSEIGGKCHLILQVHDELVLEVDPCMVAQAGRLLQICMEEAASLLVPLRAKIKVGKTWGSLEPFYPEPR

SEQ ID NO: 84556 - protein, 113 aa, Setaria italica
  Transcript Sequence Number=SeqID_18582
CQHVPYLAYVDQMIFDRPFGNSPLAACDMYHQSLPLVFHALSSIIQLVIVPLISHTISDERRQCNHSNGNGSTQLLQRQKGSPSKLVSQPCNGKFKAEGTNGPQPQPFFLLNA

SEQ ID NO: 84557 - protein, 56 aa, Setaria italica
  Transcript Sequence Number=SeqID_18583
LSKLQALFTLCWSLIHVQMTIDYMSGVNSKFMERYGFSSPTVWPCTCILILFPFMW

SEQ ID NO: 84558 - protein, 415 aa, Setaria italica
  misc_feature (65)..(65): Xaa can be any naturally occurring amino acid
  Transcript Sequence Number=SeqID_18584
  Gene Ontology: Mol. function=[ribulose-bisphosphate carboxylase] -lysine N-methyltransferase activity; Cellular component=nucleus
  Homolog annotation: Hit_ID=A7KWL2; Match level="QueryCoverage=23%, HitCoverage=99%, E-value=1e-18, Identity=41%"; Hit description =Plastid ribulose-1,5 bisphosphate carboxylase/oxygenase large subunit ...
  Homolog annotation: Hit description=N-methyltransferase-related protein (Fragment)
  Pfam annotation: Domain name=Rubis-subs-bind; Domain location=282 -399; Score=1.0; E_value=0.014; Accession=PF09273.3; Description =Rubisco LSMT substrate-binding
  Pfam annotation: Domain name=SET; Domain location=17-263; Score=44.4; E_value=4.4e-10; Accession=PF00856.20; Description=SET domain
  Pfam module annotation: Pfam domain module=Rubis-subs-bind::SET; Domain location=282-399::17-263
PPEMEPADPDFYRIGYARMMRAYGIEFLEGPEGMGVYASRDVEPLRRARVIMEIPLELMLTITQXKPWMFFPDIIPLGHPIFDIIESTDPETDWDLRLACLLLYAFDTEDNFWQLYGDFLPGPDECTSLLLAPKEDLLELEDEDLVSEMLKHQQRAIDFWQKHWDKAIPLKLKRLARDHERFLWALSIVQSRSVNLKMRMGAFIQDANILAPYADMLNHSPNANCFLHWRFKDRMLEVMIKAGHAIKKGDEMTIDYMSGVNSKFMERYGFSSPTNPWELINFSSPAKIHMDSFLSVFNIAGLHDELYHNSALPSVETNFVDGAVVAAARALPTWSDGDVPAIPSVERKSAQALQEECRQMLDSFSTTIEQDQQILDSDARISKMREIAIKYRLHRKMLLQKIIDSLDIYQERILF

SEQ ID NO: 84559 - protein, 78 aa, Setaria italica
  Transcript Sequence Number=SeqID_18585
SAHGGERELSPEEDAESREGRLLREMMLRARREAEEEHQVPDEQLHAKRPAPARRATDYCLATSAVRARCSMGVHKPR

SEQ ID NO: 84560 - protein, 75 aa, Setaria italica
  misc_feature (41)..(41): Xaa can be any naturally occurring amino acid
  Transcript Sequence Number=SeqID_18586
  Gene Ontology: Mol. function=catalytic activity; Biological process =trehalose biosynthetic process
  Homolog annotation: Hit_ID=Q94AH8; Match level="QueryCoverage=61%, HitCoverage=5%, E-value=2e-17, Identity=86%"; Hit description=Alpha ,alpha-trehalose-phosphate synthase [UDP-forming] 6
QGDCDVWSYEDADPDFGSCQAKELHDHLESVLSNEPVSVKXGLNHVEVKPQVSLLPHKTATATNIQLPTCHLNSC

SEQ ID NO: 84561 - protein, 127 aa, Setaria italica
  misc_feature (53)..(53): Xaa can be any naturally occurring amino acid
  Transcript Sequence Number=SeqID_18587
  Gene Ontology: Mol. function=catalytic activity; Biological process =trehalose biosynthetic process
  Homolog annotation: Hit_ID=B9SNF1; Match level="QueryCoverage=74%, HitCoverage=12%, E-value=6e-36, Identity=77%"; Hit description =Trehalose-6-phosphate synthase, putative
MVLQGVSKGLVAKRILSTMQERGDLPDFILCVGDDRSDEDMFEVITAAAARGXPLHPEAEVFACTVGRKPSKAKYYLDDSADIVRLIQGLASVSDDQALHGGAPLAQTTRPLDQPNNQYPKVETERT

SEQ ID NO: 84562 - protein, 571 aa, Setaria italica
  misc_feature (559)..(559): Xaa can be any naturally occurring amino acid
  Transcript Sequence Number=SeqID_18588
  Gene Ontology: Mol. function=catalytic activity; Biological process =trehalose biosynthetic process
  Homolog annotation: Hit_ID=Q94AH8; Match level="QueryCoverage=100%, HitCoverage=65%, E-value=0.0, Identity=66%"; Hit description=Alpha ,alpha-trehalose-phosphate synthase [UDP-forming] 6
  Pfam annotation: Domain name=Glyco_transf_20; Domain location=69-566; Score=848.4; E_value=4.3e-252; Accession=PF00982.13; Description =Glycosyltransferase family 20
MVSRSYSNLLELASGAGGGGGGEPLPSLGRRRIPRVVTASGIVPDLDASDADADAASAASDHSSHAPRERVIIVANQLPVRATRRAGPGTGAGWDFAWDEDSLLLQVKDSLRAHHGRADVEFVYVGGLRDDVPPADHDEVAHDLLEGFRCVPTFLPADLRSRFYHGFCKQQLWPLFHYMLPLSPELGGRFDRQLWQAYVSVNKIFADKILEVISPDEDFVWVHDYHLMVLPTFLRKRFNRVKLGFFLHSPFPSSEIYKTLPVREELLRSLLNADLIGFHTFDYARHFLSCCSRMLGLKYESQRGYIALEYYGRTVTIKILPVGVHLEQLQSVLNLPETGVKVAELLKQFYHRNRLLLLGVDDMDIFKGISLKLLAFEQLLMQHPEWRGRVVLVQIANPARGKGKDVKEVQEESDAMVRRINDAFGQPDYQPVILIDKPLQFYERMAYYVVAEFCLVTAVRDGMNLIPYEYVIARQGNEMIDRILGLGPSSRKKSMLVVSEFIGCSPSLSGAIRVNPWNIDSVADAMDSALEMPEGEKVLRHEKHHRYVSTHDVGYWANXFLQDLERTCLDH

SEQ ID NO: 84563 - protein, 458 aa, Setaria italica
  Transcript Sequence Number=SeqID_18589
  Gene Ontology: Mol. function=catalytic activity; Biological process =trehalose biosynthetic process
  Homolog annotation: Hit_ID=B9SNF1; Match level="QueryCoverage=90%, HitCoverage=54%, E-value=0.0, Identity=80%"; Hit description =Trehalose-6-phosphate synthase, putative
  Pfam annotation: Domain name=Trehalose_PPase; Domain location=185 -422; Score=317.4; E_value=2.9e-92; Accession=PF02358.8; Description =Trehalose-phosphatase
NKIKNKKLSRIEEPNNRDDGIGSNLVTAVRDGMNLIPYEYVIARQGNEMIDRILGLGPSSRKKSMLVVSEFIGCSPSLSGAIRVNPWNIDSVADAMDSALEMPEGEKVLRHEKHHRYVSTHDVGYWANSFLQDLERTCLDHNRRRCWGIGFGLKFRVVALDPNFKKLAVEHLVSAYRRTTKRVILLDYDGTLMPQTSFGKSPTSKTIDMLNSLCRDKNNMIFLVSTKSRMTLNEWFSPCENLGLAAEHGYFLRLRRDAEWETCVPVIDCSWKQIAELVMKTYTETTDGSTIEDKETAIVWSYEDADPDFGSCQAKELHDHLESVLSNEPVSVKAGLNHVEVKPQGVSKGLVAKRILSTMQERGDLPDFILCVGDDRSDEDMFEVITAAAARGPSPLHPEAEVFACTVGRKPSKAKYYLDDSADIVRLIQGLASVSDDQALHGGAPLPNAAVATDTIPR

SEQ ID NO: 84564 - protein, 116 aa, Setaria italica
  Transcript Sequence Number=SeqID_18590
  Gene Ontology: Mol. function=hydrolase activity; Biological process =lipid catabolic process
MEAYAAMATPPTLAMGVDVDKLSYEIFSLLETKFLFGAANGCLSSGPGTPGRAFLDGGRVRVLSIDGCGADGEDALLAAAALARLEAGLRKQTGDTDARVAEFFDVAAGSGAGGVL

SEQ ID NO: 84565 - protein, 83 aa, Setaria italica
  misc_feature (31)..(31): Xaa can be any naturally occurring amino acid
  misc_feature (58)..(58): Xaa can be any naturally occurring amino acid
  Transcript Sequence Number=SeqID_18591
  Subcellular localization annotation: CTP_CleavageSite=47; ConfidenceScore=5.83e-01
SRSASARTCSTSCSRSAAPTAASWWCPRTSXTGGSASSRSGPRRIPRTSKASTFESKXYHVGRMCWIAEFCTSSRPSYVCTQG

SEQ ID NO: 84566 - protein, 388 aa, Setaria italica
  misc_feature (59)..(59): Xaa can be any naturally occurring amino acid
  Transcript Sequence Number=SeqID_18592
  Homolog annotation: Hit_ID=B6U669; Match level="QueryCoverage=100%, HitCoverage=97%, E-value=1e-125, Identity=62%"; Hit description =mTERF family protein
  Pfam annotation: Domain name=mTERF; Domain location=60-361; Score =28.7; E_value=6.3e-10; Accession=PF02536.6; Description=mTERF
MFASICRSRRLLRFRQIPSAAGADPSRRPYPIDALLSHGYSSAALAGAPPPDALAPPPXSNLTSCGLSPASTAARKHSIRSADRADAVRALFRSYGFTDADITEIVRRASAVLTLDPDRILRPKLDLFASLGVRPRRLSTEPILLTRSLDNHLVPCVQFLRGVLGTDAAVRDAISQAPRILHASLEKNMRPAVAALRRLGLLDEFISKLITIQVGVLRLSPERITQIFEYLKLLDLRVTDRAFLYAFRALCHLSRETWLRKVALYQSFGVSEGELLKAFKKQPTIPLFSDETITKKLQFYLDELKLQVSDVMRHPVLMGYSLEKCIIPRCAVLSVLMREGKIEPNIKLHTALLGSAKNFSDKYVMRYAHDVPDVVKAYEGNIKFEGFR

SEQ ID NO: 84567 - protein, 82 aa, Setaria italica
  Transcript Sequence Number=SeqID_18593
GRRETYFQIWKPPPPPAELHPFSTCTKQICLRPPIFMAASHLGSCYFQTLTAPHEMSTTKRRKDPVFAVKIFTDRRKRKEYR

SEQ ID NO: 84568 - protein, 98 aa, Setaria italica
  Transcript Sequence Number=SeqID_18594
VVNPDGSSCAPLDPALKIEEQGTACGLFASVNNVEQSRSSFTDGTAPTLPSEEHGDDSETSESWEQPDPLDVVKPQDDAPKSILGSKPPSNYSQPMQV

SEQ ID NO: 84569 - protein, 81 aa, Setaria italica
  Transcript Sequence Number=SeqID_18595
ASAFKLMTTSTGLSDQNETKFLLGQSLPMIGYKHKYRAPWQDPNIYLVRMDGENWTRLLCEVKTDSSTYSKVAFENELSFS

SEQ ID NO: 84570 - protein, 395 aa, Setaria italica
  Transcript Sequence Number=SeqID_18596
  Gene Ontology: Mol. function=nucleotide binding; Cellular component =myosin complex; Biological process=protein amino acid phosphorylation
  Homolog annotation: Hit_ID=Q9XEI4; Match level="QueryCoverage=100%, HitCoverage=25%, E-value=0.0, Identity=95%"; Hit description =Unconventional myosin heavy chain
  Pfam annotation: Domain name=Myosin_N; Domain location=10-51; Score =56.5; E_value=1e-13; Accession=PF02736.11; Description=Myosin N -terminal SH3-like domain
  Pfam annotation: Domain name=Myosin_head; Domain location=64-395; Score=89.4; E_value=1.3e-23; Accession=PF00063.13; Description =Myosin head (motor domain)
  Pfam module annotation: Pfam domain module=Myosin_N::Myosin_head; Domain location=10-51::64-395
MGTPVNIIVGSHVWVEDPTLAWIDGEVVSIKNNEVHVQTSNGKKVTTDRSKVFPKDMEAPPGGVDDMTRLSYLHEPGVLQNLATRYELNEIYTYTGSILIAVNPFQRLPHLYDTHMMEQYKGADFGELSPHVFAIADVAYRAMINEGKSNSILVSGESGAGKTETTKMLMRYLAHLGGRSGVEGRTVEQQVLESNPVLEAFGNAKTVRNNNSSRFGKFVEIQFDKTGRISGAAIRTYLLERSRVCQINTPERNYHCFYFLCAAPPEDIQRYKLSDPKSFHYLNQSSCIEVDGINDAEEYLATRRAMDIVGINEEEQEAIFRVVAAVLHLGNIDFAKGTEIDSSVIKDDKSRFHLNTAAELLKCDSKNLEKTLITRVIVTPEEIITRTLDPASAIA

SEQ ID NO: 84571 - protein, 230 aa, Setaria italica
  misc_feature (45)..(45): Xaa can be any naturally occurring amino acid
  misc_feature (84)..(84): Xaa can be any naturally occurring amino acid
  Transcript Sequence Number=SeqID_18597
  Homolog annotation: Hit_ID=Q0GPD4; Match level="QueryCoverage=39%, HitCoverage=36%, E-value=8e-14, Identity=47%"; Hit description=BZIP transcription factor bZIP82 (Fragment)
DRPSYPPPSPQEQESSPWDFFWNPFSSLDSFADPHPRSSYDNVVXDDELARLQRVREEEGIPELEEEDDECQDHVPMHRKRREXEEHDDEDDEEEDDDEEDDDEECEHSDECIASNEGACSVNFEVNTKQETKGFESKGVQCTEAPQPRKTVELEIKAHKKELMRNKVANAEETPGFTVYLNRRPASLVEAMKDIDCQFLGICDAAREVSVMLEASRAQYSTSNDLLQRC

SEQ ID NO: 84572 - protein, 237 aa, Setaria italica
  Transcript Sequence Number=SeqID_18598
  Gene Ontology: Mol. function=nucleoside-triphosphatase activity; Biological process=cell division
  Homolog annotation: Hit_ID=B9RCJ8; Match level="QueryCoverage=99%, HitCoverage=30%, E-value=4e-41, Identity=38%"; Hit description=ATP binding protein, putative
TTWDRVYGFVDSLNIFRKKAEPTESLDHRRDILDVKTSIHYKITQPVGLYISLLPCAKKHDTESDEDNEIVVPVWSVDEEILMQSLYKVIVSVSECSPLILYIREVNVLLGSSPRAYDLFKKMLNKLSGRVLVIGSHFLTADEDSGDVDEEVTELFPYILETKPPKEESHLEKWKTQMENDVAKAQEESFVTHTAGVLSAYNLECGDLSSIPRDDYFTIGKYIENIIAPAVSYHLMK

SEQ ID NO: 84573 - protein, 196 aa, Setaria italica
  misc_feature (176)..(176): Xaa can be any naturally occurring amino acid
  Transcript Sequence Number=SeqID_18599
  Gene Ontology: Mol. function=triacylglycerol lipase activity; Biological process=lipid metabolic process
  Homolog annotation: Hit_ID=B6TCI8; Match level="QueryCoverage=96%, HitCoverage=53%, E-value=4e-91, Identity=87%"; Hit description =Triacylglycerol lipase
VLKTRTNSLGAGMAILTGRNMAKKGELLESFLFNPPFVAAPIERIRDERVKHGFRIARSVITAGLTIAMKGKTEGNSQRSVAEESFSILSSWTPYLYVNPGDHICSEYIGYFQHRKNMEDLGAGFIEKLATQNSIGDLFFKALGWESEPPHLLHSADLIVNVSPSPDFKWAHVDNXVSSRKKGQPELNLQCSKYRY

SEQ ID NO: 84574 - protein, 586 aa, Setaria italica
  misc_feature (537)..(537): Xaa can be any naturally occurring amino acid
  Transcript Sequence Number=SeqID_18600
  Gene Ontology: Mol. function=small protein activating enzyme activity; Cellular component=cytoplasm; Biological process=ubiquitin- dependent protein catabolic process
  Homolog annotation: Hit_ID=Q84NQ2; Match level="QueryCoverage=99%, HitCoverage=55%, E-value=0.0, Identity=90%"; Hit description =Ubiquitin-activating enzyme E1
  Pfam annotation: Domain name=ThiF; Domain location=2-141; Score =138.9; E_value=1.6e-38; Accession=PF00899.13; Description=ThiF family
  Pfam annotation: Domain name=UBACT; Domain location=284-345; Score =40.0; E_value=9.1e-09; Accession=PF02134.13; Description=Repeat in ubiquitin-activating (UBA) protein
  Pfam annotation: Domain name=UBACT; Domain location=385-453; Score =117.1; E_value=5.8e-32; Accession=PF02134.13; Description=Repeat in ubiquitin-activating (UBA) protein
  Pfam annotation: Domain name=UBA_e1_C; Domain location=459-581; Score= 211.4; E_value=2.4e-60; Accession=PF09358.2; Description=Ubiquitin -activating enzyme e1 C-term
  Pfam annotation: Domain name=UBA_e1_thiolCys; Domain location=143 -191; Score=130.2; E_value=6.4e-36; Accession=PF10585.1; Description =Ubiquitin-activating enzyme active si
  Pfam module annotation: Pfam domain module=ThiF::UBACT::UBACT::UBA_e1_ C::UBA_e1_thiolCys; Domain location=2-141::284-345::385-453::459 -581::143-191
YFVVGSGALGCEFLKNLALMGVSCSSKGKLTITDDDAIEKSNLSRQFLFRDWNIGQAKSIVAAAAASTINPSLQIDALQNRACPDTENVFHDTFWDGLNVVINALDNVNARMYMDMRCLYFQKPLLESGTLGAKCNTQMVIPHLTENYGASRDPPEKQAPMCTVHSFPHNIDHCLTWARSEFEGLLEKTPNEVNSFLSNPAQYAAAMRKAGDAQARELLERVSECLGKERCITFEDCITWARLRFEDYFSNRVKQLTFTFPEDASTSTGTPFWSAPKRFPRPLQFSATDSSQIHFIMSASILRAESFGIAIPDWAKNTSNLAEAVNKVAVPEFKPKKGVNIVTDEKATNLSSTSVDDVAVIDELLSKLEECAKNLPPGFQMKPIQFEKDDDTNFHMDLISGFANMRARNYSIPEVDKLKAKFIAGRIIPAIATSTAMATGLVCLELYKVIAGEHPIEDYRNTFANLALPLFSMAEPVPAKAMKHQDLSWTVWDRWSIKGDLTVAELVQWFSNKGLSAYSMSCGTSLLYNSMFARHKXRLQKKVVDVAREVAKVEVPEYRRHIDLVVACEDDDGNDIDIPLVSVYFR

SEQ ID NO: 84575 - protein, 111 aa, Setaria italica
  misc_feature (20)..(20): Xaa can be any naturally occurring amino acid
  Transcript Sequence Number=SeqID_18601
  Gene Ontology: Mol. function=transferase activity, transferring groups other than amino-acyl groups
  Homolog annotation: Hit_ID=B6SUG1; Match level="QueryCoverage=98%, HitCoverage=23%, E-value=3e-38, Identity=72%"; Hit description =Transferase
AAIQDAVGKMVEDPLGCWPXGWEFLKLAAASGLTVPADRFMNVSGSAGFRVYEVADFGWGKPRRTENVRMNLDGQVALVRARDGAGVQASVSMLRREHVDEFESEMLKLLG

SEQ ID NO: 84576 - protein, 203 aa, Setaria italica
  Transcript Sequence Number=SeqID_18602
NQGDLQLKDHSLPLPVQTTESTQVPSVKDQRASDADHLVNPFANEKFTPHNHNLERKMDILLTKVEKMELYCSRFEDSMIKPLSSIDARLQRLEEQFSSFSVEIQSLRGSSAVRSASDSMSNTTNSQEEAHDYANDRTPAPITDRKPGLAVRAPDFSSDDSCCYNVTSENQFDFRGPNVVPRLLVKVPDFMLNLVETFMTGLP

SEQ ID NO: 84577 - protein, 163 aa, Setaria italica
  Transcript Sequence Number=SeqID_18603
  Gene Ontology: Biological process=protein localization
  Homolog annotation: Hit_ID=B9RZX0; Match level="QueryCoverage=98%, HitCoverage=8%, E-value=5e-47, Identity=42%"; Hit description =Vacuolar protein sorting-associated protein, putative
  Subcellular localization annotation: CTP_CleavageSite=34; ConfidenceScore=5.38e-01
GYNLTFWRPQAPSNYVILGDCVSSRSVPPSQVVVAVSNTYGRVRKPRGFRLVHVLPGQDVIDSSQSTEANECSIWIPVPPPGYLALGCVVNIGRLPPSNHVVYCLRSDLVTSATFSDCIHTPSHATGIMSGFSIWRVDNLIASFCAHTSTEQPTRTEALDLHH

SEQ ID NO: 84578 - protein, 130 aa, Setaria italica
  misc_feature (46)..(46): Xaa can be any naturally occurring amino acid
  misc_feature (79)..(79): Xaa can be any naturally occurring amino acid
  Transcript Sequence Number=SeqID_18604
  Gene Ontology: Mol. function=nucleotide binding; Cellular component =plasma membrane; Biological process=small GTPase mediated signal transduction
  Homolog annotation: Hit_ID=O23657; Match level="QueryCoverage=95%, HitCoverage=58%, E-value=2e-60, Identity=91%"; Hit description =AtRab18
  Pfam annotation: Domain name=Ras; Domain location=1-116; Score=100.2; E_value=6.9e-27; Accession=PF00071.14; Description=Ras family
PTASYAAGQERFRTLTSSYYRGAQGIIMVYDVTRRETFTNLSDIWXKEIDLYSTNQDCIKMLVGNKVDKESERAVTKKXEGIEFAREYGCLFLECSAKTKVNVEQCFEELVLKILDTPSLLADASSGAKK

SEQ ID NO: 84579 - protein, 216 aa, Setaria italica
  Transcript Sequence Number=SeqID_18605
  Gene Ontology: Mol. function=nucleotide binding; Cellular component =plasma membrane; Biological process=small GTPase mediated signal transduction
  Homolog annotation: Hit_ID=B9S2N7; Match level="QueryCoverage=93%, HitCoverage=35%, E-value=1e-103, Identity=89%"; Hit description =Protein phosphatase 2c, putative
  Pfam annotation: Domain name=Arf; Domain location=6-182; Score=-21.9; E_value=8.8e-08; Accession=PF00025.13; Description=ADP-ribosylation factor family
  Pfam annotation: Domain name=GTP_EFTU; Domain location=22-184; Score=- 76.4; E_value=0.0021; Accession=PF00009.19; Description=Elongation factor Tu GTP binding domain
  Pfam annotation: Domain name=MMR_HSR1; Domain location=21-137; Score=- 1.8; E_value=0.0015; Accession=PF01926.15; Description=GTPase of unknown function
  Pfam annotation: Domain name=Miro; Domain location=22-137; Score =57.5; E_value=5e-14; Accession=PF08477.5; Description=Miro-like protein
  Pfam annotation: Domain name=Ras; Domain location=22-184; Score =304.9; E_value=1.8e-88; Accession=PF00071.14; Description=Ras family
  Pfam module annotation: Pfam domain module=Arf::GTP_EFTU::MMR _HSR1::Miro::Ras; Domain location=6-182::22-184::21-137::22-137::22 -184
MDSSSSSSSSLSQQPEFDYLFKLLLIGDSGVGKSSLLLRFTADSFEDLSPTIGVDFKVKMVNIGGKKLKLAIWDTAGQERFRTLTSSYYRGAQGIIMVYDVTRRETFTNLSDIWAKEIDLYSTNQDCIKMLVGNKVDKESERAVTKKEGIEFAREYGCLFLECSAKTKVNVEQCFEELVLKILDTPSLLADASSGAKKNIFKQKPPEADAAASSCC

SEQ ID NO: 84580 - protein, 135 aa, Setaria italica
  misc_feature (30)..(30): Xaa can be any naturally occurring amino acid
  Transcript Sequence Number=SeqID_18606
  Gene Ontology: Mol. function=protein serine/threonine kinase activity; Biological process=protein amino acid phosphorylation
  Homolog annotation: Hit_ID=Q1ENX0; Match level="QueryCoverage=100%, HitCoverage=12%, E-value=8e-66, Identity=87%"; Hit description =Leucine-rich repeat-containing protein kinase family protein
  Pfam annotation: Domain name=Pkinase; Domain location=1-135; Score= -63.8; E_value=0.00011; Accession=PF00069.17; Description=Protein kinase domain
  Pfam annotation: Domain name=Pkinase_Tyr; Domain location=1-135; Score=-146.3; E_value=0.00053; Accession=PF07714.9; Description =Protein tyrosine kinase
  Pfam module annotation: Pfam domain module=Pkinase::Pkinase_Tyr; Domain location=1-135::1-135
IGYHLGESDTFLIYNYLSGGNLETFIHEMXGRNVSWIEVHKIAVDVAQALAFLHCSCTPRIIHRDIKPSNILLDEDLNAYLSDFGLARLIEVTQTHATTDVAGTFGYVAPEYATTCRVSDKADVYSFGVVLLELM

SEQ ID NO: 84581 - protein, 90 aa, Setaria italica
  Transcript Sequence Number=SeqID_18607
  Gene Ontology: Mol. function=nucleic acid binding
  Pfam annotation: Domain name=zf-CCHC; Domain location=3-20; Score =9.8; E_value=0.016; Accession=PF00098.15; Description=Zinc knuckle
MARKCSHCGNYGHNSRTCGLGNSRETMLCQGGGDNGGGVGGGSRSGGGTSGLRLFGVQVHAGGGGAGSAAASMKKSYSMDCLQLAAPGCS

SEQ ID NO: 84582 - protein, 468 aa, Setaria italica
  misc_feature (437)..(437): Xaa can be any naturally occurring amino acid
  misc_feature (460)..(460): Xaa can be any naturally occurring amino acid
  Transcript Sequence Number=SeqID_18608
  Gene Ontology: Mol. function=pyruvate kinase activity; Cellular component=chloroplast; Biological process=glycolysis
  Homolog annotation: Hit_ID=C0PGB5; Match level="QueryCoverage=99%, HitCoverage=80%, E-value=0.0, Identity=96%"; Hit description =Pyruvate kinase
  Pfam annotation: Domain name=PK; Domain location=64-405; Score=454.0; E_value=2.2e-133; Accession=PF00224.13; Description=Pyruvate kinase, barrel domain
GREGRRESQVVSVISRAPRTEPEVLPVSPDDDAAVKEEANFQHLKAIQQLATAANGVWSKPNVRRKTKIVCTIGPSTNTREMIWKLAETGMNVARLNMSHGDHASHQKVIDLVKEYNASHTDNVIAIMLDTKGPEVRSGDLPQPIFLESGQEFTFTIKRGVGTDTCVSVNYDDFVNDVEVGDMLLVDGGMMSFLVKSKTEDSVKCEVVDGGELKSRRHLNVRGKSATLPSITDKDWDDIKFGVDNQVDYYAVSFVKDAQVVHELKDYLRSRNADIHVTVKIESADSIPNLHSIISASDGAMVARGDLGAELPIEEVPLLQEEIIRMCRSMGKAVIVATNMLESMIVHPTPTRAEVSDIAIAVREGADAVMLSGETAHGKFPLKAVKVMHTVALRTEATIPGGETPADLGQVFKNHMSEMFAYHATMMSNTLRTSIVXFTRTGFMAILLSHYRPSGTIFAXFTDQERVR

SEQ ID NO: 84583 - protein, 187 aa, Setaria italica
  Transcript Sequence Number=SeqID_18609
  Gene Ontology: Mol. function=pyruvate kinase activity; Cellular component=chloroplast; Biological process=glycolysis
  Homolog annotation: Hit_ID=C0PGB5; Match level="QueryCoverage=99%, HitCoverage=32%, E-value=1e-103, Identity=95%"; Hit description =Pyruvate kinase
  Pfam annotation: Domain name=PK_C; Domain location=70-186; Score=4.6; E_value=9.4e-06; Accession=PF02887.8; Description=Pyruvate kinase, alphabeta domain
LSSTRAEVSDIAIAVREGADAVMLSGETAHGKFPLKAVKVMHTVALRTEATIPGGETPADLGQVFKNHMSEMFAYHATMMSNTLRTSIVVFTRTGFMAILLSHYRPSGTIFAFTDQERVRQRLALYQGVCPVQMEFSDDAEKTFGDALSYLLKHGMVRDGEEVALVQSGKQPIWRSQSTHNIQVRKV

SEQ ID NO: 84584 - protein, 69 aa, Setaria italica
  Transcript Sequence Number=SeqID_18610
  Homolog annotation: Hit_ID=B6SJC0; Match level="QueryCoverage=97%, HitCoverage=18%, E-value=9e-26, Identity=83%"; Hit description=F-box domain containing protein
PHYLELPGGMALQGATLVAIKPSTEGSNGGHTSRKETDAFISGAFDGPFKVAVKALMKRRTYLLEMNGF

SEQ ID NO: 84585 - protein, 114 aa, Setaria italica
  Transcript Sequence Number=SeqID_18611
  Gene Ontology: Mol. function=electron carrier activity; Cellular component=anchored to membrane
  Homolog annotation: Hit_ID=Q4KXE1; Match level="QueryCoverage=96%, HitCoverage=33%, E-value=4e-30, Identity=64%"; Hit description=Early salt stress and cold acclimation-induced protein 2-3
  Pfam annotation: Domain name=Cu_bind_like; Domain location=34-112; Score=78.9; E_value=1.9e-20; Accession=PF02298.9; Description =Plastocyanin-like domain
MAARFCGLGLASCFALLVATAGATQYKVGGDNGWAVPDAADESFNTWAEKTGFQIGDQLLFVYPKDKDSVLLVEPADYNACNTSSYDKRFDDGSTSFTLDRAGAFFFISGVEDN

SEQ ID NO: 84586 - protein, 102 aa, Setaria italica
  Transcript Sequence Number=SeqID_18612
  Gene Ontology: Biological process=regulation of signal transduction
  Homolog annotation: Hit_ID=B6TVR5; Match level="QueryCoverage=100%, HitCoverage=24%, E-value=9e-32, Identity=69%"; Hit description=PP2A regulatory subunit TAP46
MVEVEEVGNKMQSQMRLHAAAAVEDDDADLPLPALFDRASRLHGLASSSALDQEGIRKGVELLRRCDEMVSKLGLFSPNETKEDVSTANLKYLLVPYYLAEM

SEQ ID NO: 84587 - protein, 85 aa, Setaria italica
  Transcript Sequence Number=SeqID_18613
  Gene Ontology: Mol. function=DNA binding; Cellular component =chromosome; Biological process=regulation of transcription
  Homolog annotation: Hit_ID=Q6WLH1; Match level="QueryCoverage=100%, HitCoverage=28%, E-value=1e-26, Identity=71%"; Hit description =Single myb histone 6
LNDPELSSILCYRSNVDLKDKWRNMNVTVTASSSRDKARSAVKKTRAGPKNNDQPAAISTVTSDADDEIVDVKPIASVSSEAWNT

SEQ ID NO: 84588 - protein, 280 aa, Setaria italica
  misc_feature (209)..(209): Xaa can be any naturally occurring amino acid
  Transcript Sequence Number=SeqID_18614
  Gene Ontology: Mol. function=DNA binding; Cellular component =chromosome; Biological process=regulation of transcription
  Homolog annotation: Hit_ID=Q6WLH1; Match level="QueryCoverage=99%, HitCoverage=100%, E-value=2e-89, Identity=61%"; Hit description =Single myb histone 6
  Pfam annotation: Domain name=Linker_histone; Domain location=124-192; Score=27.5; E_value=1.5e-06; Accession=PF00538.11; Description=linker histone H1 and H5 family
  Pfam annotation: Domain name=Myb_DNA-binding; Domain location=5-57; Score=29.3; E_value=1.5e-05; Accession=PF00249.23; Description=Myb -like DNA-binding domain
  Pfam module annotation: Pfam domain module=Linker_histone::Myb_DNA -binding; Domain location=124-192::5-57
MGAPKQRWTSEEEAALRAGIARHGVGKWRTILKDPEFSSTLCYRSNVDLKDKWRNMNVIVTASSSRDKARSAVKKTRAGPKNNDQPAAISTVTSDADDEIVDVKPIASVSSEAWNTSNSKKSQSHSRLDNIIMEAIKNLNEPTGSHRTTIANYIEEQYWPPSDFDHLLSAKLKDLAASGKLIKVNRKYRIAPSSPRLEGRSPKMLLLEXELARIATMTPEAAAAAAARAVAEAEAIMAEAEAAAREAEVAEAEAQAAQAFAEAALLTLKNRNATKLMAQG

SEQ ID NO: 84589 - protein, 280 aa, Setaria italica
  misc_feature (19)..(19): Xaa can be any naturally occurring amino acid
  Transcript Sequence Number=SeqID_18615
  Gene Ontology: Mol. function=DNA binding; Cellular component =chromosome; Biological process=regulation of transcription
  Homolog annotation: Hit_ID=Q6WLH1; Match level="QueryCoverage=99%, HitCoverage=92%, E-value=1e-105, Identity=72%"; Hit description =Single myb histone 6
  Pfam annotation: Domain name=Linker_histone; Domain location=101-169; Score=26.8; E_value=1.8e-06; Accession=PF00538.11; Description=linker histone H1 and H5 family
GVGKWRTILKDPEFSSTLXCYRSNVDLKDKWRNMNVIVSTSSSRDKGKTAVRKTRTTPKNNDHTVVISTAVTSDIDDEIVDEKPIAAVPSEAQNTSNPKKSHSRLDNIIMEAIKSLNEPTGSHRTTIANYIEEQYWPPSDFDHLLSAKLKDLATSGKLIKVNRKYRIAPSSPNSEGRSPKMLLLEDVQREPVKIGSNDSKILTRSQVDAELARMATMTGEEASAAAARAVAEAEAIMAEAEAAAREAEAAEAEAQAAQAFAEAAFLTLKNRNTANLMAQA

SEQ ID NO: 84590 - protein, 98 aa, Setaria italica
  misc_feature (24)..(24): Xaa can be any naturally occurring amino acid
  Transcript Sequence Number=SeqID_18616
WLSTEMQEVVDGAGLYPDWRFYFXVARQSGNSSMAAYEASLGREASTSHALVNFMMATEADFVVGALGSTCCYLIDGMRNTEGKVMSWYLSVNKDRFW

SEQ ID NO: 84591 - protein, 50 aa, Setaria italica
  Transcript Sequence Number=SeqID_18617
  Subcellular localization annotation: CTP_CleavageSite=55; ConfidenceScore=5.30e-01
MDKILAFSILSSSPADISSTGFSTRLSWRSSSSAVTQKQQQQQQAEKPAP

SEQ ID NO: 84592 - protein, 57 aa, Setaria italica
  Transcript Sequence Number=SeqID_18618
NACFPLFFLVAAVWSAGLIFMCRCARMVFAIIYMSVFYHMFFLLRVYNSCHNWFKSQ

SEQ ID NO: 84593 - protein, 240 aa, Setaria italica
  Transcript Sequence Number=SeqID_18619
  Homolog annotation: Hit_ID=B6SKT6; Match level="QueryCoverage=100%, HitCoverage=100%, E-value=1e-104, Identity=80%"; Hit description =Protein LRP16
  Pfam annotation: Domain name=Macro; Domain location=83-200; Score =214.0; E_value=4.1e-61; Accession=PF01661.13; Description=Macro domain
  Subcellular localization annotation: CTP_CleavageSite=55; ConfidenceScore=5.44e-01
MSRAATRFFLTRSLLPLPLPKWQRRRGRLGSSILAARAFSMAASGFGGGDTFRLSAAPGAGALKLHKGDITLWTVDGATDAIVNAANERMLGGGGVDGAIHRAAGSELVEACRKVPEVKPGVRCPTGEARITPAFKLPVSRVIHTVGPIYDMDKHPEVSLKNAYENSLKLAKENGIQYIAFPAISCGIFRYPPEEASKIAVSTAQQFSDDIKEVHFVLFSDDLYEIWRKTAQEMLSQFEK

SEQ ID NO: 84594 - protein, 145 aa, Setaria italica
  Transcript Sequence Number=SeqID_18620
  Gene Ontology: Mol. function=zinc ion binding; Cellular component =nucleus; Biological process=regulation of transcription
  Homolog annotation: Hit_ID=C1KLC0; Match level="QueryCoverage=99%, HitCoverage=34%, E-value=3e-43, Identity=58%"; Hit description=Dof -type zinc finger protein
  Pfam annotation: Domain name=zf-Dof; Domain location=90-145; Score =117.9; E_value=3.3e-32; Accession=PF02701.7; Description=Dof domain, zinc finger
MMAECRGGDCLIKLFGKTIPVPEAADAAKESGSSSSSTESDAPENAHQEASDPSPQPEVVDAEDPKSSPETTQQPDAAGDVASQREKLKKPDKVLPCPRCNSMDTKFCYFNNYNVNQPRHFCKNCQRYWTAGGAMRNVPVGAGRR

SEQ ID NO: 84595 - protein, 104 aa, Setaria italica
  Transcript Sequence Number=SeqID_18621
  Subcellular localization annotation: CTP_CleavageSite=66; ConfidenceScore=5.49e-01
DTAARKLRGPGATTNYPAPPAAAPAASASRGTVDDDDSSSSSSSMENSPSAAAAPLSSLDLRLGLPAAMVAAQPYLFLEPAPTLPAAPALRQFLPLKSEEELMS

SEQ ID NO: 84596 - protein, 129 aa, Setaria italica
  Transcript Sequence Number=SeqID_18622
  Homolog annotation: Hit_ID=B6SJU9; Match level="QueryCoverage=49%, HitCoverage=19%, E-value=1e-09, Identity=54%"; Hit description =Retrotransposon protein
PRRCLRSQPRDTVLQVGAAPRGLRGLRFFLPKVISLAQLHKRPAMGLRLDFDEGSEHVSSTSSASASCLLSDELAAQRDQHRNEMDRLIQEHAERLRRALADTRRRQYRSLLVAAEAAVSQRIREKEAE

SEQ ID NO: 84597 - protein, 207 aa, Setaria italica
  Transcript Sequence Number=SeqID_18623
  Gene Ontology: Mol. function=secondary active sulfate transmembrane transporter activity; Cellular component=integral to membrane; Biological process=sulfate transport
  Homolog annotation: Hit_ID=Q10QI3; Match level="QueryCoverage=99%, HitCoverage=41%, E-value=1e-80, Identity=71%"; Hit description =Sulfate transporter 2.1, putative, expressed
  Pfam annotation: Domain name=DUF983; Domain location=44-104; Score= -41.3; E_value=0.095; Accession=PF06170.4; Description=Protein of unknown function (DUF983)
  Pfam annotation: Domain name=Sulfate_transp; Domain location=62-207; Score=-31.0; E_value=5.5e-09; Accession=PF00916.12; Description =Sulfate transporter family
  Pfam module annotation: Pfam domain module=DUF983::Sulfate_transp; Domain location=44-104::62-207
VPPLIYAVMGTSREIAIGPVAVVSLLLSSMIQNVVDPAADPATYRSLVFTVTFLAGVFQVSFGLFRLGFLVDFLSHAAIVGFMAGAAIVIGLQQLKGLLGLSHFTNSTDIVSVIKAVCSALHDPWHPGNFLIGCSFLIFILTTRFIGRKYKKLFWLSAISPLISVILSTAAVYATRADKHGVKIIQKVHAGINPSSAKQIHLNGPHT

SEQ ID NO: 84598 - protein, 86 aa, Setaria italica
  Transcript Sequence Number=SeqID_18624
  Gene Ontology: Mol. function=transporter activity; Cellular component= integral to membrane; Biological process=transport
  Homolog annotation: Hit_ID=Q10M80; Match level="QueryCoverage=58%, HitCoverage=20%, E-value=2e-15, Identity=84%"; Hit description =Aquaporin SIP2-1
MSPAPPPPSRARIRPWLVAGDLALAAAWVCAGALVKLLVYGPLGFGGRPEAEAVKVSLSLVYMFIFAWLEAATGGASYNPLTVLAA

SEQ ID NO: 84599 - protein, 202 aa, Setaria italica
  Transcript Sequence Number=SeqID_18625
  Gene Ontology: Cellular component=nucleus; Biological process=cell division
  Homolog annotation: Hit_ID=Q0D9C7; Match level="QueryCoverage=100%, HitCoverage=48%, E-value=1e-106, Identity=91%"; Hit description =Cyclin-B2-2
  Pfam annotation: Domain name=Cyclin_C; Domain location=77-197; Score =186.2; E_value=9.3e-53; Accession=PF02984.11; Description=Cyclin, C -terminal domain
  Pfam annotation: Domain name=Cyclin_N; Domain location=1-75; Score =62.1; E_value=2.1e-15; Accession=PF00134.15; Description=Cyclin, N -terminal domain
  Pfam module annotation: Pfam domain module=Cyclin_C::Cyclin_N; Domain location=77-197::1-75
FLTVNIIDRFLALENVVRKKLQLVGVTAMLLACKYEEVSVPVVEDLILICDRAYTRADILEMERRIVNTLKFNMSVPTPYCFMRRFLKAAQAEKKLELLSFFMIELSLVEYEMLKFCPSMLAAAAIYTAQCTINGFKSWNKCCELHTKYSEEQLMDCSRMMVELHQRAAHGKLTGVHRKYSTFRYGCAAKSEPATFLLDARA

SEQ ID NO: 84600 - protein, 240 aa, Setaria italica
  Transcript Sequence Number=SeqID_18626
QTKEGRREGELVVSKIFYQTQPRQCGVAAEPAAAAASSDTVDGAAGAEQVAEAAVAPPDVGGAFHGATGIDEFNFTQFRSSFEEVDVGTSVQVSARADEEVHTGHLHLHQEHDLHRRQYTNQEQPRLAAAAAAFQISTPTEPITTMITSSPMVHHGSVILQQQETYDHGASYHQQQQEDEQPHQPSNFDGRSTSGLEEVIMGCTSRRSRRGEASGSGGNKESSNWQYPSFWPPGSQDHHG

SEQ ID NO: 84601 - protein, 82 aa, Setaria italica
  Transcript Sequence Number=SeqID_18627
  Gene Ontology: Mol. function=protein binding; Biological process =ubiquitin-dependent protein catabolic process
  Homolog annotation: Hit_ID=Q9LN77; Match level="QueryCoverage=97%, HitCoverage=27%, E-value=1e-25, Identity=68%"; Hit description=F-box protein PP2-A12
RTRRFCMSISSKAMSITGRDDRRYWSHLSTEESRFRGVDYLQQIWWLEVCGEIDFCFPAGSYSLFFRLHLGRPHKWMSRRGH

SEQ ID NO: 84602 - protein, 40 aa, Setaria italica
  Transcript Sequence Number=SeqID_18628
  Gene Ontology: Mol. function=aspartic-type endopeptidase activity; Biological process=ubiquitin-dependent protein catabolic process
  Homolog annotation: Hit_ID=B6TJQ1; Match level="QueryCoverage=97%, HitCoverage=13%, E-value=1e-10, Identity=71%"; Hit description=ATPP2- A13
RFRGVDYLQQIWWLEVCGEIDFCFPAGSYSLFFRLHLGRP

SEQ ID NO: 84603 - protein, 150 aa, Setaria italica
  misc_feature (13)..(13): Xaa can be any naturally occurring amino acid
  Transcript Sequence Number=SeqID_18629
  Gene Ontology: Mol. function=protein binding; Biological process =ubiquitin-dependent protein catabolic process
  Homolog annotation: Hit_ID=B6TJQ1; Match level="QueryCoverage=96%, HitCoverage=51%, E-value=2e-48, Identity=57%"; Hit description=ATPP2- A13
RRYWSHLSTEESXQIWWLEVCDKIDFCFPAGSYSLFFRLHLGRPHKWMSRRGHASESIHGWDIKPTRFQLSTSDDQYTESECYLTKPGRWILYHVGDFVVSSSDEVTELKFSMMQIDCTHTKGGLCVDSVFIYPKDHRYEEECILCQKIL

SEQ ID NO: 84604 - protein, 117 aa, Setaria italica
  misc_feature (49)..(49): Xaa can be any naturally occurring amino acid
  misc_feature (57)..(57): Xaa can be any naturally occurring amino acid
  Transcript Sequence Number=SeqID_18630
  Gene Ontology: Mol. function=electron carrier activity; Cellular component=integral to membrane; Biological process=oxidation reduction
  Homolog annotation: Hit_ID=B6U021; Match level="QueryCoverage=93%, HitCoverage=20%, E-value=2e-28, Identity=50%"; Hit description =Cytochrome P450 CYP76M15
TISSAKDLFVAGTATTSLTVQWTLAELLRHPAVMSKVRGELQEVLGAKXYPDESDIXRLPYLRTVVMEIMRLHSPSPIMMPHVAMADGAEVGGFGVPKGTIVIVNVWAIMRDPASLG

SEQ ID NO: 84605 - protein, 76 aa, Setaria italica
  Transcript Sequence Number=SeqID_18631
  Subcellular localization annotation: CTP_CleavageSite=45; ConfidenceScore=5.92e-01
AWTPTTRPTAPPTSASTPSTSSTCPTRHPSTAWWSSPPSTTRWPLAMLSPARRGATTGRPPCSLTGGSPSTDPLML

SEQ ID NO: 84606 - protein, 116 aa, Setaria italica
  Transcript Sequence Number=SeqID_18632
  Gene Ontology: Mol. function=lipid binding; Cellular component=plasma membrane
  Homolog annotation: Hit_ID=B6TNT1; Match level="QueryCoverage=97%, HitCoverage=23%, E-value=1e-54, Identity=91%"; Hit description=Lipid binding protein
PLGGVRVAASNITLFHLDVGDNSTVYLGDSGLVVVASGVTANISMHWSYRYDSWLFPIEIADSGTASILVQGMEVGITMAIKNSNGSLALSVSQCGCYVKDLVISLDGGASWFYLR

SEQ ID NO: 84607 - protein, 57 aa, Setaria italica
  Transcript Sequence Number=SeqID_18633
  Gene Ontology: Mol. function=catalase activity; Cellular component =glyoxysome; Biological process=hydrogen peroxide catabolic process
  Homolog annotation: Hit_ID=Q7XYE2; Match level="QueryCoverage=84%, HitCoverage=17%, E-value=3e-20, Identity=91%"; Hit description =Catalase isozyme (Fragment)
VHAFKPNPKTNLQENWRIVDFFSHHPESMHMFTFLFDDVGIPLNYRHLPQPCHKGSV

SEQ ID NO: 84608 - protein, 151 aa, Setaria italica
  Transcript Sequence Number=SeqID_18634
  Gene Ontology: Mol. function=oxidoreductase activity; Cellular component=peroxisome; Biological process=hydrogen peroxide catabolic process
  Homolog annotation: Hit_ID=Q0D9C4; Match level="QueryCoverage=95%, HitCoverage=29%, E-value=2e-66, Identity=83%"; Hit description =Catalase isozyme B
  Pfam annotation: Domain name=Catalase; Domain location=1-151; Score= -93.0; E_value=4.6e-12; Accession=PF00199.11; Description=Catalase
RNWRIVDSSHTTHESMHMFTFLFDDVGIPLNYRHMEGFGVNTYTLISRDGKPHLVKFHWKPTCGVKCLLDDEAVTVGGTCHSHATKDLYDSIAAGNFPEWKLYIQTIDADHEDKFDFDPLDVTKTWPEDIIPPAKKLSMFLFRTIRQQAAV

SEQ ID NO: 84609 - protein, 65 aa, Setaria italica
  Transcript Sequence Number=SeqID_18635
  Gene Ontology: Mol. function=nucleoside-triphosphatase activity
  Homolog annotation: Hit_ID=Q2R434; Match level="QueryCoverage=70%, HitCoverage=16%, E-value=7e-18, Identity=91%"; Hit description=ABC transporter family protein, expressed
VQTPDLLLLDEPLAGLDWKARADVVNLLKDLKKHHTILVVSHDLRELYPLVDRSWRMQMGGSLNL

SEQ ID NO: 84610 - protein, 153 aa, Setaria italica
  misc_feature (11)..(11): Xaa can be any naturally occurring amino acid
  misc_feature (17)..(17): Xaa can be any naturally occurring amino acid
  Transcript Sequence Number=SeqID_18636
  Gene Ontology: Mol. function=nucleoside-triphosphatase activity; Cellular component=chloroplast; Biological process=transport
  Homolog annotation: Hit_ID=Q2R434; Match level="QueryCoverage=100%, HitCoverage=54%, E-value=5e-54, Identity=72%"; Hit description=ABC transporter family protein, expressed
  Pfam annotation: Domain name=ABC_tran; Domain location=2-143; Score =47.0; E_value=7.6e-11; Accession=PF00005.19; Description=ABC transporter
TSQRVGIVFQXFPERYXFLADTVLEEVTFGWPRQKADLLFKEQLAKNLQNALNLVGLTTISLDEDPQSLSGGFKRRLALAIQLVQTPDLLLLDEPLAGLDWKARADVVNLLKDLKKHHTILVVSHDLRELYPLVDRSWRMQMGGSLKEESLPV

SEQ ID NO: 84611 - protein, 274 aa, Setaria italica
  Transcript Sequence Number=SeqID_18637
  Gene Ontology: Mol. function=nucleoside-triphosphatase activity; Cellular component=chloroplast; Biological process=transport
  Homolog annotation: Hit_ID=Q2R434; Match level="QueryCoverage=90%, HitCoverage=89%, E-value=2e-99, Identity=72%"; Hit description=ABC transporter family protein, expressed
  Pfam annotation: Domain name=ABC_tran; Domain location=71-264; Score =108.1; E_value=3e-29; Accession=PF00005.19; Description=ABC transporter
  Subcellular localization annotation: CTP_CleavageSite=33; ConfidenceScore=5.31e-01
MLAAAAAVAAPPTASYYSPVKPSRRWRVSWSCRAATVEAGYSQLEVRKVTYRPPGTEHNLLNEINLSLREKSFGLIFGRSGSGKTTLLQLLAGLSEPTSGSICIQKYDDSGNPIGLSEMLTSQRVGIVFQFPERYFLADTVLEEVTFGWPRQKADLLFKEQLAKNLQNALNLVGLTTISLDEDPQSLSGGFKRRLALAIQLVQTPDLLLLDEPLAGLDQINWKARADVVNLLKDLKKHHTILVVSHDLRELYPLVDRSWRMQMGGSLKEESLPV

SEQ ID NO: 84612 - protein, 82 aa, Setaria italica
  Transcript Sequence Number=SeqID_18638
  Gene Ontology: Mol. function=oxidoreductase activity; Biological process=metabolic process
  Homolog annotation: Hit_ID=B6TK03; Match level="QueryCoverage=100%, HitCoverage=22%, E-value=3e-24, Identity=68%"; Hit description =Dihydroflavonol-4-reductase
EMFGENGRDRVWTVMANVMDPVILHEAFDGCVGVFHTSSLVDPGGISGYTKHMARLEAKAAELVVEACVRTESVRKCVFTSS

SEQ ID NO: 84613 - protein, 105 aa, Setaria italica
  misc_feature (31)..(31): Xaa can be any naturally occurring amino acid
  Transcript Sequence Number=SeqID_18639
  Gene Ontology: Cellular component=integral to membrane; Biological process=peroxisome organization and biogenesis
  Homolog annotation: Hit_ID=Q7XU74; Match level="QueryCoverage=100%, HitCoverage=45%, E-value=9e-27, Identity=59%"; Hit description =Peroxisomal membrane protein 11-4
SAFGESIGYVFFIAMDLIMIRRGLRQERRLXREGGGGGKDAEKEKELRKIRMDRVMRLMATAANAADLVIAIAEVEPNRFCNHAVTLGISGLVSAWAGWYRNWPS

SEQ ID NO: 84614 - protein, 52 aa, Setaria italica
  Transcript Sequence Number=SeqID_18640
GVDTPFCSEDCRQQQIEADEAREKRSKQPAAAKRDRRQRQSGSPQKIPLWAR

SEQ ID NO: 84615 - protein, 163 aa, Setaria italica
  Transcript Sequence Number=SeqID_18641
  Gene Ontology: Mol. function=mannosyl-glycoprotein endo-beta-N -acetylglucosaminidase activity; Cellular component=intracellular; Biological process=metabolic process
  Homolog annotation: Hit_ID=B9S462; Match level="QueryCoverage=100%, HitCoverage=23%, E-value=9e-70, Identity=71%"; Hit description=Endo beta n-acetylglucosaminidase, putative
  Pfam annotation: Domain name=Glyco_hydro_85; Domain location=13-163; Score=64.7; E_value=3.6e-16; Accession=PF03644.5; Description =Glycosyl hydrolase family 85
LPARRRVLVCHDMEGGYRDDAAAQGGGNPDAYALWHWHLIDVFVYFSHYLVTLPPPCWTNAAHLHGVKVLGTFITEWDKGAEVCKEMLATEASAQMYAERLTELAAALGFDGWLINIEVKLDVQFIDNLKEFVNHLTKTMHAAVPGSLVIWYDAITVKGDLDW

SEQ ID NO: 84616 - protein, 109 aa, Setaria italica
  Transcript Sequence Number=SeqID_18642
  Gene Ontology: Mol. function=phosphoenolpyruvate carboxykinase (ATP) activity; Biological process=gluconeogenesis
  Homolog annotation: Hit_ID=Q5VSV8; Match level="QueryCoverage=97%, HitCoverage=21%, E-value=1e-34, Identity=68%"; Hit description =OSJNBa0009P12.18 protein
MGNNIKSLLGSGTQYANGFAAADIERSSLILCRKAFADSAIVKDALTAMSAPILSARGGLPVPGWLLSFGGRVVLLFAPVEIIRSCSEIQNVLLSIDCGAAISSKWSTV

SEQ ID NO: 84617 - protein, 122 aa, Setaria italica
  Transcript Sequence Number=SeqID_18643
  Gene Ontology: Mol. function=beta-amylase activity; Cellular component=chloroplast; Biological process=polysaccharide catabolic process
  Homolog annotation: Hit_ID=Q5NB81; Match level="QueryCoverage=100%, HitCoverage=21%, E-value=1e-58, Identity=86%"; Hit description =Putative beta-amylase PCT-BMYI
  Pfam annotation: Domain name=Glyco_hydro_14; Domain location=2-122; Score=-272.7; E_value=0.06; Accession=PF01373.9; Description =Glycosyl hydrolase family 14
WIPLPQWVLEEMDKVPDLSYTNRYQQRNKEYISLGCDSLPVLKGRSPMQAYSDFMRSFRNTFEDYLGAIVTEVQVGMGPGGELRYPSCPTEKLNQPGSSSELGEFQCYDKFMQASLSAHAQI

SEQ ID NO: 84618 - protein, 286 aa, Setaria italica
  misc_feature (13)..(13): Xaa can be any naturally occurring amino acid
  misc_feature (24)..(24): Xaa can be any naturally occurring amino acid
  Transcript Sequence Number=SeqID_18644
  Gene Ontology: Mol. function=beta-amylase activity; Biological process=polysaccharide catabolic process
  Homolog annotation: Hit_ID=Q5NB81; Match level="QueryCoverage=99%, HitCoverage=49%, E-value=1e-115, Identity=75%"; Hit description =Putative beta-amylase PCT-BMYI
  Pfam annotation: Domain name=Glyco_hydro_14; Domain location=1-247; Score=-110.1; E_value=1.5e-10; Accession=PF01373.9; Description =Glycosyl hydrolase family 14
LNQPGSSSELGEXFQCYHSMMLAXLVITLSAHAQILGIQEWGSGGSTGTDGSQQNLEETSFFHADGGYWDTPYGRFFLEWYSGMLVLHGERLCMIADAIFSGTGVTISGKVAGIHWHYYTCAHPSELTAGYYNTLLRDGYLPIARMFAKYKAALCCGCFDLRDTERTNPESSPEGTLRQLVGAAKMCNLPLNGENSVTRLDDASLNQVIRSSRLYSGRSSGTSFSFNYVRMNKSLFEFHNWSRFTKFVRQMSDARTFLARLDVRRGQQYLSSMSVVWVVSRACAYT

SEQ ID NO: 84619 - protein, 52 aa, Setaria italica
  Transcript Sequence Number=SeqID_18645
STGRTGITDQRMVQFMAMGKEIIFCDPKASNSSANNTPNLVAQKECWCCGGT

SEQ ID NO: 84620 - protein, 98 aa, Setaria italica
  Transcript Sequence Number=SeqID_18646
  Subcellular localization annotation: CTP_CleavageSite=47; ConfidenceScore=5.59e-01
VALLPLPPLRARASATALRPPSPLRRHLQLPRRSAMSSAASRLSHIAAATAGGSAAGESNEPPPAGSAAAQEDNGLSSGDMGYRLPPKEIQDIVDAPP

SEQ ID NO: 84621 - protein, 154 aa, Setaria italica
  misc_feature (9)..(9): Xaa can be any naturally occurring amino acid
  misc_feature (105)..(105): Xaa can be any naturally occurring amino acid
  Transcript Sequence Number=SeqID_18647
  Gene Ontology: Mol. function=transporter activity; Cellular component= membrane; Biological process=oligopeptide transport
  Homolog annotation: Hit_ID=B6TII9; Match level="QueryCoverage=80%, HitCoverage=21%, E-value=2e-33, Identity=58%"; Hit description =Peptide transporter PTR2
PKPKLAHTXDFSLLDKAAVITESDFEEVTEEAGSSWKLCTVTQVEELKILLRLLPIWATSIIVSAAYAQMNTTFIQQGSAMNMSILSVSVPPASMASFEVACVLXWVMLYSKVIVPALRGFSSGGDGEPSLLQRMGAGRLLMALAMAVSGLVEM

SEQ ID NO: 84622 - protein, 229 aa, Setaria italica
  misc_feature (202)..(202): Xaa can be any naturally occurring amino acid
  Transcript Sequence Number=SeqID_18648
  Gene Ontology: Mol. function=extracellular-glutamate-gated ion channel activity; Cellular component=integral to membrane; Biological process=G-protein coupled receptor protein signaling pathway
  Homolog annotation: Hit_ID=Q7XP59; Match level="QueryCoverage=99%, HitCoverage=24%, E-value=1e-72, Identity=60%"; Hit description =Glutamate receptor 3.1
  Pfam annotation: Domain name=ANF_receptor; Domain location=17-229; Score=95.8; E_value=1.5e-25; Accession=PF01094.20; Description =Receptor family ligand binding region
VVNIGALFTFDSIIGRVAKVAIAAAVNDINNDSRVLSGTKLVVQMQDTNSSGFIGIVQALQFMEKDTVAIIGPQSSVVAHVISHVANELQVPLMSFAATDPTLTSLQYPFFVRTIHSDQFQMASVADLVYYYGWKMVTAVYIDDDYGRNGISTLGDELAKRRLKILHKAAIRPGAKKSEIAAVLVKAAMMESRVFVLHAYDXTGLDVFSLAYNLTMTSGGYVWIATDWL

SEQ ID NO: 84623 - protein, 150 aa, Setaria italica
  misc_feature (76)..(76): Xaa can be any naturally occurring amino acid
  Transcript Sequence Number=SeqID_18649
ISAMSRQIHGLAKLKGQEKQARVEHGSKALTVHKAMATSKEPVGDHGGRDGNVGMFEVAMFEEGYHGYPDWTNSLXDDDNCYKDEEDGHDNENDNEELDVLGALDEPSVIEIIRSNREAQGLEFNMDDEIDEACDMFIRRCRSQMNLSLL

SEQ ID NO: 84624 - protein, 97 aa, Setaria italica
  misc_feature (93)..(93): Xaa can be any naturally occurring amino acid
  Transcript Sequence Number=SeqID_18650
  Gene Ontology: Mol. function=protein binding
  Homolog annotation: Hit_ID=B6U792; Match level="QueryCoverage=89%, HitCoverage=16%, E-value=1e-28, Identity=71%"; Hit description =Protein binding protein
GFSYLLNCGSASATTDGRGLRWEPDAPYVSAGAPSAPTLPGAGGLLDPTLATFRSFPHRPRSKFCYELPVDKNRRYLLRPTFFYGALSASSSXPPPP

SEQ ID NO: 84625 - protein, 94 aa, Setaria italica
  Transcript Sequence Number=SeqID_18651
  Homolog annotation: Hit_ID=A2Q4J6; Match level="QueryCoverage=96%, HitCoverage=8%, E-value=3e-42, Identity=82%"; Hit description =Tetratricopeptide-like helical
LGYVPDYSFVLQDVELDEKEQILNNHSERLAIAFGIINTPPRTPLHIYKNLRVCGDCHNATKYISKITEREIIVRDSNRFHLIKDGHCSCGDFW

SEQ ID NO: 84626 - protein, 131 aa, Setaria italica
  Transcript Sequence Number=SeqID_18652
  Gene Ontology: Mol. function=protein tyrosine kinase activity; Cellular component=integral to membrane; Biological process=protein amino acid phosphorylation
  Homolog annotation: Hit_ID=B9T632; Match level="QueryCoverage=98%, HitCoverage=32%, E-value=2e-46, Identity=63%"; Hit description =Serine-threonine protein kinase, plant-type, putative
ISGTYGYMAPEYAMNGYLSTKTDVFSFGILVLEIVSGRKNFARHVDDEKVDLLNYTWKLFEGGRALEIVDPSLSDPDTEQTRLCIQLGLLCCQAVVSDRPDMHSVHLILSSDSFTLPKPGKPAIHGRTGRG

SEQ ID NO: 84627 - protein, 112 aa, Setaria italica
  Transcript Sequence Number=SeqID_18653
ASAVLEWAPAIAAHIKVQFGGMVHSSNPMLLHSLLTLFVRFPDAFGAEDERTMARRLALAACEAHRPLTARLLALHWLLGFTRFRNLVPGLARWFYPNLFDPLALKAKKLDC

SEQ ID NO: 84628 - protein, 127 aa, Setaria italica
  Transcript Sequence Number=SeqID_18654
FFQSLDAANFLFSRVSQIPAESLVLPVISTNDRLTLGCELWDGTIIRGQNEISHPSNGRREVVNKDCNSCTALPSRIKRVFYMSSEGSSLLHELNDDMVFPEANHTVLEQLSKVDCIVYAMGSLFTS

SEQ ID NO: 84629 - protein, 126 aa, Setaria italica
  misc_feature (40)..(40): Xaa can be any naturally occurring amino acid
  Transcript Sequence Number=SeqID_18655
  Homolog annotation: Hit_ID=B0Y1H1; Match level="QueryCoverage=84%, HitCoverage=21%, E-value=1e-15, Identity=45%"; Hit description =UPF0052 domain protein
LISCFISFSGKDCNSCTALPSRIKRVFYMSSEGSSLLHEXFPEANHAVLEQLSKVDCIVYAMGSLFTSVCPSLVLRGIGETIASRSIPKVLLLNGSHDRETVGLSTSGFVTAITDSLNRTYGDPST

SEQ ID NO: 84630 - protein, 391 aa, Setaria italica
  Transcript Sequence Number=SeqID_18656
  Homolog annotation: Hit_ID=A1CBK9; Match level="QueryCoverage=92%, HitCoverage=86%, E-value=3e-55, Identity=35%"; Hit description =UPF0052 domain protein
  Pfam annotation: Domain name=UPF0052; Domain location=1-349; Score =258.0; E_value=2.2e-74; Accession=PF01933.10; Description =Uncharacterised protein family UPF0052
RVVHVLPVSDDGGSTAEIVRVLGGPAVGDIRSRCLRLSDESTSEALSVRKLLGHRLPIDPSEAKLEWYQIVEGDHSLWDGVSRPYRETIRAFLVYFHNEILRRSAEMFCFTNGSIGNFFFAGARIFFQSLDAAIFLFSRVSQIPAESLVLPVISTNDRLTLGCELWDGTIIRGQNEISHPSNGRREVVNKDCNSCTALPSRIKRVFYMSSEGSSLLHEVFPEANHTVLEQLSKVDCIVYAMGSLFTSVCPSLVLRGIGETIASRSIPKVLLLNGSHDRETVGLSTSGFVTAITDSLNRTYGDPHKSLKNHPNDYVNAILVPEGGQVPLDVENLAAQGIFHVVTVESVHDPKVGVIFDPPSLIQALTSLISEEMTTHLSEPGYLMEMVKFVS

SEQ ID NO: 84631 - protein, 119 aa, Setaria italica
  misc_feature (44)..(44): Xaa can be any naturally occurring amino acid
  Transcript Sequence Number=SeqID_18657
RSAARRHTKAETARSLDDQPLVLPMSLLLLMMLLLSRRHATPAXCLGSNGFAAPSTNHQSQQCPVCRYSPRPRRAPKHKGTREACLRLLIEGSETLTGRFWQSHWMGEREPIVCSKRQA

SEQ ID NO: 84632 - protein, 172 aa, Setaria italica
  Transcript Sequence Number=SeqID_18658
  Gene Ontology: Mol. function=transferase activity, transferring groups other than amino-acyl groups; Cellular component=membrane; Biological process=fatty acid biosynthetic process
  Homolog annotation: Hit_ID=B4FQN3; Match level="QueryCoverage=100%, HitCoverage=37%, E-value=1e-77, Identity=80%"; Hit description =Acyltransferase
  Pfam annotation: Domain name=ACP_syn_III_C; Domain location=47-133; Score=35.7; E_value=3.3e-09; Accession=PF08541.2; Description=3 -Oxoacyl-[acyl-carrier-protein (ACP)
  Pfam annotation: Domain name=Chal_sti_synt_C; Domain location=6-135; Score=-1.0; E_value=0.0025; Accession=PF02797.7; Description =Chalcone and stilbene synthases, C-te
  Pfam module annotation: Pfam domain module=ACP_syn_III_C::Chal_sti _synt_C; Domain location=47-133::6-135
HAFVHNLRVLAPRVLPLPELLRLACATLSARLARKKQRGSNHLTIRMKAGVDHFCVHTGGAAVIDGVGKGLTLTEHDLEPSRMTLHRFGNTSASSVWYVLGYMEAKGRLRKGDRVLMLTFGAGFKCNSCVWTVEKPATDAGVWKDRIDQYPLKDVSNPFMEKYGFVKDMMNL

SEQ ID NO: 84633 - protein, 240 aa, Setaria italica
  misc_feature (212)..(212): Xaa can be any naturally occurring amino acid
  Transcript Sequence Number=SeqID_18659
  Gene Ontology: Mol. function=anthranilate synthase activity; Biological process=folic acid and derivative biosynthetic process
  Homolog annotation: Hit_ID=Q5Z856; Match level="QueryCoverage=100%, HitCoverage=26%, E-value=1e-127, Identity=89%"; Hit description =Putative aminodeoxychorismate synthase/glutamin amidotransferase
  Pfam annotation: Domain name=Chorismate_bind; Domain location=1-237; Score=272.3; E_value=1.1e-78; Accession=PF00425.10; Description =chorismate binding enzyme
KRRVDYVNGLQLYLKLRKQNPAPYAAWLNFSSENLSICCSSPERFLRLDRSKTLEAKPIKGTIARGRTPEEDECLRLQLQYSEKDQAENLMIVDLLRNDLGKVCEPGSVHVPRLMDVESYKAVHTMVSTVRGTKKSNLSPVDCVKAAFPGGSMTGAPKVRSMEILDSLESSPRGIYSGSIGFFSYNHTFDLNIVIRTVILHNGEATVGAGGXIVAMSDPEAEYDEMMLKARAPTKVVEGC

SEQ ID NO: 84634 - protein, 471 aa, Setaria italica
  Transcript Sequence Number=SeqID_18660
  Gene Ontology: Mol. function=RNA binding; Biological process=RNA processing
GSRDRDDRSSRDRDDRSSRDRDDRSSRDRDNRRSSMEHKGSSYGKEGTRSNARPTTGMVSSASDGSSAGPSEKQLYDQQGKKGIFHPVRGVKKEPPRRVTADEAAAIVMVATRGLGAANDSLNTIKGKKEDIHIRGSNDHSSSFGSFSSLQDRDALSKHISNSEADTSLTSSGQVKKEGFGIIDDDWIANTIAKAAAVAASKEADSSEASMTKEQKLKAERLRRAKMFAAIVKGGGNKMNDLAAVSDQTDEPSEATPADINASGLDAPPEAKEREGSSAPFEFDVSNVTKEKDTDDEQNRVRKYRKKHHKESDEEKDESEESYKHSRKRHRSEHSRGHSKDAHKHKQKRHSKDRESGHRRHRHSSSEDEHEHRSSKSRNRHRDDDRYSDDEEHNRSRRHQREHRSGSKRKHEEEQDQSEQTQGRLEVSPSTSGAKLESDKRPGDTAQSSQGVTEVPSELRAKIRAMLLETL

SEQ ID NO: 84635 - protein, 92 aa, Setaria italica
  Transcript Sequence Number=SeqID_18661
  Subcellular localization annotation: CTP_CleavageSite=6; ConfidenceScore=5.28e-01
SDDFLRIMLLPPGAISFWFSSSFPGGTKFFWFPRLFFWERVHVLDCGLFSFSSEILPSGWSLLMDSISVTTFGSNNSFMICLCLFQSQCVQK

SEQ ID NO: 84636 - protein, 108 aa, Setaria italica
  Transcript Sequence Number=SeqID_18662
  Subcellular localization annotation: CTP_CleavageSite=41; ConfidenceScore=5.30e-01
KSPRLADQDPQNQKGKTVKRTQVQAFLLKQQLTQHSSQFINSQRRQSPNRHYGSLWSRQHRRGQGEQGRGDGGGHGASGEEGLGRGVGVRRRRGRGAAGATAGGGLGG

SEQ ID NO: 84637 - protein, 250 aa, Setaria italica
  misc_feature (212)..(212): Xaa can be any naturally occurring amino acid
  Transcript Sequence Number=SeqID_18663
  Gene Ontology: Mol. function=histone-lysine N-methyltransferase activity; Cellular component=nucleus; Biological process=chromatin modification
  Homolog annotation: Hit_ID=Q8L821; Match level="QueryCoverage=100%, HitCoverage=35%, E-value=1e-136, Identity=92%"; Hit description=SET domain-containing protein SET118
  Pfam annotation: Domain name=YDG_SRA; Domain location=14-177; Score =322.5; E_value=8.8e-94; Accession=PF02182.9; Description=YDGSRA domain
ITKMQETNAVLYPEKRIGHLPGIDVGDQFYSRAEMVVLGVHSHWLNGIDYMGMKYQGKKEYENLIFPLATCIVMSGIYEDDLDKADEIIYTGQGGNDLLGNHRQIGSQQLKRGNLALKNSRDNGNPIRVIRGHISKTSYTGKVYTYDGLYKVVDDWVQNGVQGHVVFKYKLKRLEGQPSLTTSEVRFTRAEAPTTISELPGLVCDDISGGQXNLPIPATNLVDDPPVPPSGFTYLKSLKITKAIKMPSNI

SEQ ID NO: 84638 - protein, 197 aa, Setaria italica
  Transcript Sequence Number=SeqID_18664
QRISKREVDNNTFISPLEDDSSREVFGLIKKLNIAPQPERRGKQSTSNHELLMTGKNSSASKSSFLGRTASGSMVSSYRSVHRSYVFGRDDSNSSTRSCMSTSESFSDMDQTNSSQPKKAKFSSSQQKPVGPRANSKSDTNSGVSLFEILRRTSSVTSDRQELSSQESCSTITESQAVHQFSAFKLSRRFSRVGARN

SEQ ID NO: 84639 - protein, 85 aa, Setaria italica
  Transcript Sequence Number=SeqID_18665
  Subcellular localization annotation: CTP_CleavageSite=81; ConfidenceScore=5.73e-01
SPSPFPIGSPPSHPPPRRSRGEPPNPPAPPPSSQRSPPKASHKSPPLFCPFVAKIRFFPPYPSLAFRFFRFRKFHRLLEISCSPI

SEQ ID NO: 84640 - protein, 64 aa, Setaria italica
  Transcript Sequence Number=SeqID_18666
  Subcellular localization annotation: CTP_CleavageSite=28; ConfidenceScore=5.03e-01
WAKNAPFIPLRKKFSTARGTNYQMMITRCYLRSFTGRIMLYCSSLLLTPMDGGTYHKATNHFHK

SEQ ID NO: 84641 - protein, 124 aa, Setaria italica
  Transcript Sequence Number=SeqID_18667
  Gene Ontology: Mol. function=RNA methyltransferase activity; Biological process=RNA processing
  Homolog annotation: Hit_ID=Q9SUL3; Match level="QueryCoverage=78%, HitCoverage=36%, E-value=8e-26, Identity=62%"; Hit description =OBP33pep like protein
LPEVWWWNSISEGCRQRSHRSHTLFVYIPQYGGGTASLNVTVAASIVFHHFAVWAGFPERGREGNKFIVADRPQGHSRGLYCTDSIEAVIEERKMRKENACDILEENGSSHPQESNGLDLMFTE

SEQ ID NO: 84642 - protein, 215 aa, Setaria italica
  misc_feature (149)..(149): Xaa can be any naturally occurring amino acid
  Transcript Sequence Number=SeqID_18668
  Gene Ontology: Mol. function=protein serine/threonine kinase activity; Cellular component=plasma membrane; Biological process =protein amino acid phosphorylation
  Homolog annotation: Hit_ID=B6SP14; Match level="QueryCoverage=98%, HitCoverage=22%, E-value=3e-87, Identity=77%"; Hit description =Receptor protein kinase-like
TDPSTYILLDEKMTAKVADFGLSLLVSDSEEGHLCTNVKGTLGYLDPEYYMTQQLTAKSDVYSFGVVLLELIVAKPPIHDNKYIVREVKMALDMEDRKHCGLKDVMDPVLEKMGSLLGFPRFLKLALQCVEEVGTGRPSMNAIVREIEXGIMEDNGLTPDSMSASSSFSIESRTMKVGPKLPYSSASTSSSTFDMNSRAFEYSGVFPSSDGSLKS

SEQ ID NO: 84643 - protein, 256 aa, Setaria italica
  misc_feature (71)..(71): Xaa can be any naturally occurring amino acid
  misc_feature (224)..(224): Xaa can be any naturally occurring amino acid
  Transcript Sequence Number=SeqID_18669
  Gene Ontology: Mol. function=serine-type endopeptidase activity; Biological process=proteolysis
  Homolog annotation: Hit_ID=B9RNE4; Match level="QueryCoverage=98%, HitCoverage=27%, E-value=5e-96, Identity=68%"; Hit description =Dipeptidyl-peptidase, putative
YEYWYKTRITRTWVISPDLKNHRRRLLFERSSEDAYSNPGSPVMCRTPAGTTVIARIKRNCEGSYILLKGXGATPKGSIRRTSFPYVNTGEKERIWESDKEKYYESILALISYHPKCEVQLDQLKLLVSKESRREITQYYIKIWPNKKQVQITNYPHPYPQLALLQKEIIRYQRKDGVKLTATLYLPPGYSPSEDGPLPCLIWSYPGEFKSKEAAGQVRRSPNXFARISNNFPLLWLARGFAILADPTIPLGFLHQ

SEQ ID NO: 84644 - protein, 87 aa, Setaria italica
  Transcript Sequence Number=SeqID_18670
  Subcellular localization annotation: CTP_CleavageSite=48; ConfidenceScore=5.10e-01
GHARADRHGHPFLPRHRHAKLRKGSRGPAVVARRHGHAFLSTPARGAEAAVGQAAEAVRGISLSPCPPRSTSTRSRPSLSSLLPTPT

SEQ ID NO: 84645 - protein, 135 aa, Setaria italica
  Transcript Sequence Number=SeqID_18671
LSSYLNLLSTTLLSRERRFFTFCHQLPALGVFRFRNLGDSSLPVISCLGCLPLQEHSREWHLARVRRLQERRASVVLHRHRLSGILGLRLLLAPIDLHRRRSAQGPLLGPDRILPRRGSPHTLGLLLPLGLVLGP

SEQ ID NO: 84646 - protein, 169 aa, Setaria italica
  Transcript Sequence Number=SeqID_18672
  Subcellular localization annotation: CTP_CleavageSite=69; ConfidenceScore=5.34e-01
MADACTLTPAAALPPLLPTPRFFATVAGRASEGSAWAGNKKPGRASASESWTKDKLLARTTASSSVPSRASLSQDWTKDKAQRKEETERVGRSSSREDPVGPKKRTLSRAPSVEVDRSEKKAKPEDAVEPVTVQYYAGPAFLKSPDPSEVPLPTKFLKRKTPKAADDRK

SEQ ID NO: 84647 - protein, 145 aa, Setaria italica
  Transcript Sequence Number=SeqID_18673
  Gene Ontology: Mol. function=hydrolase activity
  Homolog annotation: Hit_ID=B9RL97; Match level="QueryCoverage=100%, HitCoverage=32%, E-value=2e-45, Identity=56%"; Hit description =Catalytic, putative
DHFHERGLYRSIFLSIMEGEESLSRYSPEIIAKMSSAETIALLPLIVLMHGTGDYSIPSSASQTFVDVLHQVGAQARLLLYEGKTHTDIFLQDPLRGGRDPLVEDVLSVIHADDAIARQKVALAPTPRRLVFEWQLKLARQISPF

SEQ ID NO: 84648 - protein, 82 aa, Setaria italica
  Transcript Sequence Number=SeqID_18674
YAVLSDPEKREGLDSRDIFARFVRSGVVVAPTPDSTMVHSDKLNSLHTKDTRTADFTSNAVSHVQRTTDKSCFEERNSHSFK

SEQ ID NO: 84649 - protein, 99 aa, Setaria italica
  Transcript Sequence Number=SeqID_18675
ILPEQGVFKRTIAHVIISNYSCQWFQIREELGLQPWDRETRREEHARAKGRHGSFINLQPCGTTRGTPARSLEQCIFYQKLMVSFLMLQATEKAFLNLV

SEQ ID NO: 84650 - protein, 113 aa, Setaria italica
  Transcript Sequence Number=SeqID_18676
  Homolog annotation: Hit_ID=UPI0000196FAA; Match level="QueryCoverage =91%, HitCoverage=11%, E-value=6e-24, Identity=49%"; Hit description =transducin family protein / WD-40 repeat family protein
SSGLSWGMDGYCLYSCSQDNSARCWIYHENHLEEIPVHTNFPEPKESTDLSEVSNRCFGLTLAPGEQMIAVVRGLDLNLLDQMYQARTQKAVVEFIWIGGQFVGIPLDRRIDV

SEQ ID NO: 84651 - protein, 313 aa, Setaria italica
  Transcript Sequence Number=SeqID_18677
  Homolog annotation: Hit_ID=B9SEJ5; Match level="QueryCoverage=96%, HitCoverage=36%, E-value=4e-41, Identity=34%"; Hit description =Nucleotide binding protein, putative
MLYILLLFQDNSARCWIYHENHLEEIPVHTNFPEPKESTDLSEVSNRCFGLTLAPGEQMIAVVRGLDLNLLDQMYQARTQKAVVEFIWIGGQFVGIPLDRRIDVCNPQSAILSSSNLWWGSNILWSLKKYENVEKSIVLWDVVTALQGFKKYAPAFLETLMDIWISALFSDDRQCVSINAPSYSRHDILPSVSLRKLHLLNIICRKVMLSDHAQHGPGAENGNDSATDFWNTLLIRSERELRERLVGFTFAAVLKRTAFLLKGTSTENSWFPVGVAQMDSWVSMNDEVHNQLSYLRSRIKDLGNRIVLLSFVR

SEQ ID NO: 84652 - protein, 74 aa, Setaria italica
  Transcript Sequence Number=SeqID_18678
ILDYIKTFRRNKMVKIAIDQGRRRLPVILDACAAPTGRELVGRNPSPALCRCRQQRHLQVSFPPWRCCFEVFPP

SEQ ID NO: 84653 - protein, 531 aa, Setaria italica
  Transcript Sequence Number=SeqID_18679
  Gene Ontology: Mol. function=binding; Cellular component=plasma membrane
  Homolog annotation: Hit_ID=B7FF20; Match level="QueryCoverage=96%, HitCoverage=79%, E-value=0.0, Identity=83%"; Hit description=ARO1 -like protein 2
  Pfam annotation: Domain name=Arm; Domain location=107-147; Score =28.6; E_value=2.5e-05; Accession=PF00514.15; Description =Armadillobeta-catenin-like repeat
  Pfam annotation: Domain name=Arm; Domain location=301-341; Score=3.3; E_value=4.7; Accession=PF00514.15; Description=Armadillobeta-catenin -like repeat
  Pfam annotation: Domain name=Arm; Domain location=436-476; Score =22.1; E_value=0.0023; Accession=PF00514.15; Description =Armadillobeta-catenin-like repeat
  Pfam annotation: Domain name=Arm; Domain location=66-106; Score=24.9; E_value=0.00033; Accession=PF00514.15; Description=Armadillobeta -catenin-like repeat
  Pfam module annotation: Pfam domain module=Arm::Arm::Arm::Arm; Domain location=107-147::301-341::436-476::66-106
SPRLLRRPPPSANDDDDFDAHIGLPPIAQNEPILFLIWEQIAVLYTGNLDARADAAANLVSLARDNDRYSKLIIEEDGVPPLLKLVKEGRLEGQENAAHAVGLLGRDPECVEQMVQAGACLAFAKVLKEGPMKVQATVAWAVSELAANHPKCQDAFAQHNVIRLLVGHLAFETVQEHSKYAITSKMSIHAVVMDKKNSTGSGSADLLDAADHSTMRYPTGHASQSKNEMHSLVQSTMAAKSNGGSGKHVATTTNGGVVATKQHNASLSGTSTRGREFEDPETKALMKANAAKALWQLAKGNAAICKSITESRALLCFAVLLEKGEGDVQYNSSMALMEICCVAEQNSDLRRSAFKPTSPAARAVVDQLLRVVEKAEYDDLLIPCIMSLGCLSRTFRATETRIIGPLVKLLDEREADVSREAAIALTKFACTDNYLHVDHSKAIINAGGAKHLVQLVYFSEQVVQIASLTLVCYIAHNVPDSEELAQAEILTVLEWAAKQAYMMQDPIIENLLPEAKIRLELYQSRGAKGYH

SEQ ID NO: 84654 - protein, 86 aa, Setaria italica
  Transcript Sequence Number=SeqID_18680
  Subcellular localization annotation: CTP_CleavageSite=49; ConfidenceScore=5.20e-01
CQLTWSTACNGQTIPQMDSCASTSAAAGDGAAGKRKRSSETSTNAGTASAAKKPNGSCFGATFQIGNGLQGSLGHHMLLHSNTGMN

SEQ ID NO: 84655 - protein, 159 aa, Setaria italica
  Transcript Sequence Number=SeqID_18681
  Subcellular localization annotation: CTP_CleavageSite=39; ConfidenceScore=5.31e-01
MDSTTSTQVAGAAGSRSRSIASRGSTTPPPLTMPGREPSDALVGGGAGGADGDPSLALLRLAALGDRMAAVRGRIAASISGEARPLSYADIQSVSSEISYTAQLVVLNAASLLASSVPFPAPTPPPTAAAPSPAPIREIPAAAAASAQEQPLEAAKGDG

SEQ ID NO: 84656 - protein, 75 aa, Setaria italica
  Transcript Sequence Number=SeqID_18682
YNPAFLSYCVVLHIRARLAIGSVLAAAAPFVHSRWVSFLRIQSEVEMVKDTVEVVAEVVEEAATVAEKVVRSVGC

SEQ ID NO: 84657 - protein, 137 aa, Setaria italica
  Transcript Sequence Number=SeqID_18683
  Subcellular localization annotation: CTP_CleavageSite=41; ConfidenceScore=5.50e-01
MASLVRSFASLYCQKLRSTTRLGPVTAAPPRFHATNRQLLPASSGAAEARPPPALPRQFQEQQRTPFFTWARLAIGSVLAAAAPFVHSRWVSFLRIQSEVEMVKDTVEVVAEVVEEAATVAEKVSSEVAEQLARRAG

SEQ ID NO: 84658 - protein, 81 aa, Setaria italica
  Transcript Sequence Number=SeqID_18684
  Gene Ontology: Mol. function=electron carrier activity; Cellular component=integral to membrane; Biological process=oxidation reduction
  Homolog annotation: Hit_ID=B6T0I8; Match level="QueryCoverage=100%, HitCoverage=15%, E-value=2e-33, Identity=82%"; Hit description =Cytochrome P450 CYP90D10.b
REEEKRIITEGEDPHGATHPRDMIDVLLGNGSDELTDELISDNMIDFMIPAEDSVPVLITLAVKYLSECPLALQQLEEENM

SEQ ID NO: 84659 - protein, 88 aa, Setaria italica
  Transcript Sequence Number=SeqID_18685
MPPTGEAPSGSMFLHQGHFGLEPPPAPAGTDDTRFDASQYAFFGTNVLEEVELGGLEDDNDSDAAFIGVIDVEHPLSSQGNALEVVLF

SEQ ID NO: 84660 - protein, 297 aa, Setaria italica
  misc_feature (32)..(32): Xaa can be any naturally occurring amino acid
  misc_feature (270)..(270): Xaa can be any naturally occurring amino acid
  misc_feature (284)..(284): Xaa can be any naturally occurring amino acid
  Transcript Sequence Number=SeqID_18686
AFIGVIDVEHPLSSQGNALEAEDSSFSDVDDXLANTFSKLRRDVNLPKHIGINNLGTSFSRESSAAADWTPEFESPLWPNQYVLDARQGQDGNDCWPPHHHSSHFADSRLQRTSSSSQQQEQQNCNEPVLGPRPSPLHRTSSYPHKEPQYNPAEAVPAPNAPYNSHHPPGGPPSSLPGQAHQMNMSSFNEFQMHMPAQSDAPLSQFPRGGTPPESLFGGNLGHMVSRGFPTNSNSSGPKNHMLNNGQIPGEIASIMPNLVPNHLQRPNAXVPQMLPMRKQHGMXLPIQQSPQHLSRL

SEQ ID NO: 84661 - protein, 329 aa, Setaria italica
  Transcript Sequence Number=SeqID_18687
  Gene Ontology: Mol. function=transporter activity; Cellular component= integral to membrane; Biological process=oligopeptide transport
  Homolog annotation: Hit_ID=B9SKP9; Match level="QueryCoverage=87%, HitCoverage=47%, E-value=1e-99, Identity=60%"; Hit description =Oligopeptide transporter, putative
  Pfam annotation: Domain name=PTR2; Domain location=2-226; Score= -39.9; E_value=5.8e-05; Accession=PF00854.13; Description=POT family
  Subcellular localization annotation: CTP_CleavageSite=35; ConfidenceScore=5.44e-01
RRKTTNAKKNAARLPHTPNLAVLSKAAVKTAGAPAAASRWSLSTVTQVEETKQMLKMLPVLAITFVPSAMMAQINTLFVKQGTTLERHIGPHFEIPPASLQGFVTISMLVSVVLYDRVFMPLARRATGNPRGISLLQRMGVGLVIHIAIMGIASVTERHRLAVAHEHGIFTSKDTTIPLTIFVLLPQFALMGVADAFLEVAKIEFFYDQAPEGMKSLGTSYAMTSLGVGNFLSSALLSTVSHVTRRGGRAGWILNNLNASRLDKYYAFFAVLNCANLLVFFVVCRLYVYNAEISRVVDVGSGGGVASSGEKKREVAMQPASVGAVEITL

SEQ ID NO: 84662 - protein, 56 aa, Setaria italica
  Transcript Sequence Number=SeqID_18688
  Gene Ontology: Mol. function=hydrolase activity, acting on ester bonds; Cellular component=intrinsic to endoplasmic reticulum membrane; Biological process=intracellular protein transport
  Subcellular localization annotation: CTP_CleavageSite=36; ConfidenceScore=5.33e-01
LDILQVAHTLLSIIDPVNGQPFLSTQKRVFVFTKMLQSAVPQSLSSMTHVPGSLSS

SEQ ID NO: 84663 - protein, 100 aa, Setaria italica
  Transcript Sequence Number=SeqID_18689
  Gene Ontology: Mol. function=hydrolase activity, acting on ester bonds; Cellular component=intrinsic to endoplasmic reticulum membrane; Biological process=intracellular protein transport
  Subcellular localization annotation: CTP_CleavageSite=38; ConfidenceScore=5.04e-01
LEHFCFLYKWQSWGDGVQSTFLRQFFTFSFSLQSLKIVQMLKNNPNIIVAIATLPLVCLVHPAIGLGLLLLSHTFHAHSNLCSFLAASFRSITQKKDLYK

SEQ ID NO: 84664 - protein, 766 aa, Setaria italica
  misc_feature (175)..(175): Xaa can be any naturally occurring amino acid
  misc_feature (699)..(699): Xaa can be any naturally occurring amino acid
  Transcript Sequence Number=SeqID_18690
  Gene Ontology: Mol. function=hydrolase activity, acting on ester bonds; Cellular component=intrinsic to endoplasmic reticulum membrane; Biological process=intracellular protein transport
  Homolog annotation: Hit_ID=Q9LTZ8; Match level="QueryCoverage=97%, HitCoverage=67%, E-value=0.0, Identity=55%"; Hit description =Similarity to negative regulator of vesicle formation
  Pfam annotation: Domain name=PGAP1; Domain location=8-267; Score =391.1; E_value=2e-114; Accession=PF07819.5; Description=PGAP1-like protein
TRRLLQFPGNGGSYKQVRSLAAESFKAYQNGPLEPTFYREASSTFAGDEPKDFSIPSRYGRMLDWFAVDLEGEHSAMDGRILEEHTEYVVYAIHRILDQYKESHLERTKGGAQSSHNLPSNVILVGHSMGGFVARAALVHPNLRKSAVETILTLSSPHQYPPIALQPSLGHFFLXHVNEEWRKGYKTGVSHASSPKLSNVVVVSISGGIHDYQIRSRLASLDGIVPSTHGFMVGSSSMKNVWLSMEHQSILWCNQLAVQVAHTLLSIIDPVNGQPFLSTQKRVFVFTKMLQSAVPQSLSSMTHVPGSLSSNLPASDNWDAGEVQQKDSLSCPPSTQWTSDGLEKDLYIQSNSVTVLAMDGRRRWLDIKKLGSNGRGHFVFVTNLAPCSGVRIHLWPEKHHLPVENELPASKKILEVTSKMVQIPAGPAPKQVEPGSQTEQPSPSAFLLLSPEEMNGFSFMTISVAPRPTISGRPPPAASMAVGQFFNPEEGASALSIGRIIGSSFAPEEIFLSEDHPLALNLSFSASLGLLPVTLSLKTAGCGIKDAGDQMEAERNNLCKLRCFPPVALAWDSVSGLHIIPNIYSETVVVDSSPAFWDSPEGTDRTTVMILADPHCSYKVTARASLSAAASRFFLLYSSEILGFMVAIMFFGLMRQSSAWECDSSVPSILSAIESNLGLPKPFMFLCFMPILLFLAFYXFTTEQKPPFGTFLLVTVICYIVANGFTILLILSSKLFLYAVAILHVFIKRRSVHTSISNSLFWSLPS

SEQ ID NO: 84665 - protein, 308 aa, Setaria italica
  misc_feature (295)..(295): Xaa can be any naturally occurring amino acid
  Transcript Sequence Number=SeqID_18691
  Gene Ontology: Mol. function=hydrolase activity, acting on ester bonds; Cellular component=intrinsic to endoplasmic reticulum membrane; Biological process=intracellular protein transport
  Homolog annotation: Hit_ID=Q9LTZ8; Match level="QueryCoverage=88%, HitCoverage=23%, E-value=3e-47, Identity=37%"; Hit description =Similarity to negative regulator of vesicle formation
KIKNKTLKVKKLKETGKFLTFPPVALAWDSVSGLHIIPNIYSETVVVDSSPAFWDSPEGTDRTTVMILADPHCSYKVTARASLSAAASRFFLLYSSEILGFMVAIMFFGLMRQSSAWECDSSVPSILSAIESNLGLPKPFMFLCFMPILLFLAFLFFTTEQKPPFGTFLLVTVICYIVANGFTILLILSSKLFLYAVAILHVFIKRRWQSWGDGVQSTFLRQFFTFSFSLQSLKIVQMLKNNPNIIVAIATLPLVCLVHPAIGLGLLLLSHTFHAHSNLCSFLAASFRSITQKKXLYKSKMGDGPVLL

SEQ ID NO: 84666 - protein, 295 aa, Setaria italica
  Transcript Sequence Number=SeqID_18692
  Gene Ontology: Mol. function=hydrolase activity, acting on ester bonds; Cellular component=intrinsic to endoplasmic reticulum membrane; Biological process=intracellular protein transport
  Homolog annotation: Hit_ID=Q9LTZ8; Match level="QueryCoverage=77%, HitCoverage=20%, E-value=3e-37, Identity=41%"; Hit description =Similarity to negative regulator of vesicle formation
  Subcellular localization annotation: CTP_CleavageSite=53; ConfidenceScore=5.08e-01
MDSALNIKSYYHLSSSNLATIIYRWQSWGDGVQSTFLRQFFTFSFSLQSLKIVQMLKNNPNIIVAIATLPLVCLVHPAIGLGLLLLSHTFHAHSNLCSFLAASFRSITQKKDLYKSKMGDGPVLLSKSKSDGLQQLLPMGDSPTAPKSFTDSQLELFDCRHGIMILHLLTTLMFAPSLVAWLQRIGMGQNFPWFIDSAICVGVILHGLFGSQPNVSCCISFKLPGRRRREVGLSFLYLLAGYYSFVSSMALAPYRALYAMAIIGYICFASRVIERRNMVRGDISSRRSRKHSHRH

SEQ ID NO: 84667 - protein, 81 aa, Setaria italica
  Transcript Sequence Number=SeqID_18693
  Subcellular localization annotation: CTP_CleavageSite=41; ConfidenceScore=5.56e-01
KMPKGARQSPSRRSNPTVIFCSCSRLSPSLPSHAPPPHRLPAASRGSCFPDPFSGAEGERRLDPFPESVGGGGGNQRVVLF

SEQ ID NO: 84668 - protein, 125 aa, Setaria italica
  misc_feature (46)..(46): Xaa can be any naturally occurring amino acid
  misc_feature (58)..(58): Xaa can be any naturally occurring amino acid
  Transcript Sequence Number=SeqID_18694
  Gene Ontology: Mol. function=electron carrier activity; Biological process=oxidation reduction
  Homolog annotation: Hit_ID=Q6ERN5; Match level="QueryCoverage=73%, HitCoverage=28%, E-value=2e-30, Identity=69%"; Hit description =Putative cytochrome P450
MDDLSLGSFSLAALAAILLSLLIRCALPARSETSTRLPPGPWNLPXIGSLHHLVGSPXHRALLSLARQHGPLMLLRLGEVPTVIGSSPEAAMEVMKTNDPVFASRPRGAMLDVVSFGGKGIILAP

SEQ ID NO: 84669 - protein, 84 aa, Setaria italica
  Transcript Sequence Number=SeqID_18695
PASPIPETTSYFIAVGAQDATMEKRRQEMRARPRSCLALELEEASLWERRRAQATSGPAAPALPAGEREESTYGFAARLGEGVR

SEQ ID NO: 84670 - protein, 86 aa, Setaria italica
  Transcript Sequence Number=SeqID_18696
NFAFLYLPLSGKELGFLVILLRPNMVDHFTDVMVIAKRTSLPVCLPILLTPITIIIFPTSSRISRTTMPLLFNEKKNPTIYSLIFH

SEQ ID NO: 84671 - protein, 68 aa, Setaria italica
  misc_feature (39)..(39): Xaa can be any naturally occurring amino acid
  misc_feature (54)..(54): Xaa can be any naturally occurring amino acid
  misc_feature (57)..(57): Xaa can be any naturally occurring amino acid
  Transcript Sequence Number=SeqID_18697
  Gene Ontology: Mol. function=oxidoreductase activity, acting on NADH or NADPH, quinone or similar compound as acceptor; Cellular component=integral to membrane; Biological process=ATP synthesis coupled electron transport
  Homolog annotation: Hit_ID=P12125; Match level="QueryCoverage=100%, HitCoverage=13%, E-value=2e-19, Identity=72%"; Hit description =NAD(P)H-quinone oxidoreductase chain 2, chloroplastic
MIWHVQNENFILNSTRIFMKAFHLLLFNGSFIFPECILXFGLILLLMIDLTSDXQKXRPWFYFISSTK

SEQ ID NO: 84672 - protein, 182 aa, Setaria italica
  Transcript Sequence Number=SeqID_18698
  Gene Ontology: Mol. function=heat shock protein binding; Biological process=response to stress
  Homolog annotation: Hit_ID=Q2R254; Match level="QueryCoverage=100%, HitCoverage=47%, E-value=9e-69, Identity=47%"; Hit description=DnaJ domain containing protein, expressed
DKFPKFYAWIRKVKQEPFRVQLVWLEACPEHEQEKRWLEQDIPISCGTFRVVRNWNAMYDTMDTFSHEVYARDTGTRWEVTITPEAGEIWAIYMNWAPDWVPSSTGACEFAICEVINRTEASTSVAFLAQVSGYLSVFRPDKQKGVLEVPARENLRFSHRIPSFRLTEEQGGKLRGFYELDP

SEQ ID NO: 84673 - protein, 165 aa, Setaria italica
  Transcript Sequence Number=SeqID_18699
TTPPVLSLSQPRPLVALPIRYTPAPPDIERSRRQPESHSERSAWFGKAEGSVPACSAGHGGEGKPLANSLLDSKAPFSPKRLLSFGFPVPARLRFLTRFLPVLLQKVILKLDLHDDKDKQRVLKAVSTLHGTHTCFLSFSSAPLRSAPQSWTPASVSWRIASWKK

SEQ ID NO: 84674 - protein, 140 aa, Setaria italica
  Transcript Sequence Number=SeqID_18700
  Gene Ontology: Mol. function=metal ion binding; Biological process =metal ion transport
  Homolog annotation: Hit_ID=B6TW07; Match level="QueryCoverage=87%, HitCoverage=87%, E-value=3e-17, Identity=47%"; Hit description=Metal ion binding protein
  Pfam annotation: Domain name=HMA; Domain location=6-73; Score=31.6; E_ value=3.1e-06; Accession=PF00403.18; Description=Heavy-metal -associated domain
MAAKKVILKLDLHDDKDKQRVLKAVSTLHGIDSISVEMKDQKLTVIGLADPVDVVAKLRKVGVAHILSVGPAKEEKKDDKKGGDKKEGAKDGDKKTEAKPLLVYPPWVAQYPYTPPQYPYTPPQYFVRSAEEDPNSCVIC

SEQ ID NO: 84675 - protein, 83 aa, Setaria italica
  Transcript Sequence Number=SeqID_18701
  Subcellular localization annotation: CTP_CleavageSite=27; ConfidenceScore=5.09e-01
VVGGCTSSGMASVARSTRGRRPSVPVRTFYRWLRWRWQRGRGQWGLHEDDPSAEQAVGVAGGEAEARAWRRRGKRGGGGLVAG

SEQ ID NO: 84676 - protein, 92 aa, Setaria italica
  Transcript Sequence Number=SeqID_18702
  Subcellular localization annotation: CTP_CleavageSite=48; ConfidenceScore=5.06e-01
LVAASNWGDGGRTTTGSPAGVWRRRRRRWHSSDDFAKLICTSSVAHVDASRGGVGAPAGFQLRRSDLVDAGRGRNEELGGGTAPAGGGGGWR

SEQ ID NO: 84677 - protein, 71 aa, Setaria italica
  Transcript Sequence Number=SeqID_18703
  Gene Ontology: Mol. function=phospholipase D activity; Cellular component=membrane; Biological process=phosphatidylcholine metabolic process
  Homolog annotation: Hit_ID=B9SXF1; Match level="QueryCoverage=94%, HitCoverage=7%, E-value=3e-28, Identity=85%"; Hit description =Phospholipase d beta, putative
MPLQNLVCRKNLVIDKSIHTAYVRAIRSAQHFIYIENQYFLGSSYAWPSYVNSGADNLIPIELALKIASKN

SEQ ID NO: 84678 - protein, 816 aa, Setaria italica
  misc_feature (5)..(5): Xaa can be any naturally occurring amino acid
  Transcript Sequence Number=SeqID_18704
  Gene Ontology: Mol. function=phospholipase D activity; Cellular component=membrane; Biological process=phosphatidylcholine metabolic process
  Homolog annotation: Hit_ID=B9R8F9; Match level="QueryCoverage=95%, HitCoverage=92%, E-value=0.0, Identity=69%"; Hit description =Phospholipase d delta, putative
  Pfam annotation: Domain name=C2; Domain location=26-99; Score=45.8; E_ value=1.7e-10; Accession=PF00168.22; Description=C2 domain
  Pfam annotation: Domain name=PLDc; Domain location=322-357; Score =30.1; E_value=9.2e-06; Accession=PF00614.14; Description =Phospholipase D. Active site motif
  Pfam annotation: Domain name=PLDc; Domain location=662-689; Score =39.7; E_value=1.2e-08; Accession=PF00614.14; Description =Phospholipase D. Active site motif
  Pfam module annotation: Pfam domain module=C2::PLDc::PLDc; Domain location=26-99::322-357::662-689
CFAAXRPPTSCGQHPPAAAVPRGGSGGRHHHHRKIITSDPYVTLSVSGAVVARTAVIPNNQDPVWEERFAVPLAHRAAALEFQVKDNDTFGAQLIGTVTVPADIVASGEEVEDWYPIIGTNGKPYKPDTALCLRFRFQPIAENPAYRRGIPGDPERKGIKDSYFPLRHGGQVTLYQDAHVREGDLPEIELEDGKMFEHNACWEDICHAILEAHHMIYIVGWSVYDKVRLVRERSPSRPLPEGGDLTLGELLKFKSQEGVRVCLLVWDDKTSHDKFLFKTGGVMATHDEDTRKFFKHSSVICVLSPRYASNKLSIFKQQVVGTLFTHHQKCVLVDTQAWGNKRKVTAFIGGLDLCDGRYDTPEHRLFKDLDTVFHNDYHNPTFSAGAKGPRQPWHDLHCRIDGPAAYDVLTNFEQRWRKATKWRDRFRRVSHWKDDALIKLERISWILSPSRNVPNDHPSLWVSKEEDRENWHVQVFRSIDSGSLKGFPSDCKEASKLNLVCRKNLVIDKSIHTAYVRAIRSAQHFIYIENQYFLGSSYAWPSYVNSGADNLIPIELALKIASKIRAGERFAVYVVIPMWPEGVPTAASVQEILFFQAQTMEMMYKIIADELKAMDIKDMHPQDYLNFFCLGNREEPSSNGSPESEKSTDKSAAALATKYRRFMIYVHAKGMIVDDEYVILGSANINQRSLAGSRDTEIAMGAYQPHHAWSTKNRHPHGQVYGYRTSLWAEHLGMVDDRFKDPSSLDCVRFVNQIAVENWQRFTAEEIRTLQGHLLKYPVNVEDDGKIGPLPDQENFPDVGGKILGAPTSLPDSLTM

SEQ ID NO: 84679 - protein, 342 aa, Setaria italica
  misc_feature (81)..(81): Xaa can be any naturally occurring amino acid
  Transcript Sequence Number=SeqID_18705
  Gene Ontology: Mol. function=protein phosphatase type 2A regulator activity; Cellular component=protein phosphatase type 2A complex; Biological process=signal transduction
  Homolog annotation: Hit_ID=Q6I621; Match level="QueryCoverage=100%, HitCoverage=66%, E-value=1e-155, Identity=77%"; Hit description =Protein phosphatase 2A B'kappa subunit
  Pfam annotation: Domain name=B56; Domain location=74-342; Score =321.6; E_value=1.6e-93; Accession=PF01603.12; Description=Protein phosphatase 2A regulatory B subunit (B56 family)
  Subcellular localization annotation: CTP_CleavageSite=65; ConfidenceScore=5.72e-01
MWKQFLPKLPRKSSASGKGDHVSGSSPGRNAAGNGSAIQRTSSCPSAGPARPASSVKRMSSAVFPSSVVAGIEPLVSFKDXSPNGEKPNLFVSKVSLCCVVFDFSDPNKNSAEKDFKRQALVDLVDYVDSASSRFTEPMVVACCRMFAINLFRVFPPNCRSSSSGGGEGEEEEPMFDPAWPHLHLVYDLLLKFIGSSSLDAKVGKKYFDHTFIVKLLELFNSEDPRERDCLKTILHRIYGKFMVHRPFIRKAVSNIFYHFVFETDRHNGIAELLEVFGSVISGFTLPLKEEHKIFLWRVLIPLHKPKTLGVYLQQLTYCVTQFVEKEPKLASSVILGLLRYW

SEQ ID NO: 84680 - protein, 42 aa, Setaria italica
  Transcript Sequence Number=SeqID_18706
MNVLDLSFFRSLQSLTDSRNPTTIEELIQGVEEEYEAYDVEN

SEQ ID NO: 84681 - protein, 61 aa, Setaria italica
  Transcript Sequence Number=SeqID_18707
MQHIYLFFSLMHLKKLATPCRCATTTVRLRKCLTNAQRYAAYTSLHAKSKNGKLPKTTTKE

SEQ ID NO: 84682 - protein, 163 aa, Setaria italica
  Transcript Sequence Number=SeqID_18708
  Subcellular localization annotation: CTP_CleavageSite=34; ConfidenceScore=5.21e-01
ISSCTYCYSKWSMELVPTASAGASSSSSDNTSPPADRLKQARVGREDSFTRDCKCWSCLLARDTSRSFAEISRVGACLLGGGCMSRSLLAGGHVCRNLLAEESGRPANREAVIDRRVAACVCGSQRVEGRWVQNFKNSNCLLASRGSWVVLGTGQMCMYSWMV

SEQ ID NO: 84683 - protein, 74 aa, Setaria italica
  Transcript Sequence Number=SeqID_18709
ITGPSPSSSYRCPISLAPDLWPVCTIKISIFSNDMVYIRTIPNPLLLFAIPRLCKFWIWLVLLQCVAAHLQEQQ

SEQ ID NO: 84684 - protein, 369 aa, Setaria italica
  misc_feature (60)..(60): Xaa can be any naturally occurring amino acid
  misc_feature (162)..(162): Xaa can be any naturally occurring amino acid
  misc_feature (235)..(235): Xaa can be any naturally occurring amino acid
  misc_feature (323)..(323): Xaa can be any naturally occurring amino acid
  Transcript Sequence Number=SeqID_18710
  Gene Ontology: Mol. function=transferase activity, transferring hexosyl groups; Biological process=metabolic process
  Homolog annotation: Hit_ID=Q7XU81; Match level="QueryCoverage=92%, HitCoverage=86%, E-value=1e-107, Identity=53%"; Hit description =OSJNBa0029H02.13 protein
LYYLIVILAGVQQPQMRLRKWLTNAQRYAAYTSLHAKSKNGKLLKTTTKEVAAFFQTQIXVIQKIWKTAREQIVLGLEVDVSNKRTGQCSRKKAELELSRMATIPLNRRSTLRSLAKSLDVSISTLHRKFKVGLIRRHSNTLKPHLKERNKRERLQFCISMXRERGTLETKSIIVNREVMRQYLIEKVIPAIKSVWPQDAIHETIYIQQDNARTHVSPNDPAFLQAVAAIGLDIXLMQQPPNSLDMNVLDLSFFRSLQSLTDSRNPTTIEELIQGVEEEYEAYDVENLNRVFLSLQMCMKEVMKIGGGNRYRNPHMNKRRLDXEREGRLPHRLSCDKDLYDSALANLAHYGLSVILLCCNVNGVEYYCV

SEQ ID NO: 84685 - protein, 272 aa, Setaria italica
  misc_feature (241)..(241): Xaa can be any naturally occurring amino acid
  Transcript Sequence Number=SeqID_18711
VPRRLQQLAAKHKVVLCIRQKYIRYKPFMAEVKDYACHRAGVPTSSAASAASSSAINSEGKKARVLKREPYQSKRCGCGFRIRAIVPIANYNEKDKTFVYLEEGTAVFKLYAVHSGHEPGPLDGNARIVHRLVGHKGALEFDPDIYGVSEEGDPTFSSKGDEDVDIDDSHQAVLQQVRDLRSEVQLLEGKVAKMHPELLGSLSTELSEVLHRIRKFTLEGNLYQPEETLMVGNEEVGGWGXGDAPRHLDQHDGAFCKDDEMLDDDDTDFGSS

SEQ ID NO: 84686 - protein, 120 aa, Setaria italica
  misc_feature (69)..(69): Xaa can be any naturally occurring amino acid
  Transcript Sequence Number=SeqID_18712
  Gene Ontology: Mol. function=peptidase activity; Cellular component =plasma membrane
  Homolog annotation: Hit_ID=B9RZ23; Match level="QueryCoverage=80%, HitCoverage=24%, E-value=7e-37, Identity=77%"; Hit description =Protein bem46, putative
NIMSYDYSGYGASTGKPSEYNTYYDIEAVYECLKKEYGIEEEDLILYGQSVGSGPTLHLASRLEKLRGXVVLHSGILSGIRVLYPVKVTLWFDIFKASLDHNLIISLLFQNSAYFIILIC

SEQ ID NO: 84687 - protein, 189 aa, Setaria italica
  Transcript Sequence Number=SeqID_18713
  Gene Ontology: Mol. function=peptidase activity; Cellular component =plasma membrane
  Homolog annotation: Hit_ID=B9TA47; Match level="QueryCoverage=90%, HitCoverage=47%, E-value=2e-69, Identity=66%"; Hit description =Protein bem46, putative
MSASTGKPSEYNTYYDIEAVYECLKKEYGIEEEDLILYGQSVGSGPTLHLASRLEKLRGVVLHSGILSGIRVLYPVKVTLWFDIFKNIDKIKQVDCPVLVIHGTADDIVDFTHGKRLWELAKEKYEPLWIKGGGHCNLETYPEYIRHLRKFINAMEKLAKDKAPKAPQMLPSSSMTEVKHNKCLRFGKR

SEQ ID NO: 84688 - protein, 70 aa, Setaria italica
  Transcript Sequence Number=SeqID_18714
MWLVTDLLRRRRTVSFEDSCNEEEEERKAAMGRVRGLEQCVDAAESGCEEVYRALVNARVSLLNLLTPTF

SEQ ID NO: 84689 - protein, 226 aa, Setaria italica
  Transcript Sequence Number=SeqID_18715
  Gene Ontology: Mol. function=protein serine/threonine phosphatase activity; Cellular component=protein serine/threonine phosphatase complex; Biological process=protein amino acid dephosphorylation
  Homolog annotation: Hit_ID=B6TE17; Match level="QueryCoverage=100%, HitCoverage=64%, E-value=1e-111, Identity=86%"; Hit description=DNA -binding protein phosphatase 2C
  Pfam annotation: Domain name=PP2C; Domain location=1-184; Score =137.4; E_value=4.4e-38; Accession=PF00481.13; Description=Protein phosphatase 2C
  Subcellular localization annotation: CTP_CleavageSite=42; ConfidenceScore=5.02e-01
KVVKRSFVETDSKFAETFSHHKGLSSGTTALTAMIFGRSLLVANAGDCRAVLSRCGTAIEMSKDHRPCCINERKRVESLGGYVDDGYLNGQLAVTRALGDWHLEGMKEMGEPGGPLSAEPELKMITLTKDDEFLIIGSDGIWDFFSNQNAVDFARRKLQDHNDLRLCCREIVDEAIRRGARDNLTAVMVSFHQEAPPQTRVNRTGRVARSISAEGLHNLRVLLEGQ

SEQ ID NO: 84690 - protein, 63 aa, Setaria italica
  Transcript Sequence Number=SeqID_18716
  Gene Ontology: Mol. function=catalytic activity; Biological process =metabolic process
SSHTFEAVDFVFIVSQVTFDKFQADEQGWVDTIKSVKIGGIVRMSTMDWLGQSQYATQTVYWP

SEQ ID NO: 84691 - protein, 268 aa, Setaria italica
  misc_feature (58)..(58): Xaa can be any naturally occurring amino acid
  misc_feature (86)..(86): Xaa can be any naturally occurring amino acid
  Transcript Sequence Number=SeqID_18717
  Gene Ontology: Mol. function=catalytic activity; Cellular component =integral to membrane; Biological process=metabolic process
  Homolog annotation: Hit_ID=UPI000186DDD2; Match level="QueryCoverage =76%, HitCoverage=42%, E-value=4e-23, Identity=34%"; Hit description =protein K4, putative
  Pfam annotation: Domain name=PLDc; Domain location=197-223; Score =17.8; E_value=0.044; Accession=PF00614.14; Description=Phospholipase D. Active site motif
MVHSWSFDEVMTGFPFWLMVGLKSTFGITPDVTTMGKVIGGPGYKKSTQEHYLSYLSXAPPEVTFDKFQADEQGWVDTIKSVKIGXIVRMSTMDWLGQSQYATQTVYWPSLSSAISEVVFSKNATVRLLVAYWTHFIPNTEKYLKSLLYSNILCASSTYNHCGGKVEIKYYTVPGYNETGPALSQDGAATGNRYPGFTRVNHGKYAVSDERANIGTSNLIWDYFYTTAGVSFGTYNPSIVSQLQDVFDADWYSPYTVPVEPLEASASV

SEQ ID NO: 84692 - protein, 88 aa, Setaria italica
  Transcript Sequence Number=SeqID_18718
  Subcellular localization annotation: CTP_CleavageSite=50; ConfidenceScore=5.07e-01
NAPEPRLTTDACSSLEPRLSPAAKLHAPPPGSTASGSAPLPRTGGETCLTGAAVRPSAPEPLGVGWRRYGSRGRRMGAEQVAGERRAN

SEQ ID NO: 84693 - protein, 84 aa, Setaria italica
  Transcript Sequence Number=SeqID_18719
FYYNLVYGVWIIFIWMLFILLRLHEINRLYIISVYPSFYFSALCTSKCIKFLPVCYPIFFYFNLCDPCCILDLYIHLGNCSADL

SEQ ID NO: 84694 - protein, 118 aa, Setaria italica
  misc_feature (8)..(8): Xaa can be any naturally occurring amino acid
  misc_feature (109)..(109): Xaa can be any naturally occurring amino acid
  Transcript Sequence Number=SeqID_18720
  Homolog annotation: Hit_ID=B6SVA6; Match level="QueryCoverage=98%, HitCoverage=18%, E-value=1e-34, Identity=66%"; Hit description=Leaf protein
SDHSDDRXNMQISESNKLQSFEESNGHAMNGRTRSSFLQMTNALGSGGIDAAKIPKAREFPSKRLKAVKSTFLLQRSYQFQLRHSVFCRKQLQKNGGLYSQSVSSFKMXFSSRDCIFF

SEQ ID NO: 84695 - protein, 85 aa, Setaria italica
  Transcript Sequence Number=SeqID_18721
  Gene Ontology: Mol. function=DNA binding; Biological process =regulation of transcription
  Homolog annotation: Hit_ID=Q5NKS7; Match level="QueryCoverage=100%, HitCoverage=19%, E-value=2e-21, Identity=69%"; Hit description =Putative NAM (No apical meristem) protein
DYGGAADASGIADWDALDRLAAYELNGLSDASKTMVSFFDEPGSAAAAAFSSSVHATTVGVGDGDLWSLARSVSSLHADLTMDNV

SEQ ID NO: 84696 - protein, 207 aa, Setaria italica
  misc_feature (86)..(86): Xaa can be any naturally occurring amino acid
  Transcript Sequence Number=SeqID_18722
  Homolog annotation: Hit_ID=Q5W7C9; Match level="QueryCoverage=100%, HitCoverage=78%, E-value=1e-113, Identity=98%"; Hit description =Unknow protein
LVFFPISMHFTAPPEIPYAPTVLQLGSFHRLSRVEPWDLTADLKSHLQTLYAQSFRITLASSVLPRLLAQNTVIVSSPRKEVDDPXAFHLHAALLRQAFAHCGKFPTAASRRSLGRVSVPVWLIILSDQLLIIALVLTRYSPVRHWKHHFPFDLHVLSMPPAFILSQDRTLHEIHSCITYSFLIRRQSGFGIVFPSKDNLYPCASDY

SEQ ID NO: 84697 - protein, 92 aa, Setaria italica
  Transcript Sequence Number=SeqID_18723
WKSSSSFFTYVYSTAFILSDAQLLNSCDDCGPVDFVAGPIPCLSNPERFTYLMHAGLSMLLLPQGCKTISNSVIPIPRRSYGDRSTFKQRAE

SEQ ID NO: 84698 - protein, 96 aa, Setaria italica
  Transcript Sequence Number=SeqID_18724
  Gene Ontology: Mol. function=transporter activity; Cellular component= membrane; Biological process=oligopeptide transport
  Homolog annotation: Hit_ID=Q7XUE5; Match level="QueryCoverage=100%, HitCoverage=16%, E-value=3e-16, Identity=42%"; Hit description =OSJNBa0076N16.17 protein
HFPSLHPPPCDITNHPEDCTAVSGRNLSLLTLGLYVIPLGEGAVRVCAAALGGDQFDGGDPEELRGKMSFFNWYAFCISLGGFVGLVFVVWVQNNE

SEQ ID NO: 84699 - protein, 136 aa, Setaria italica
  Transcript Sequence Number=SeqID_18725
  Gene Ontology: Mol. function=protein serine/threonine kinase activity; Biological process=protein amino acid phosphorylation
  Homolog annotation: Hit_ID=B6UIQ8; Match level="QueryCoverage=100%, HitCoverage=19%, E-value=1e-59, Identity=80%"; Hit description =Receptor-like protein kinase RK20-1
RGQYSTKSDVFSFGILVMEIITGQRNTGHYFHEQNEDIISIVWRHWSEGTIAEMIDDSLGRNYSETEVLKCVNIGLLCVQQNPVDRPTMSDVMVMLNGDATSSLPPAARPTFFLDPSSGTSGYSNASCTVSYPSAR

SEQ ID NO: 84700 - protein, 223 aa, Setaria italica
  Transcript Sequence Number=SeqID_18726
  Gene Ontology: Cellular component=nucleolar preribosome, small subunit precursor
  Homolog annotation: Hit_ID=B6U1R2; Match level="QueryCoverage=68%, HitCoverage=27%, E-value=1e-48, Identity=65%"; Hit description =Nucleolar protein,Nop52 containing protein
KKEEEAKLVKLERKVKKEKKEKKEKKKKKAVVVEDGHVSDQSIDVPAEDQQMGDGTDGITIDGTFLSNLQKQFEKAAAEAGMVNSGGSSSASQATPVNGKVAKKRKRSKSVDRLSEASDADDGGEGNLLTQDGEKSGKKVRFSMKNNLVWKPHNPLPPQCLRLPPSATPRGSALKKGVQPGPIKETPTPSRKAKLKAKSAKKVLKKKPSSAVKRLRKLQSFSA

SEQ ID NO: 84701 - protein, 492 aa, Setaria italica
  misc_feature (422)..(422): Xaa can be any naturally occurring amino acid
  misc_feature (482)..(482): Xaa can be any naturally occurring amino acid
  Transcript Sequence Number=SeqID_18727
  Gene Ontology: Mol. function=protein binding; Cellular component =nucleolar preribosome, small subunit precursor; Biological process =rRNA processing
  Homolog annotation: Hit_ID=B6U1R2; Match level="QueryCoverage=99%, HitCoverage=91%, E-value=1e-122, Identity=63%"; Hit description =Nucleolar protein,Nop52 containing protein
  Pfam annotation: Domain name=Nop52; Domain location=2-180; Score =266.8; E_value=5.2e-77; Accession=PF05997.4; Description=Nucleolar protein,Nop52
  Subcellular localization annotation: CTP_CleavageSite=35; ConfidenceScore=5.10e-01
PRLSASDLLKLWKGLFFCFWHADKPLYQSSVATRLASAVSAAPSPVDGAAFLAAYLTTLRREWAHIDVHRLDKFYLLNRRFLHHAFLLLNSNSFAPDVTSQIVSVLSDKALLPEADNVAAGTSRGLGYHVAEAFLDELLPVLPVSLQTMDALLAPFFTVLEKSSDRVMVSKVKAGVFDRFLESGNQLLEKVKKGEEVEKGSAEEKLGKAGLLFGFSKRFLDIGAKAETVQSNRKVVFGLRDAFVKVEKGLELSGVEISEPKFEATEVPVVPNADCGMDLCEEKAGKKKKKAKKAALAEGEKEEAKLVKLERKVKKEKKEKKEKKKKKAVVVEDGHVSDQSIDVPAEDQQMGDGTDGITIDGTFLSNLQKQFEKAAAEAGMVNSGGSSSASQATPVNGKVAKKRKRSKSVDRLSEASDADDGXKCLRLPPSATPRGSALKKGVQPGPIKETPTPSRKAKLKAKSAKKVLKKKPSSAVKRLRKXRASQHELFDV

SEQ ID NO: 84702 - protein, 59 aa, Setaria italica
  Transcript Sequence Number=SeqID_18728
  Subcellular localization annotation: CTP_CleavageSite=51; ConfidenceScore=5.73e-01
GSGRRRSRSRSRSRSRSRSRSPRYRRSPSYSRRSYSPRYRSPRRRSPSPARGRSYSRSP

SEQ ID NO: 84703 - protein, 169 aa, Setaria italica
  Transcript Sequence Number=SeqID_18729
  Gene Ontology: Mol. function=nucleic acid binding; Cellular component= nucleolus
  Homolog annotation: Hit_ID=B6SJI7; Match level="QueryCoverage=62%, HitCoverage=64%, E-value=1e-27, Identity=61%"; Hit description =Splicing factor, arginine/serine-rich 7
  Pfam annotation: Domain name=RRM_1; Domain location=4-69; Score=53.5; E_value=8.4e-13; Accession=PF00076.14; Description=RNA recognition motif. (a.k.a. RRM, RBD, o
  Pfam annotation: Domain name=zf-CCHC; Domain location=86-103; Score =33.0; E_value=1.2e-06; Accession=PF00098.15; Description=Zinc knuckle
  Pfam module annotation: Pfam domain module=RRM_1::zf-CCHC; Domain location=4-69::86-103
MARVYVGNLDARVTSGELEDEFRVFGVLRSVWVARKPPGFAFIDFDDRRDAEDAIRDLDGKNGWRVELSRNSSGRGGRDRYGGSESKCYECGETGHFARECRLRVGSGGLGSGRRRSRSRSRSRSRSRSRSPRYRRSPSYSRRSYSPRYRSPRRRSPSPARGRSYSRSP

SEQ ID NO: 84704 - protein, 150 aa, Setaria italica
  misc_feature (53)..(53): Xaa can be any naturally occurring amino acid
  misc_feature (141)..(141): Xaa can be any naturally occurring amino acid
  Transcript Sequence Number=SeqID_18730
  Gene Ontology: Mol. function=transposase activity; Cellular component= membrane; Biological process=transposition, DNA-mediated
  Homolog annotation: Hit_ID=Q10N80; Match level="QueryCoverage=96%, HitCoverage=54%, E-value=1e-54, Identity=62%"; Hit description =Transposon protein, putative, CACTA, En/Spm sub-class
AVHNIRPQDPEFKTVHKRLLNPRFAPYFNNCIGAIDGTHVPVVVPSEKVMQYXTGSVHDMRVFSDAIEKYGDKFPHPPTGKFYLVDSGYPNRPGYLSPYKGTKYHLPEFRNGPMPRGMQETFNYAHSSLRNVIERSFGVLXKMKWRILMG

SEQ ID NO: 84705 - protein, 72 aa, Setaria italica
  Transcript Sequence Number=SeqID_18731
EFLWSASTTRLPNWKLVVKKENTKVRKHSYIKVQQQHSYRKHSYIKVQQQLRRAISIEVWILTTCNHISQII

SEQ ID NO: 84706 - protein, 110 aa, Setaria italica
  Transcript Sequence Number=SeqID_18732
  Gene Ontology: Mol. function=transposase activity; Biological process= transposition, DNA-mediated
  Homolog annotation: Hit_ID=Q7FA01; Match level="QueryCoverage=96%, HitCoverage=14%, E-value=3e-21, Identity=47%"; Hit description =OSJNBa0079C19.15 protein
ITYDKAYWSEPNTLLFCNLVVEQIREGNCHKATMSARGYKLVQEKYYAATGLRHKRRQFRNRIHGLKTLYTFWRGLQKESGLGKASNGTVTATDTWWENNTKVSHSFKCY

SEQ ID NO: 84707 - protein, 298 aa, Setaria italica
  Transcript Sequence Number=SeqID_18733
  Gene Ontology: Mol. function=transposase activity; Cellular component= membrane; Biological process=transposition, DNA-mediated
  Homolog annotation: Hit_ID=Q7XVX6; Match level="QueryCoverage=54%, HitCoverage=19%, E-value=2e-44, Identity=54%"; Hit description =OSJNBa0004L19.8 protein
  Subcellular localization annotation: CTP_CleavageSite=47; ConfidenceScore=5.34e-01
TRTKGRGAGGSRGCGAARSRGGGANRVGGTGGSRGRGRATRNLFIGSASAGGAAGGGGRGGGRVGGRRRRGGSDHEDYVYADEGYAPEVADGVEVIFPGSSKDASSSTELSSDDEDNHIMEESSSEDETMELILHCRKRNREFVQMMLTLGMYYESYIHKAPRRVASVTGIEWVTETLSNPTSCYNMFRMSCPLFNQLHDLLVDSYGLRATRDMSTVEALGMFLWILGAPQSLRQVEDRFVRSLETISRTFDKVLGTVLKLAVHNIRPQDPEFKTVHKRLLNPRFAPYFNNCIFLWHH

SEQ ID NO: 84708 - protein, 393 aa, Setaria italica
  Transcript Sequence Number=SeqID_18734
  Gene Ontology: Mol. function=hydrolase activity, acting on carbon -nitrogen (but not peptide) bonds, in linear amidines; Biological process=metabolic process
  Homolog annotation: Hit_ID=Q2QMN7; Match level="QueryCoverage=95%, HitCoverage=77%, E-value=0.0, Identity=87%"; Hit description=Amidase, hydantoinase/carbamoylase family protein, expressed
  Pfam annotation: Domain name=M20_dimer; Domain location=189-296; Score=16.0; E_value=0.0082; Accession=PF07687.6; Description =Peptidase dimerisation domain
  Pfam annotation: Domain name=Peptidase_M20; Domain location=53-389; Score=141.8; E_value=2.1e-39; Accession=PF01546.20; Description =Peptidase family M20M25M40
  Pfam annotation: Domain name=Peptidase_M28; Domain location=50-205; Score=-54.3; E_value=0.02; Accession=PF04389.9; Description =Peptidase family M28
  Pfam module annotation: Pfam domain module=M20_dimer::Peptidase _M20::Peptidase_M28; Domain location=189-296::53-389::50-205
LHINIHQVLLGIRFVCRYIKGIMNQLGLAVREDAVGNIFGRWEGSEAGLGAVGTGSHVDAIPFSGKYDGVVGVLGALEAISLLKRSGFQPKRSLEVIMFTSEEPTRFGISCLGSRLMAGIEELAQSLRMVVDNQNVSFLDAAESAGYKMGPEDLHSVFLKKDSYSAFIELHIEQGPILEKEGIPIGIVTAIAAPASITVEFEGNGGHAGAVLMPARNDAGLAAAELALAIEKHVLESGSIDTVGTTGILQLHPGAINSIPSKSHLEIDVRDIDEKRRNDVIEKIRRSATEISKNRGVMLSEFKIINQDPPALSDKSVIDAMEFAVKQLNLEYKKMISRAYHDSLFMARVSPMGMIFIPCYKGYSHKPEEYASQEDMANGVKVLALTMAKLSLE

SEQ ID NO: 84709 - protein, 399 aa, Setaria italica
  misc_feature (227)..(227): Xaa can be any naturally occurring amino acid
  Transcript Sequence Number=SeqID_18735
  Gene Ontology: Mol. function=transposase activity; Cellular component= membrane; Biological process=transposition, DNA-mediated
  Homolog annotation: Hit_ID=Q2QZK7; Match level="QueryCoverage=96%, HitCoverage=41%, E-value=1e-128, Identity=58%"; Hit description =Transposon protein, putative, CACTA, En/Spm sub-class
  Pfam annotation: Domain name=Transposase_11; Domain location=168-338; Score=10.4; E_value=0.0089; Accession=PF01609.13; Description =Transposase DDE domain
MVTCGQDPYLILHCRKRNREFVQMMLTLGMYYESYIHKAPRRVASVTGIEWVTETLSNPTSCYNMFRMSCPLFNQLHDLLVDSYGLRATRDMSTVEALGMFLWILGAPQSLRQVEDRFVRSLETISRTFDKVLGTVLKLAVHNIRPQDPEFKTVHKRLLNPRFAPYFNNCIGAIDGTHVPVVVPSEKVMQYTNRHGYTSQNVLAICDFDMRFTFVVSGWPGSVHDMXEVFSDAIEKYGDKFPHPPTGKFYLVDSGYPNRPGYLSPYKGTKYHLPEFRNGPMPRGMQETFNYAHSSLRNVIERSFGVLKMKWRILMGIPSFPMHKQSKIIVACMAIHNFIRENSVADREFDLYDCDENGVPMPGTSNRGGGETSTQVEEEDSNMNAFRDEIAHALYNRSR

SEQ ID NO: 84710 - protein, 501 aa, Setaria italica
  misc_feature (108)..(108): Xaa can be any naturally occurring amino acid
  Transcript Sequence Number=SeqID_18736
  Gene Ontology: Mol. function=transposase activity; Biological process= transposition, DNA-mediated
  Homolog annotation: Hit_ID=Q7XVX6; Match level="QueryCoverage=54%, HitCoverage=33%, E-value=2e-49, Identity=37%"; Hit description =OSJNBa0004L19.8 protein
MDGNGDDHFSQPDPAFPSGAFDLYSQADSYQGPRSGMQALDLNSQVDEFPAFSSYADILRSDHGGVARGGGARTPGLRVAHNGGGDSRGGGATRGGGASADKGRGGRXSRGCGAARSRGGGANRVGGTGGSRGRGRATRNLFIGSASAGGAAGGGGRGGGRVGGRRRRGGSDHEDYVYADEGYAPEVADGVEVIFPGSSKITYDKAYWSEPNTLLFCNLVVEQIREGNCHKATMSARGYKLVQEKYYAATGLRHKRRQFRNRIHGLKTLYTFWRGLQKESGLGKASNGTVTATDTWWENNTKGPKSECKKFRYGVPEYMDHLEEIFHEVVVDGSTSFIPGEEDEEPEEEDEEPEEEDEELPGEQGFPADYDDSPGSTNSRKRLSSNSTRSTASSPGKKSKSPMVQVMDKMLNKWAESDSRHQKILKKKVDVKASKEMQERAELKKCQQLAIECGAAADSVEYYACLSIFKDGLHREFFCNIPSPEARLVFLKRWCEEHNMY

SEQ ID NO: 84711 - protein, 83 aa, Setaria italica
  Transcript Sequence Number=SeqID_18737
  Gene Ontology: Mol. function=electron carrier activity; Cellular component=chloroplast envelope; Biological process=oxidation reduction
  Homolog annotation: Hit_ID=B6TAN0; Match level="QueryCoverage=100%, HitCoverage=17%, E-value=3e-26, Identity=72%"; Hit description =Monodehydroascorbate reductase, cytoplasmic isoform 2
MSRAFTYVILGGGVAAGYAALEFVRRRGDAALGELCIISEEAVAPYERPALSKGYLLPEGGARLPAFHTCVGANDQLLTAEWY

SEQ ID NO: 84712 - protein, 156 aa, Setaria italica
  Transcript Sequence Number=SeqID_18738
SEPAIDAGPDVVYLPREREGRGKLVGEGQSRIIEEEEEEDAGLGAGVHLVGALHPAVAGAHLPDARQVAPLRPGQLPDQRRLHHRPHHPLLRPGRHLPHRHRRPDPARQLATQACKLRYPSLMIIRHRSIHQMIDRARCIVVVPPMIRAVYMYVWA

SEQ ID NO: 84713 - protein, 182 aa, Setaria italica
  Transcript Sequence Number=SeqID_18739
  Gene Ontology: Mol. function=electron carrier activity
  Homolog annotation: Hit_ID=Q2PMD5; Match level="QueryCoverage=93%, HitCoverage=30%, E-value=2e-22, Identity=33%"; Hit description=FAD -linked oxidoreductase 1
VARDSGGSLGFPAGICPTVCVGGHVSGGGFGPMMRKHGLAADNVVDAEVVDAEGRLLDRAAMGEGLFWALRGGGGGSFGVVVSWTVRLVPVPPVVSTFNVRRLLRRGDRRQAESTVRLLTKWQRVAHALPDDLFVKAAIEPKLDAPGERRPLVTFKSLFLGNCSSMVAEMSTHLPELGVTPS

SEQ ID NO: 84714 - protein, 103 aa, Setaria italica
  Transcript Sequence Number=SeqID_18740
RTTGKSQHNEGASLQTMPQWSSSLILVPSEQRRMSELMGHRVWLCYKMNLESLHCIPSQVHLPRTLPSPKHAQTRTPEFHRLTTPVQRYSFGSLLASSSSSLL

SEQ ID NO: 84715 - protein, 82 aa, Setaria italica
  Transcript Sequence Number=SeqID_18741
  Gene Ontology: Cellular component=plastid inner membrane
  Homolog annotation: Hit_ID=Q8S0J7; Match level="QueryCoverage=95%, HitCoverage=24%, E-value=3e-35, Identity=93%"; Hit description =Probable membrane-associated 30 kDa protein, chloroplastic
SVLLVMAMESQAEALGQLATDDLEGKFALLETSSVDDDLAQMKRELSGSSSKGELPPGRTAVSNSGAARPFPDLEIESELNE

SEQ ID NO: 84716 - protein, 313 aa, Setaria italica
  Transcript Sequence Number=SeqID_18742
  Gene Ontology: Cellular component=plastid inner membrane
  Homolog annotation: Hit_ID=B6T6V3; Match level="QueryCoverage=100%, HitCoverage=100%, E-value=1e-165, Identity=92%"; Hit description =Membrane-associated 30 kDa protein
  Pfam annotation: Domain name=PspA_IM30; Domain location=55-271; Score= 208.8; E_value=1.4e-59; Accession=PF04012.4; Description=PspAIM30 family
  Subcellular localization annotation: CTP_CleavageSite=43; ConfidenceScore=5.78e-01
MEIRAPPTSLRLAPPPASASFRRTGLKTSFLNGRVSLRVVHIRQSNVSRFKCNANLFDRLSRVVKSYANAVLSTFEDPEKILDQAVLEMNDDLTKMRQATAQVLASQKRLENKYKAAEQASNDWYRRAQLALQKGDEDLAREALKRRKSYADNASSLRAQLDQQKGVVENLISNTKLLESKIAEAKQKKDTLKARAQSAKTATKVSEMLGNVNTSSALSAFEKMEEKVMAMESQAEALGQLATDDLEGKFALLETSSVDDDLAQMKRELSGSSSKGELPPGRTAVSNSGAARPFPDLEIESELNELRRKAKEY

SEQ ID NO: 84717 - protein, 115 aa, Setaria italica
  Transcript Sequence Number=SeqID_18743
  Gene Ontology: Mol. function=actin binding; Cellular component =integral to membrane; Biological process=actin cytoskeleton organization and biogenesis
  Homolog annotation: Hit_ID=Q6ZKB2; Match level="QueryCoverage=100%, HitCoverage=13%, E-value=9e-40, Identity=68%"; Hit description =Formin-like protein 9
KDSISNLSQGLAQLRRLEGTDPTCNDRNQNFLHCMRSFQTHAENTMQELKVAEAEVLQQVRELTEYYHGDIGKNESNLLHIFIIMRDFLGLLDRVCREMRGSKHIQYLNIVLPLR

SEQ ID NO: 84718 - protein, 116 aa, Setaria italica
  Transcript Sequence Number=SeqID_18744
  Gene Ontology: Mol. function=amino acid binding; Biological process =metabolic process
  Homolog annotation: Hit_ID=B6SYQ4; Match level="QueryCoverage=47%, HitCoverage=11%, E-value=3e-23, Identity=94%"; Hit description=ACR5
GDRDDGEGGEASDDDEGGAASRGGSGRPVVEVVDCAERGYTLVNVRCRDRPKLLFDTVCTLTDMQYVVFHGTVIAEGSEAYQVLCLCLCLCTWHLSRRLHHETVCIASCWYLAPAE

SEQ ID NO: 84719 - protein, 96 aa, Setaria italica
  Transcript Sequence Number=SeqID_18745
EIVGGASTDDLVGGRGLAEERAVEVKWNRGRRVRGARSFDTPAQVKNAPSPIFGGWRRRTRLASRKNVKSQVRNYRNQSTAAEQRPFAALERAASK

SEQ ID NO: 84720 - protein, 190 aa, Setaria italica
  Transcript Sequence Number=SeqID_18746
  Gene Ontology: Biological process=multicellular organismal development
  Homolog annotation: Hit_ID=Q9VKV8; Match level="QueryCoverage=99%, HitCoverage=94%, E-value=9e-92, Identity=80%"; Hit description =UPF0468 protein CG5343
  Pfam annotation: Domain name=DUF667; Domain location=1-190; Score =481.7; E_value=1e-141; Accession=PF05018.5; Description=Protein of unknown function (DUF667)
MFKNTFQSGFLSILYSLGTKPLQIWDKEVVDGHIKRPQDEDIQSNVLEIIGTNVQSTYITCPADPSATLGIKLPFLAIIVKNLKKYFTFEIQVLDDKNVRRRFRASNFQSVTRVKPYICTMPLKLDDGWNNIQLNLADLTKRAYGTNYVETLRVQVHANCRLRRIYFSDRLYSEEELPPEFKLYLPIQKS

SEQ ID NO: 84721 - protein, 180 aa, Setaria italica
  Transcript Sequence Number=SeqID_18747
  Gene Ontology: Mol. function=oxidoreductase activity, acting on single donors with incorporation of molecular oxygen, incorporation of two atoms of oxygen; Cellular component=chloroplast; Biological process=fatty acid biosynthetic process
  Homolog annotation: Hit_ID=A1XCI3; Match level="QueryCoverage=95%, HitCoverage=18%, E-value=7e-78, Identity=81%"; Hit description =Lipoxygenase
  Pfam annotation: Domain name=Lipoxygenase; Domain location=1-179; Score=-266.7; E_value=1e-06; Accession=PF00305.11; Description =Lipoxygenase
KLLKPHMRYTLKINALARQILIAGDGVIESGFTPGRYCMEMSAFAYRELWRLDQEGLPADLIRRGMAVEDPTKPHGLRLLIEDYPYATDGLLLWSAIERWCDAYVATYYPSDESVRGDAELQAWYDEAVRVGHADKRDAPWWPRLSTPADLASLLTTLLWLTSAQHAALNFRAVTRLGSV

SEQ ID NO: 84722 - protein, 334 aa, Setaria italica
  misc_feature (323)..(323): Xaa can be any naturally occurring amino acid
  Transcript Sequence Number=SeqID_18748
  Gene Ontology: Mol. function=oxidoreductase activity, acting on single donors with incorporation of molecular oxygen, incorporation of two atoms of oxygen; Cellular component=chloroplast; Biological process=fatty acid biosynthetic process
  Homolog annotation: Hit_ID=A1XCI4; Match level="QueryCoverage=100%, HitCoverage=36%, E-value=1e-171, Identity=86%"; Hit description =Lipoxygenase
  Pfam annotation: Domain name=Lipoxygenase; Domain location=1-334; Score=208.6; E_value=1.6e-59; Accession=PF00305.11; Description =Lipoxygenase
IAIELSLPPSQPGEPRLSKVLTPPSDATTNWLWMLAKAHVSSNDAGVHQLVNHWLRTHAMMEPFILAAHRRMSAMHPIFKLLHPHMRYTLEINALARQSLISADGVIESCFTPGPVSGEISAAYYRNHWRFDLEGLPSDLVRRGVAVEDASQPHGIRLLIEDYPYANDGLLLWSAIRNWVESYVQLYYPDAGTVQNDDELQGWYHETVHVGHADIRDAPWWPSLSTPSDLASILTTLIWLASAQHAALNFGQYPLGGYVPNRPPLMRRLVPAEGDPEHAHLVADPHRFFLSALPSLTQTTTFMTVIDTLSTHSADEQYLGEPXDEAWTADPAAL

SEQ ID NO: 84723 - protein, 405 aa, Setaria italica
  Transcript Sequence Number=SeqID_18749
  Gene Ontology: Mol. function=zinc ion binding; Cellular component =intracellular; Biological process=embryonic development ending in birth or egg hatching
  Homolog annotation: Hit_ID=B9SPP4; Match level="QueryCoverage=100%, HitCoverage=100%, E-value=1e-126, Identity=57%"; Hit description =Transcription factor, putative
  Pfam annotation: Domain name=zf-C2H2; Domain location=228-255; Score =7.9; E_value=1.7; Accession=PF00096.18; Description=Zinc finger, C2H2 type
  Pfam annotation: Domain name=zf-C2H2; Domain location=4-28; Score =6.3; E_value=2.5; Accession=PF00096.18; Description=Zinc finger, C2H2 type
  Pfam annotation: Domain name=zf-C2H2; Domain location=67-91; Score =15.4; E_value=0.25; Accession=PF00096.18; Description=Zinc finger, C2H2 type
  Pfam module annotation: Pfam domain module=zf-C2H2::zf-C2H2::zf-C2H2; Domain location=228-255::4-28::67-91
MPTVTCNACNAGFDDEEQQRLHYRSEWHRYNLKRKVAGVPGVTEALFLARQAALAEGSKPASTPMLYSCALCGKEYRSSKAHEQHLNSRSHLMRASQEPNASIAGITIVKPLPERVPRRAPSAVEDEDEDEDEEEEWVEVDPNEMELADDSTSSMQIDERSSKSYDDMDDLEELDISLCFMCDLKHDTIEDCMVHMHKKHGFFIPDSEYLKDPSGLLTYVGLKVKRDFICLYCNDRCQPFISLEAVRKHMDAKGHCKLRYGDGGDDEDADLEDFYDYSSSYVDVEGKQLIAADDANSNFELGSGGSELVITNKSEKGTRVTTLGSREFIRYYRQKPRPSVATDRALALSLASSYKSMGLVTVQSKEQMVRLKVLRAMNKSGVETMRTKIGMKSNVIRNLPKNCPY

SEQ ID NO: 84724 - protein, 52 aa, Setaria italica
  misc_feature (10)..(10): Xaa can be any naturally occurring amino acid
  Transcript Sequence Number=SeqID_18750
  Subcellular localization annotation: CTP_CleavageSite=42; ConfidenceScore=5.38e-01
SPPSPSPHPXPPPHPRHPLSPPPHPSPPPPPPPSPRPWPAPRPAAAPAMRAR

SEQ ID NO: 84725 - protein, 88 aa, Setaria italica
  misc_feature (57)..(57): Xaa can be any naturally occurring amino acid
  Transcript Sequence Number=SeqID_18751
  Gene Ontology: Mol. function=aspartic-type endopeptidase activity; Cellular component=chromatin
  Homolog annotation: Hit_ID=Q8SA93; Match level="QueryCoverage=80%, HitCoverage=2%, E-value=3e-12, Identity=45%"; Hit description =Putative polyprotein
MPLSKNNISPMDPIFHMNQLWMADQLAKRGLAHPETCTFCDQDEETIHHLLVGCVFXSHQVWALIFQQLGLLQLMPEPSATRFPGWWR

SEQ ID NO: 84726 - protein, 242 aa, Setaria italica
  Transcript Sequence Number=SeqID_18752
  Gene Ontology: Mol. function=ATP binding; Cellular component =chloroplast; Biological process=protein folding
  Homolog annotation: Hit_ID=B4F848; Match level="QueryCoverage=100%, HitCoverage=100%, E-value=1e-112, Identity=86%"; Hit description =Chaperonin
  Pfam annotation: Domain name=Cpn10; Domain location=148-241; Score =147.7; E_value=3.7e-41; Accession=PF00166.13; Description=Chaperonin 10 Kd subunit
  Pfam annotation: Domain name=Cpn10; Domain location=50-141; Score =141.6; E_value=2.5e-39; Accession=PF00166.13; Description=Chaperonin 10 Kd subunit
  Pfam module annotation: Pfam domain module=Cpn10::Cpn10; Domain location=148-241::50-141
  Subcellular localization annotation: CTP_CleavageSite=39; ConfidenceScore=5.74e-01
MSSVQLSGAGVAAVAFTNKSLATLRVCSSRRSARSLVVRAATVVAPKYTSLKPLGDRVLVKLGAAEEKTVGGILLPSTAQTKPQGGEVVAVGAGRTIGDKKIEVSIKTGAEVVYSKYAGTEVEFNDSKHLILKEDDIIGILETDDVKDMKPLNDRVLIKVAEAEETTPGGLILTETTKEKPSIGTVVAVGPGSLDDEGKRQPLSVPAGSTVLYSKYAGSEFKGADGTGYIVLRASDVMAVLS

SEQ ID NO: 84727 - protein, 174 aa, Setaria italica
  Transcript Sequence Number=SeqID_18753
TLPFLGRFLEGADAANRVPLPDRSRQVFVMSENLSAAQKEDLAWASYVLLRNTNTTSVLIAIGDVLCVRGYWDPPANTSKYAMIEWFKSQIQQVGLNDLRNALYFPNSSDSQLAKILPDGILSLLAQPVLRSPDLANGETKTEGVILLASNANYAYTEKDRVWIRTVANKFQSA

SEQ ID NO: 84728 - protein, 59 aa, Setaria italica
  Transcript Sequence Number=SeqID_18754
VKFVSGISSFTAESLKLQNWLFSSIEHWELYVQVAKANWHKTSRAYWHRISPRSLQCPS

SEQ ID NO: 84729 - protein, 90 aa, Setaria italica
  Transcript Sequence Number=SeqID_18755
VKFVSGISSFTAESLKLQNWLFSSIEHWELYVQVAKAIGTRLPRAYWHRISPRLFSVLHHEQEQLTSHSFANRYRSKSRLALTRAIFVFL

SEQ ID NO: 84730 - protein, 89 aa, Setaria italica
  Transcript Sequence Number=SeqID_18756
  Gene Ontology: Mol. function=aspartic-type endopeptidase activity; Cellular component=chromatin
  Homolog annotation: Hit_ID=Q8SA93; Match level="QueryCoverage=64%, HitCoverage=2%, E-value=5e-10, Identity=50%"; Hit description =Putative polyprotein
RKGLNSLIILGASTIWKHRNDCVFNGATPNITTALMLAKDEANLWSIAGAKGITLLTEWVNSLVLMVRSFLRFLRQLGVFSGLPMCVCV

SEQ ID NO: 84731 - protein, 306 aa, Setaria italica
  misc_feature (282)..(282): Xaa can be any naturally occurring amino acid
  Transcript Sequence Number=SeqID_18757
  Gene Ontology: Mol. function=protein serine/threonine kinase activity; Cellular component=plasma membrane; Biological process =protein amino acid phosphorylation
  Homolog annotation: Hit_ID=Q9LNN0; Match level="QueryCoverage=85%, HitCoverage=36%, E-value=2e-48, Identity=45%"; Hit description =F8L10.9 protein
KEFPAPALALVDVLLSVDPADRGTAFSALQSEFFTTKPYACNPSSLPRYPPSKEFDAKRREEEARRQGVAGGKQHKHDPERRTRESRAVPAPDANAELVSSLQKRQAQANTRSRSEMFNPCKEDSASGFRIEPPRPTPVTESSEDSQRAYPTRIFHSGPLVNQNHPSKGGGVKNGELQVPGVANHPVVVSTRSSLRTDDSSRTMAAQAEAFAHGRRLSESINEHFSNSGKYDQVFPKKDDRSSRVDGAIGYGSKGNKIHHSGPLTCPSGNVDEMLKENDRQXKKCSGERGWRSLERGGTMDITMAA

SEQ ID NO: 84732 - protein, 413 aa, Setaria italica
  Transcript Sequence Number=SeqID_18758
  Gene Ontology: Mol. function=protein serine/threonine kinase activity; Cellular component=plasma membrane; Biological process =protein amino acid phosphorylation
  Homolog annotation: Hit_ID=B9T5N4; Match level="QueryCoverage=92%, HitCoverage=59%, E-value=0.0, Identity=80%"; Hit description=Cell division protein kinase, putative
  Pfam annotation: Domain name=Pkinase; Domain location=66-350; Score =308.2; E_value=1.8e-89; Accession=PF00069.17; Description=Protein kinase domain
  Pfam annotation: Domain name=Pkinase_Tyr; Domain location=66-349; Score=25.1; E_value=2.1e-15; Accession=PF07714.9; Description =Protein tyrosine kinase
  Pfam module annotation: Pfam domain module=Pkinase::Pkinase_Tyr; Domain location=66-350::66-349
ARTGSGREEALERRRAMMAMAAACQVRSPVPRAVEGEQVAAGWPPWLVAVAPEAVRGWVPRRAESFEKLDKIGQGTYSNVYRARDLEKEKIVALKKVRFDNLEPESVKFMAREILILRRLDHPNVIKLEGLVTSRMSCSLYLVFEYMEHDLAGLASFPGVKFTESQVKCYMQQLLRGLEHCHSRHILHRDIKGSNLLIDNRGILKIADFGLASFFDPEQRHPLTSRVVTLWYRPPELLLGATNYGVSVDLWSAGCILAELYAGKPIMPGRTEVEQLHKIFKLCGSPSEDYWRKSKLPHATIFKPQHPYARRVSETFKEFPAPALALVDVLLSVDPADRGTAFSALQSEFFTTKPYACNPSSLPRYPPSKEFDAKRREEEARRQGVAGGKQHKHDPERRTRESRAVPAPDANAT

SEQ ID NO: 84733 - protein, 145 aa, Setaria italica
  misc_feature (22)..(22): Xaa can be any naturally occurring amino acid
  misc_feature (109)..(109): Xaa can be any naturally occurring amino acid
  misc_feature (123)..(123): Xaa can be any naturally occurring amino acid
  misc_feature (129)..(129): Xaa can be any naturally occurring amino acid
  Transcript Sequence Number=SeqID_18759
  Gene Ontology: Mol. function=oxidoreductase activity; Cellular component=integral to membrane; Biological process=oxidation reduction
  Homolog annotation: Hit_ID=P12124; Match level="QueryCoverage=99%, HitCoverage=38%, E-value=1e-54, Identity=80%"; Hit description =NAD(P)H-quinone oxidoreductase subunit 1, chloroplastic
  Pfam annotation: Domain name=NADHdh; Domain location=1-145; Score= -55.6; E_value=7.9e-09; Accession=PF00146.13; Description=NADH dehydrogenase
LAISLLSNSLSTVDIVEAQSKXGFLGWNLWRQPIGFLVFLISSLAECERLPFDLPEAEEELVAGYQTEYSGIKYGLFYLVSYLNLLVSSLFVTVLYLGGWNLSIPYISXFFGFFQMNKIMGIXLEMVNXVSFITLTKAYLFLFIF

SEQ ID NO: 84734 - protein, 121 aa, Setaria italica
  misc_feature (21)..(21): Xaa can be any naturally occurring amino acid
  Transcript Sequence Number=SeqID_18760
  Gene Ontology: Mol. function=transferase activity, transferring phosphorus-containing groups; Cellular component=membrane; Biological process=peptidyl-histidine phosphorylation
  Homolog annotation: Hit_ID=Q8GT97; Match level="QueryCoverage=90%, HitCoverage=22%, E-value=6e-37, Identity=67%"; Hit description =Ethylene receptor-like protein (Fragment)
  Pfam annotation: Domain name=HATPase_c; Domain location=1-97; Score =44.4; E_value=4.5e-10; Accession=PF02518.18; Description=Histidine kinase-, DNA gyrase B-, and HSP90-like ATPase
SLRDPYAPDFHPVLSDGSFYXLAVQVKDTGCGISPQDMPHTFTKFAHPQNATNKLRSGNGLGLALSRRFVTLMQGNIWLESEGAGKGCTATFFVKLGLSDNKPNANLRRIAPPVLLKQGAA

SEQ ID NO: 84735 - protein, 37 aa, Setaria italica
  Transcript Sequence Number=SeqID_18761
CMNHFPQRKTSSRKRRPVSEFNSLVILHVNYSCFLLL

SEQ ID NO: 84736 - protein, 114 aa, Setaria italica
  Transcript Sequence Number=SeqID_18762
TVRGPGGGFCKRRLWTGCRGEGVGERRVGRRWTDGPTRQAYVERGVTAADGGRTARLGRAGAGRRHHGRHVRRRGARRSAPGRRSRSPPTTRRALGGRGGGGEASGAVVEVREG

SEQ ID NO: 84737 - protein, 94 aa, Setaria italica
  Transcript Sequence Number=SeqID_18763
  Subcellular localization annotation: CTP_CleavageSite=70; ConfidenceScore=5.11e-01
LKLACSPSPASGSLEAGGNQSASSATNGGGGVLLDPATDQSRIGVKRRSIREIAELGSISSVGSSSSPVPMEHAKSGPSSWPELADVVPVPQDE

SEQ ID NO: 84738 - protein, 100 aa, Setaria italica
  Transcript Sequence Number=SeqID_18764
  Gene Ontology: Biological process=nitrogen fixation
  Homolog annotation: Hit_ID=Q6H658; Match level="QueryCoverage=44%, HitCoverage=18%, E-value=4e-13, Identity=84%"; Hit description =Nodulin-21-like
MDPQLSSHVHATAAAGGKNAGGGVLPPAAVVILDVEANAAAAAPADPSDGGDGGVDYMARAQWLRAAVLGANDGLVSVASLMIGVGAVNASRKAMLVSGM

SEQ ID NO: 84739 - protein, 360 aa, Setaria italica
  Transcript Sequence Number=SeqID_18765
  Gene Ontology: Mol. function=transposase activity; Biological process= transposition, DNA-mediated
  Homolog annotation: Hit_ID=Q2QPA1; Match level="QueryCoverage=97%, HitCoverage=94%, E-value=2e-32, Identity=48%"; Hit description =Transposon protein, putative, CACTA, En/Spm sub-class
MPEAEWNDERTRIVCELFVEQVQAGNRPNTHLNNIGYRNVAAKFQQRTQLLYTKLQLKNKWDKFKSDYITWKKLLVVGAGLPWDAARGTFAADDEWWKKTNKELPGARRYRNLGLQHEDKLKIMFDYITSNGVDPSLHAPESPKNGVDHSPPGASGLPSAADSPMNGVDHSPVTANGLPSAPHSPMNGMDHLPLATNGLPYAQEIPMNGMNLDGSDNNAEDNDDAHQEPVFQYTSNRRKKRPINVISTKKNKKSKAETALLMQSHLSRIAELAQKAQDTFEKFSSQADTQPWPSIQDVMTLVRECGVRSGSNEHFIATELFVSREQREMFLTMETAEERFQWLRRKYIVKYLSSTSLGPR

SEQ ID NO: 84740 - protein, 102 aa, Setaria italica
  Transcript Sequence Number=SeqID_18766
  Gene Ontology: Mol. function=aspartic-type endopeptidase activity; Cellular component=extracellular region; Biological process =proteolysis
  Homolog annotation: Hit_ID=Q766C2; Match level="QueryCoverage=79%, HitCoverage=18%, E-value=3e-16, Identity=46%"; Hit description =Aspartic proteinase nepenthesin-2
KRPLLRGAISSRRPAPRRCALGDLEYVVDLAIGTPPQRVSALLDTGSDLIWTQCAPCANCLAQPDPLFVPAESASYEPMRCGGPLCSDILHHSCMRPDTCTY

SEQ ID NO: 84741 - protein, 83 aa, Setaria italica
  Transcript Sequence Number=SeqID_18767
KKYIYVVKQHILHVRHASKKLETHMQLIFQKSSHERSKKNRNYKYMKLNSWCIHKRQLSNKQTTISSCSLINSSKQIKHVTTR

SEQ ID NO: 84742 - protein, 207 aa, Setaria italica
  Transcript Sequence Number=SeqID_18768
  Homolog annotation: Hit_ID=B9V0G6; Match level="QueryCoverage=100%, HitCoverage=52%, E-value=5e-41, Identity=38%"; Hit description =Mitochondrial transcription termination factor-like family-3
LETVVRPNIAFLQQCGLTDYDIGKHFLMRSRILLTEPQRVKEIAARVEELGVSRNSLMFKHTLLTLYGLNAGRLSAKLSFLKKVIGCSEAELGYAVRKMPAILTYSESKIGRTVEFLKVEVGLEPSYVLHRPAMFGYSIERRLMPRHCVLRILKAKGFLSKEIDFFSTICTTEEVFVEKFLLPYNKSVPGLIEAYASACRGHVATEL

SEQ ID NO: 84743 - protein, 117 aa, Setaria italica
  Transcript Sequence Number=SeqID_18769
  Gene Ontology: Mol. function=Rho guanyl-nucleotide exchange factor activity
  Homolog annotation: Hit_ID=UPI0001A7B1C5; Match level="QueryCoverage =100%, HitCoverage=18%, E-value=6e-35, Identity=62%"; Hit description= ROPGEF11 (RHO GUANYL-NUCLEOTIDE EXCHANGE FACTOR 11); Rho guanyl -nucleotide exchange factor
  Pfam annotation: Domain name=PRONE; Domain location=1-117; Score= -278.8; E_value=0.027; Accession=PF03759.5; Description=PRONE (Plant -specific Rop nucleotide
FKERKEFWYVKRDSCSESENEERSDEKWWIPIVKVPPAGLSKTSRGWLLHQKELVNQVLKAAMAINANCLMEMNIPDTYIDTLPKNGRASLGDALYRIITDVEFDPDDFLSTVDLTS

SEQ ID NO: 84744 - protein, 41 aa, Setaria italica
  Transcript Sequence Number=SeqID_18770
MCVLSGSSGSESLNRPIPGPRMPDGTRGFTMGRGRPLPLQK

SEQ ID NO: 84745 - protein, 115 aa, Setaria italica
  Transcript Sequence Number=SeqID_18771
  Gene Ontology: Mol. function=Rab GTPase activator activity; Cellular component=intracellular; Biological process=regulation of Rab GTPase activity
  Homolog annotation: Hit_ID=Q5QMF8; Match level="QueryCoverage=100%, HitCoverage=14%, E-value=3e-38, Identity=70%"; Hit description =RabGAP/TBC domain-containing protein-like
MKAKALPFIAFEHKRDAYGFAVRPQHLQRYREYANIYKEEEEERSERWKNFLHRQAEDGESSGEDVKVAPSNEDDGPAGKNADDARSDEKTLRQPRPHKIQIWSEIRPSLGHIEE

SEQ ID NO: 84746 - protein, 275 aa, Setaria italica
  Transcript Sequence Number=SeqID_18772
  Gene Ontology: Mol. function=protein serine/threonine kinase activity; Biological process=protein amino acid phosphorylation
  Homolog annotation: Hit_ID=B9S2T6; Match level="QueryCoverage=99%, HitCoverage=36%, E-value=4e-85, Identity=60%"; Hit description=ATP binding protein, putative
  Pfam annotation: Domain name=Pkinase; Domain location=2-204; Score= -46.2; E_value=9.6e-06; Accession=PF00069.17; Description=Protein kinase domain
  Pfam annotation: Domain name=Pkinase_Tyr; Domain location=1-204; Score=-99.3; E_value=4e-07; Accession=PF07714.9; Description=Protein tyrosine kinase
  Pfam module annotation: Pfam domain module=Pkinase::Pkinase_Tyr; Domain location=2-204::1-204
CVVYDHMPQGSLDKALHGNNDDKNFLIWERRNKIAIDIARALEFLHLGGVTQSVIHGDVKSSNVLLSEDFGARLCDFGLAKQVSASSPHLTCTDITGTFGYLAPEYFSYGKVNEKIDVYAFGVVLLEIISGRRPITPGSPKGQESLVGWAKPLLSSGEIKQLVDPFLGNDYDCDEMERMTLAASLCTRTSSHSRPEMSLVLKLLQGDDETIGWARLQVTASFDGSDEETATPDANMQSHLNLALLGVEEDDTLSRCSSTVDTSADGYWSRSSSFD

SEQ ID NO: 84747 - protein, 165 aa, Setaria italica
  Transcript Sequence Number=SeqID_18773
  Homolog annotation: Hit_ID=B6U179; Match level="QueryCoverage=100%, HitCoverage=34%, E-value=4e-82, Identity=84%"; Hit description =LEC14B protein
  Pfam annotation: Domain name=WD40; Domain location=129-165; Score =15.1; E_value=0.3; Accession=PF00400.24; Description=WD domain, G -beta repeat
  Pfam annotation: Domain name=WD40; Domain location=6-44; Score=27.9; E_value=4.1e-05; Accession=PF00400.24; Description=WD domain, G-beta repeat
  Pfam annotation: Domain name=WD40; Domain location=81-125; Score =23.0; E_value=0.0012; Accession=PF00400.24; Description=WD domain, G- beta repeat
  Pfam module annotation: Pfam domain module=WD40::WD40::WD40; Domain location=129-165::6-44::81-125
RCLVGGTSAGLLTGHLDGVTFIDSRGDGRYFISNCKDQRIKLWDIRKMSSAVRARPVKMVDWDYRWMPFPSEAHHFKHPDDQSLATYRGHSVWKTLIRCYFSPMHSTGQRYIYSGSSDKSVYIYDMVTGKTIERLSWHGSIIRDCTWHPYHPTLVTSSWDGYLAR

SEQ ID NO: 84748 - protein, 107 aa, Setaria italica
  Transcript Sequence Number=SeqID_18774
  Gene Ontology: Biological process=positive regulation of growth rate
  Homolog annotation: Hit_ID=B6U179; Match level="QueryCoverage=80%, HitCoverage=18%, E-value=9e-30, Identity=70%"; Hit description =LEC14B protein
  Pfam annotation: Domain name=WD40; Domain location=3-38; Score=9.2; E_ value=3.2; Accession=PF00400.24; Description=WD domain, G-beta repeat
  Pfam annotation: Domain name=WD40; Domain location=42-80; Score=26.2; E_value=0.00014; Accession=PF00400.24; Description=WD domain, G-beta repeat
  Pfam module annotation: Pfam domain module=WD40::WD40; Domain location=3-38::42-80
NIAKSIFIFLFKCCASCCSTGQRYIYSGSSDKSVYIYDMVTGKTIERLSWHGSIIRDCTWHPYHPTLVTSSWDGYLARWEASGNNDDLSMPKIMRTRWPVRLGAAAP

SEQ ID NO: 84749 - protein, 200 aa, Setaria italica
  Transcript Sequence Number=SeqID_18775
  Gene Ontology: Mol. function=fructose-bisphosphate aldolase activity; Cellular component=chloroplast; Biological process=metabolic process
  Homolog annotation: Hit_ID=Q40677; Match level="QueryCoverage=98%, HitCoverage=50%, E-value=1e-106, Identity=93%"; Hit description =Fructose-bisphosphate aldolase, chloroplastic
  Pfam annotation: Domain name=Glycolytic; Domain location=1-200; Score= 261.9; E_value=1.5e-75; Accession=PF00274.11; Description=Fructose -bisphosphate aldolase class-I
LFEETLYQSAVDGRRIVDILTEQGIVPGIKVDKGLVPLAGSNDESWCQGLDGLAAREAAYYQQGARFAKWRTVVSIPNGPSELAVKEAAWGLARYAAISQDNGLVPIVEPEILLDGEHGIERTFEVAQKVWAETFYAMAENNVMFEGILLKPSMVTPGAEAKDRATPEQVAEYTLKLLHRRIPPSVPGIMFLSGGQFGGW

SEQ ID NO: 84750 - protein, 75 aa, Setaria italica
  Transcript Sequence Number=SeqID_18776
  Subcellular localization annotation: CTP_CleavageSite=58; ConfidenceScore=5.61e-01
LYSPTSKSPSLGRRLSSAPVTTSMGLFRSRLLSNHAAALRLIRLPAACRRIELMLRRSANARRSPDSKLLLAVCR

SEQ ID NO: 84751 - protein, 147 aa, Setaria italica
  Transcript Sequence Number=SeqID_18777
  Gene Ontology: Mol. function=phosphotransferase activity, alcohol group as acceptor; Cellular component=chromosome; Biological process= mitotic cell cycle spindle assembly checkpoint
  Homolog annotation: Hit_ID=B9RB21; Match level="QueryCoverage=100%, HitCoverage=5%, E-value=4e-70, Identity=81%"; Hit description=Ataxia telangiectasia mutated, putative
  Pfam annotation: Domain name=FATC; Domain location=115-147; Score =63.5; E_value=7.7e-16; Accession=PF02260.12; Description=FATC domain
LMLKTPERVPFRLTRDIIDGMGVTGVEGVFRRCCEKTLSVMRANKEALLTIIEVFVHDPLYKWALSPLKALQRQKEIEDTDSCLDDSQEAYEGNKDAARAILRVKQKLDGYEDGEMRSVQGQVQQLIQDAVDVDRLCQMFPGWGPWL

SEQ ID NO: 84752 - protein, 204 aa, Setaria italica
  Transcript Sequence Number=SeqID_18778
  Homolog annotation: Hit_ID=B6TCS1; Match level="QueryCoverage=99%, HitCoverage=65%, E-value=8e-43, Identity=52%"; Hit description=Basic salivary proline-rich protein 2
GNYGDNNPPHQHHLAPSPIHSPPLIPRGVPGSCPWRSPMQFQDPMSGYQGAPPGAPPPWGPHSGPPARGSYPNSPRFGFRHPNPGRGGSPMNYGPRGSLNSSYGRGRGPNNYGSSGSRGRGGRCGFGWQDRSYFIKSMVDDPWLGLQPIVGNILIPKGDSESWLPKSLREKKETPAQGQIKSTSGLSLAEYLDLSFNEVSNKET

SEQ ID NO: 84753 - protein, 101 aa, Setaria italica
  Transcript Sequence Number=SeqID_18779
LGSLVELQSALCAYVSRYFSLISHLCLVSSQRQAVQNSRALDPFVSCYSLSLFLGGREKSNSDYFFLGWMLHSVCLLRGSLDSKNFPGKFLGVHLDPRKLY

SEQ ID NO: 84754 - protein, 218 aa, Setaria italica
  Transcript Sequence Number=SeqID_18780
KRIAAAASSPLKGNNQHIYQRQLLRHAWLGLEALRVLYVQIMKIDDERPYQSHIFQELPSNGNPKLDFETERQSKHKFLADKMVEQTNQSEHSFLKGEHQNGGKTGQTCIEDYSYDKDVVEIKLPDTILSSNYGGHFIKDVCIDEGVLPDKKTSTEKLVDQKVSINFDSSEDTNGDLGEEIRADSTKTALELKSHIVILPVMCATDGNTGEQISLCKE

SEQ ID NO: 84755 - protein, 493 aa, Setaria italica
  Transcript Sequence Number=SeqID_18781
RADSRSPFVSSEESKFIDTILSSNYGGHFIKDVCIDEGVLPDKKTSTEKLVDQKVSINFDSSEDTNGDLGEEIRADSTKTALELKSHIVILPVMCATDGNTGEQISLCKEHDLEGNNTAPISTDSNDEKSNPKQSLHEDAQGGQQVGSVISESNENLEPFFNGEAAHQDSFNGCHETGIGIASETSNIIHSDLPAESAAADFAVAIPDSTALDKGASNQVNHYNPFIAYGSLDETWEPNYSLPTIVDAASVAPICPVEKTDSFSDLVNRALEGFDPIEIDEAIIEENRSDSVEASTSTLDVQASEQCNDKRESPTDDVKTDVTQETGIAAVTTSLSTSNGESSDVKSENGKKCEIDNAQDINDFNPRDVEVGTKRSEDITDSKSSPLVQTESVVQQNGPDSAKVTAQTVIRNPFESSFSGPSITSGPLTPSGHIPYSGNISLRSESSTTSTRSFAFPVLQNEWNSSPVKMAKADRRRLREDRGWGYRILCCKF

SEQ ID NO: 84756 - protein, 191 aa, Setaria italica
  Transcript Sequence Number=SeqID_18782
  Homolog annotation: Hit_ID=B6T976; Match level="QueryCoverage=100%, HitCoverage=61%, E-value=2e-81, Identity=83%"; Hit description=MTN3
  Pfam annotation: Domain name=MtN3_slv; Domain location=135-191; Score= 17.2; E_value=0.00022; Accession=PF03083.8; Description=MtN3saliva family
  Pfam annotation: Domain name=MtN3_slv; Domain location=14-101; Score =100.4; E_value=6.3e-27; Accession=PF03083.8; Description=MtN3saliva family
  Pfam module annotation: Pfam domain module=MtN3_slv::MtN3_slv; Domain location=135-191::14-101
  Subcellular localization annotation: CTP_CleavageSite=65; ConfidenceScore=5.37e-01
MAGGLLHMAHPAITLSGVAGNIISFLVFLAPVTTFLQVYRKKTTGGFSSVPYVVALFSSVLWIFYALVKTNSRPLLTINAFGCGVELAYIVFYLAYAPRKARLRTLAYFFLMDVGAFGLIVVVTLFGVRKHLQVKFLGSVCLAFSMAVFVAPLSIIVKVVKTKSVEFLPISLSFCLTLSAVAWFCYGLFTK

SEQ ID NO: 84757 - protein, 216 aa, Setaria italica
  Transcript Sequence Number=SeqID_18783
  Homolog annotation: Hit_ID=B6TES8; Match level="QueryCoverage=86%, HitCoverage=64%, E-value=8e-74, Identity=80%"; Hit description=MTN3
  Pfam annotation: Domain name=MtN3_slv; Domain location=1-83; Score =61.2; E_value=3.9e-15; Accession=PF03083.8; Description=MtN3saliva family
  Pfam annotation: Domain name=MtN3_slv; Domain location=117-203; Score= 105.0; E_value=2.6e-28; Accession=PF03083.8; Description=MtN3saliva family
  Pfam module annotation: Pfam domain module=MtN3_slv::MtN3_slv; Domain location=1-83::117-203
NIFDRFDALIDVCRPTFLRVYRKKSTEGFSCVPYVVALFSCMLWIFYALVKTNSSPLLTINAFGCVVESVYILLYLLYAPRAARIRALASFLLLDVAAFSLIAVVTLELVAGPHRVKVLGSICLAFSMAVFVAPMSVIFVVIRTKSAEFMPFSLSFFLTLSAVAWFFYGLFTKDLYVTLPNVGGFFFGCVQMVLYCCYRKPITPLLQAHLPLPLPP

SEQ ID NO: 84758 - protein, 307 aa, Setaria italica
  Transcript Sequence Number=SeqID_18784
  Homolog annotation: Hit_ID=B6T976; Match level="QueryCoverage=100%, HitCoverage=99%, E-value=1e-109, Identity=69%"; Hit description=MTN3
  Pfam annotation: Domain name=7TMR-DISM_7TM; Domain location=15-218; Score=-41.8; E_value=0.09; Accession=PF07695.3; Description=7TM diverse intracellular signalling
  Pfam annotation: Domain name=MtN3_slv; Domain location=135-221; Score= 99.9; E_value=8.7e-27; Accession=PF03083.8; Description=MtN3saliva family
  Pfam annotation: Domain name=MtN3_slv; Domain location=14-101; Score =110.3; E_value=6.5e-30; Accession=PF03083.8; Description=MtN3saliva family
  Pfam module annotation: Pfam domain module=7TMR-DISM_7TM::MtN3 _slv::MtN3_slv; Domain location=15-218::135-221::14-101
  Subcellular localization annotation: CTP_CleavageSite=37; ConfidenceScore=5.21e-01
MAGGLFSMEHPWASAFGILGNIVSFLVFLAPTPTFLRVYRKKSTEGFSCVPYVVALFSCMLWIFYALVKTNSSPLLTINAFGCVVESVYILLYLLYAPRAARIRALASFLLLDVAAFSLIAVVTLELVAGPHRVKVLGSICLAFSMAVFVAPLSIIVKVVKTKSVEFLPISLSFCLTLSAVAWFCYGLFTKDPFVMYPNVGGFFFSCVQMGLYFWYSKTRPTNAVLPTTGDGGAAAPSVQVQGQVIELAPNTIAILSVSPIPIVGVHKIEVVDGQHKDAAVAAEACRMAAANPEGPPPQVIEIVPAA

SEQ ID NO: 84759 - protein, 274 aa, Setaria italica
  Transcript Sequence Number=SeqID_18785
  Homolog annotation: Hit_ID=B6T9U6; Match level="QueryCoverage=95%, HitCoverage=82%, E-value=1e-115, Identity=81%"; Hit description=MTN3
  Pfam annotation: Domain name=MtN3_slv; Domain location=13-100; Score =140.7; E_value=4.6e-39; Accession=PF03083.8; Description=MtN3saliva family
  Pfam annotation: Domain name=MtN3_slv; Domain location=134-220; Score= 137.1; E_value=5.4e-38; Accession=PF03083.8; Description=MtN3saliva family
  Pfam module annotation: Pfam domain module=MtN3_slv::MtN3_slv; Domain location=13-100::134-220
  Subcellular localization annotation: CTP_CleavageSite=23; ConfidenceScore=5.01e-01
MAFLNMEQQTWAFTFGILGNIISLMVFLSPLPTFYRVYRKKSTEGFQSTPYVVTLFSCMLWIFYALLKTGAMLLVTINGVGCVIETVYIAMYLVYAPRAARVLTAKMLLGLNVGVFGLVSLVTMVLSNGNLRVHVLGWICVSVALSVFAAPLSIMRQVIRTKSVEFMPFSLSFFLVLSAVIWFAYGALKKDVFVAFPNVLGFVFGLAQMALYMAYRNRKPAAAVVMVEEVKLPEHVKEVAAAPVAHEGRASCGAEVHPIDILPVEPPAAAVAAQ

SEQ ID NO: 84760 - protein, 126 aa, Setaria italica
  misc_feature (119)..(119): Xaa can be any naturally occurring amino acid
  Transcript Sequence Number=SeqID_18786
  Gene Ontology: Mol. function=methyltransferase activity; Biological process=metabolic process
  Homolog annotation: Hit_ID=B9S8Z0; Match level="QueryCoverage=94%, HitCoverage=38%, E-value=1e-37, Identity=60%"; Hit description=S -adenosylmethionine-dependent methyltransferase, putative
  Pfam annotation: Domain name=Methyltransf_11; Domain location=3-55; Score=25.8; E_value=0.00018; Accession=PF08241.4; Description =Methyltransferase domain
KDLQLSKRGVAEALPAENSSMDVVIGTLVLCSVNNIDMALREIYRVLKPGGLYLFVEHVAAPDGSLLRFVQGAFDPLQQFVADGCHLTRKTGENIRDVGFSSLSLDSVRLSNAYIISPXVYGVASK

SEQ ID NO: 84761 - protein, 240 aa, Setaria italica
  Transcript Sequence Number=SeqID_18787
  Gene Ontology: Mol. function=hydrolase activity; Cellular component =cellular_component; Biological process=maintenance of protein location in nucleus
  Homolog annotation: Hit_ID=Q10AR2; Match level="QueryCoverage=97%, HitCoverage=46%, E-value=1e-112, Identity=82%"; Hit description =Glycohydrolase family protein, expressed
  Pfam annotation: Domain name=PARG_cat; Domain location=1-186; Score =18.9; E_value=3.3e-14; Accession=PF05028.6; Description=Poly (ADP -ribose) glycohydrolase (PARG)
FLRGSCVQEEIRFMINPELIVGMLFMASMEDNEAIEIVGAERFSQYMGYGSSFRFVGDYLDSKPIDSMGRRRTRIVAIDALDCPTRLHYESSGLLREVNKALCGFLDQSKLQLYVKLFQDSNNKDNCPSISSDEYIGVSTGNWGCGAFGGNPEIKSMIQWIAASQALRPFVNYYTFGDASLERLGEVIQWILRHGWTVGELWHMLIEYSSQRLRGETLKGFFAWLLPNGGPKNEVDYMSE

SEQ ID NO: 84762 - protein, 264 aa, Setaria italica
  Transcript Sequence Number=SeqID_18788
  Gene Ontology: Mol. function=nucleotide binding; Cellular component =nucleus; Biological process=defense response
  Homolog annotation: Hit_ID=Q5ZAJ3; Match level="QueryCoverage=99%, HitCoverage=24%, E-value=4e-64, Identity=50%"; Hit description =Putative powdery mildew resistance protein PM3b
LSDEHLKEIVQSRAFSLQNPNMEEQDGILSGFVRRCVGSPLAAKAFGSMLSNRTSITEWKDVLAKSDICSEKTGILPILKLSFDDLSSDMKQCFAFCALFPKDYEIDVDLLIRLWMAHDFIPVQEDDNPETVGKYIFEELTRRSFFQEVRQTLQFGYFGRSSLRKSTICKIHDLMHDIALSVLGKECVTIVGKPSINKLMLNTTRHVFLSIDDASTTFWKEQVTSLLDHLLKKQTAMLHTLFITGYGQPLDISKYTSLRALHLP

SEQ ID NO: 84763 - protein, 122 aa, Setaria italica
  Transcript Sequence Number=SeqID_18789
  Homolog annotation: Hit_ID=Q9ZVM5; Match level="QueryCoverage=85%, HitCoverage=38%, E-value=3e-19, Identity=45%"; Hit description =T22H22.9 protein
MEVEEAGGQLENAGKDEAEAEYHSHDFEWEDLKAEVESDPASSYHLSPFRVPAASTTSQPQPSSEAWRSFHRRHASGKFFKERRYLLKEFPELPNSKDYSKILEVGCGNGSTAVSLLRCKSS

SEQ ID NO: 84764 - protein, 190 aa, Setaria italica
  Transcript Sequence Number=SeqID_18790
  Gene Ontology: Mol. function=oxidoreductase activity; Biological process=oxidation reduction
  Homolog annotation: Hit_ID=B6TCN8; Match level="QueryCoverage=97%, HitCoverage=51%, E-value=4e-79, Identity=76%"; Hit description =NAD(P)H-dependent oxidoreductase
  Pfam annotation: Domain name=Aldo_ket_red; Domain location=51-185; Score=-21.3; E_value=7.8e-07; Accession=PF00248.13; Description =Aldoketo reductase family
MHILNLSPAYAVYTTPATPLKHREPHKQQAMASLAGRSSIRHSKIPEFLVGPSGQPMPAVGLGTVSHPFVEDEVRAAVLTTLELGYRHIDTAALYASERVVGEAMAEALQSGIVASREELFVTSKVWCTQCHPELVLPSLKESLQNLQMEYVDLYLIHWPMAVKPSKPHFPMKREDILGFTAMGQWLGYK

SEQ ID NO: 84765 - protein, 87 aa, Setaria italica
  misc_feature (10)..(10): Xaa can be any naturally occurring amino acid
  Transcript Sequence Number=SeqID_18791
  Gene Ontology: Mol. function=calcium ion binding
  Homolog annotation: Hit_ID=B6TXW9; Match level="QueryCoverage=47%, HitCoverage=26%, E-value=3e-11, Identity=78%"; Hit description =Calmodulin-like protein
  Pfam annotation: Domain name=efhand; Domain location=38-66; Score =36.9; E_value=8.3e-08; Accession=PF00036.24; Description=EF hand
AIDMDVVLGXMGAGGAAVSVGFEEAAALFEEEAATVEEARAAFAVFDRDGDGFIDAAELRSVLGSLGFRAAAECQRMIDAYDEDKDG

SEQ ID NO: 84766 - protein, 88 aa, Setaria italica
  Transcript Sequence Number=SeqID_18792
  Gene Ontology: Mol. function=oxidoreductase activity, acting on paired donors, with incorporation or reduction of molecular oxygen, 2-oxoglutarate as one donor, and incorporation of one atom each of oxygen into both ...
  Gene Ontology: Mol. function=donors; Biological process=protein metabolic process
  Homolog annotation: Hit_ID=B9SNI2; Match level="QueryCoverage=98%, HitCoverage=22%, E-value=8e-17, Identity=51%"; Hit description =Oxidoreductase, putative
RSIFPQDVVIYTADNRNVHCVTEVTEGERLTLTLWFTRDQAFDEDPKLLSFLSQTSLSCGPTEQKSYIPMPASDNMYWFSLSWSTAQW

SEQ ID NO: 84767 - protein, 731 aa, Setaria italica
  Transcript Sequence Number=SeqID_18793
  Gene Ontology: Mol. function=nucleic acid binding; Biological process= transposition, DNA-mediated
  Homolog annotation: Hit_ID=Q9SR14; Match level="QueryCoverage=84%, HitCoverage=80%, E-value=0.0, Identity=72%"; Hit description=Mutator- like transposase
  Pfam annotation: Domain name=MULE; Domain location=378-478; Score =90.6; E_value=5.6e-24; Accession=PF10551.1; Description=MULE transposase domain
  Pfam annotation: Domain name=MuDR; Domain location=181-257; Score =120.0; E_value=7.9e-33; Accession=PF03108.7; Description=MuDR family transposase
  Pfam annotation: Domain name=SWIM; Domain location=628-660; Score =33.2; E_value=1.1e-06; Accession=PF04434.9; Description=SWIM zinc finger
  Pfam module annotation: Pfam domain module=MULE::MuDR::SWIM; Domain location=378-478::181-257::628-660
MANHELVLGHGQNAELALGQNHHDFGQDHGLGLGHGHELDLGSHHHDHDLVLGQSHEHDHELVLGQSHDHDLGLGHHDDDHQLVLGHDHHHHGGELALRQGHEGDSGALDVQGHHHDELELSDSHELTLAETHHLGVDQNLDDQLTLEQAHELALHPHDLSQAPLAVAPVVQSRTMVVSPEFQLAVGQEFPEVMSCRRAIRNTAIACHFEIQTVKSDKTRFTAKCAAEGCPWRIHAAKLPGVPTFSIRTIHDNHSCVGINHLGHQQASVQWVANTVEERLRENPQCKPKEILEEIHKAHGITLSYKQAWRGKERIMAAVRGSFEEGYRLLPEYCKQVERTNPGSIARVYGNPDDNCFRRLFISFNASIFGFVNACRPLIGLDRVLLKNKYLGTLLLATGFDGDGALFPLAFGVVDEETDENWVWFLSELHELLEKNTENMPRLTILSDRRKGIIDGVEFNFPTAFHGFCMRHVSETFKKEFSNPQLVNLLWEAAHALTVIEFETKLLEIEDTSPEAVVWIRHLPPRLWATAYFEGTRYGHLTANITESLNSWILDASSLPIIQMMECIRRQLMTWFNERREASMQWTTILVPLAERRVQEAIERARGYQVARANEAEFEVISAHEGTNIVDIRNRCCLCRGWQLYGVPCAHGVAALLSCRQNVHRYTESCFTVATYRKTYSQTIHPIPDKTLWNETAGQGQAEENKLEIIINPPKSLRPLGKPRKKRVRAE

SEQ ID NO: 84768 - protein, 155 aa, Setaria italica
  misc_feature (10)..(10): Xaa can be any naturally occurring amino acid
  Transcript Sequence Number=SeqID_18794
  Gene Ontology: Mol. function=lyase activity; Biological process =defense response
  Homolog annotation: Hit_ID=B9RTB5; Match level="QueryCoverage=98%, HitCoverage=26%, E-value=2e-50, Identity=60%"; Hit description =Nucleotide binding protein, putative
  Pfam annotation: Domain name=PQQ; Domain location=41-78; Score=10.0; E_value=0.78; Accession=PF01011.13; Description=PQQ enzyme repeat
  Pfam annotation: Domain name=PQQ; Domain location=81-117; Score=8.3; E_value=1.3; Accession=PF01011.13; Description=PQQ enzyme repeat
  Pfam annotation: Domain name=WD40; Domain location=100-139; Score =20.3; E_value=0.0077; Accession=PF00400.24; Description=WD domain, G- beta repeat
  Pfam annotation: Domain name=WD40; Domain location=18-56; Score=13.1; E_value=1.1; Accession=PF00400.24; Description=WD domain, G-beta repeat
  Pfam annotation: Domain name=WD40; Domain location=60-96; Score=10.3; E_value=2.4; Accession=PF00400.24; Description=WD domain, G-beta repeat
  Pfam module annotation: Pfam domain module=PQQ::PQQ::WD40::WD40::WD40; Domain location=41-78::81-117::100-139::18-56::60-96
LVLGTGSGMXSLDVAAGQWKWKVSDCHPGGVTAVAYSKHGRSVYTAGADGMVCRIDASDGSVLGKFRSSSKAISALAVSSDGNILATAAGQLRTFDTSGNKKIQKFSGHPVAVRSMVFSNDSQYVLSSGIGERYIAIWKLGSDKTQSSNLLLLVR

SEQ ID NO: 84769 - protein, 51 aa, Setaria italica
  Transcript Sequence Number=SeqID_18795
  Gene Ontology: Mol. function=protein serine/threonine kinase activity; Biological process=protein amino acid phosphorylation
GARDQPVTAISGFIFAEFPPVLSWSTRLNIAVGAAKGLAFLHDAEKPVIYR

SEQ ID NO: 84770 - protein, 464 aa, Setaria italica
  Transcript Sequence Number=SeqID_18796
  Gene Ontology: Mol. function=protein serine/threonine kinase activity; Biological process=protein amino acid phosphorylation
  Homolog annotation: Hit_ID=Q84QD9; Match level="QueryCoverage=73%, HitCoverage=77%, E-value=1e-138, Identity=69%"; Hit description =Avr9/Cf-9 induced kinase 1
  Pfam annotation: Domain name=Pkinase; Domain location=111-388; Score =121.9; E_value=2e-33; Accession=PF00069.17; Description=Protein kinase domain
  Pfam annotation: Domain name=Pkinase_Tyr; Domain location=111-388; Score=99.3; E_value=1.3e-26; Accession=PF07714.9; Description =Protein tyrosine kinase
  Pfam module annotation: Pfam domain module=Pkinase::Pkinase_Tyr; Domain location=111-388::111-388
  Subcellular localization annotation: CTP_CleavageSite=49; ConfidenceScore=5.46e-01
MAKSSSSKKKQQQQLSAWRFLFGGCLGGAGGAGGSGGNKVRPGPRTTTTATARHALSPAPSSSPAAAGLQQRLSVTDVMSTCSDQDLSVSLVGSNLHVFTVGDLKAATQGFVDSNFLGEGGFGPVYKGAVAEGAKPGLRAQQIAVKLWDPEGTQGHKEWLSEVIFLGQLRHPNLVKLVGYCSEEEHRLLVYEYMPKGSLENHLFKKFPPVLSWSTRLNIAVGAAKGLAFLHDAEKPVIYRDFKTSNILLNPDYEAKLSDFGLAKDGPEGDDTHVSTRVMGTHGYAAPEYILTGHLTAKSDVYSFGVVLLEILSGRRAVDKTRPSREQHLVEYMRSWLKDPQKLGRVMDPDLEGKYSTVAAHKAALVAYQCLSGSPKNRPDMSKVVEDLEPLLTVTDDAPGELPAAAPEDVKKERARRRDGDRREKGRQDKAARSPKRAVPRRRAPGRSQEFWEIGKDVKLSTNG

SEQ ID NO: 84771 - protein, 139 aa, Setaria italica
  Transcript Sequence Number=SeqID_18797
  Gene Ontology: Mol. function=metal ion binding; Cellular component =nucleus; Biological process=regulation of transcription, DNA -dependent
  Homolog annotation: Hit_ID=A0SQ39; Match level="QueryCoverage=100%, HitCoverage=22%, E-value=9e-55, Identity=71%"; Hit description=VIL3 protein
MPKTPPVEASKNIELQKQSAPNLAVTNGHASTKGVVNGERPIKDVKRTSTWICKNLACKAARPSEDSFCKRCSCCICHKFDDNKDPSLWLVCSSENDSKNCCGSSCHIECAFRHKRVGCFDLEQIIHLDGSYSCASCGK

SEQ ID NO: 84772 - protein, 61 aa, Setaria italica
  misc_feature (42)..(42): Xaa can be any naturally occurring amino acid
  Transcript Sequence Number=SeqID_18798
MAVTGTSVAAAATMLAAAAAIFITFVLCFYLFLCAKRYRGAXPTIGGGGGRDGAGGGGRGR

SEQ ID NO: 84773 - protein, 81 aa, Setaria italica
  Transcript Sequence Number=SeqID_18799
RPADAPRQRLCDPRVRSIDGVVQLLLTSCFCMTGRPFTKLYGSLSIPKAVLQIKQGSVRQSLHYQWLIFEPELSNTEDVSS

SEQ ID NO: 84774 - protein, 67 aa, Setaria italica
  Transcript Sequence Number=SeqID_18800
MESSLARLLLLVAVVAAAARCALAGTPHPKGLRVRLTHVDAHGNYSRLQLLQRAARRSHHRMSRLVA

SEQ ID NO: 84775 - protein, 86 aa, Setaria italica
  Transcript Sequence Number=SeqID_18801
GGKGKRVAGRGGAVAVEVEVGREEELLRRWRLLEEKQHMDQEKQQVEVSKSELERIKSRLEAEKERILEAQNNLKLTEEERQEHSV

SEQ ID NO: 84776 - protein, 247 aa, Setaria italica
  misc_feature (231)..(231): Xaa can be any naturally occurring amino acid
  Transcript Sequence Number=SeqID_18802
  Gene Ontology: Cellular component=nucleus
  Homolog annotation: Hit_ID=B9SJ00; Match level="QueryCoverage=100%, HitCoverage=24%, E-value=1e-38, Identity=36%"; Hit description=DNA double-strand break repair rad50 ATPase, putative
MFTPQGKGWTGWSTPTPANQRSGGGAPAASAPLGKGKGRVTELEHELHEYQYNMGLLLLEKKEWAEKLEEISQRLKQKEEILKREQAAHLNAISEYERREESMRKALGVEKQCVIDLEKALREIRAEIAEVKFTSEKKITDAQSLEASLEEKSLEIEGKLHAADAKLAEANRKKAQVDRDLEEVEARQRRLEKEKLYFETERKAREKQLKEQEESLQEWEKKLKESQNRLXDLQRSINDREERANKN

SEQ ID NO: 84777 - protein, 986 aa, Setaria italica
  Transcript Sequence Number=SeqID_18803
  Gene Ontology: Cellular component=nucleolus
  Homolog annotation: Hit_ID=B9SJ00; Match level="QueryCoverage=86%, HitCoverage=72%, E-value=6e-67, Identity=30%"; Hit description=DNA double-strand break repair rad50 ATPase, putative
  Pfam annotation: Domain name=M; Domain location=123-143; Score=0.8; E_ value=1.1e+02; Accession=PF02370.8; Description=M protein repeat
  Pfam annotation: Domain name=M; Domain location=220-240; Score=6.7; E_ value=19; Accession=PF02370.8; Description=M protein repeat
  Pfam annotation: Domain name=M; Domain location=262-282; Score=11.7; E_value=3; Accession=PF02370.8; Description=M protein repeat
  Pfam annotation: Domain name=M; Domain location=328-348; Score=7.0; E_ value=17; Accession=PF02370.8; Description=M protein repeat
  Pfam annotation: Domain name=M; Domain location=35-55; Score=2.5; E _value=68; Accession=PF02370.8; Description=M protein repeat
  Pfam annotation: Domain name=M; Domain location=381-401; Score=0.6; E_ value=1.2e+02; Accession=PF02370.8; Description=M protein repeat
  Pfam annotation: Domain name=M; Domain location=447-467; Score=2.0; E_ value=80; Accession=PF02370.8; Description=M protein repeat
  Pfam annotation: Domain name=M; Domain location=486-506; Score=13.6; E_value=0.83; Accession=PF02370.8; Description=M protein repeat
  Pfam annotation: Domain name=M; Domain location=7-27; Score=2.5; E _value=68; Accession=PF02370.8; Description=M protein repeat
  Pfam module annotation: Pfam domain module=M::M::M::M::M::M::M::M::M; Domain location=123-143::220-240::262-282::328-348::35-55::381 -401::447-467::486-506::7-27
KLAEANRKKAQVDRDLEEVEARQRRLEKEKLYFETERKAREKQLKEQEESLQEWEKKLKESQNRLVDLQRSINDREERANKNDQLFKIKHDELEEARKSVEATKLTLKAKENDINKKLNELHSKEKDADSKRKELEEREKKLIEREEKASIREKEGLQKLLEDHQVELKSKRRDFELELESERKSFDEKMTQKQADLVKREKDVKSLESKLSKTEQALNDKKKTVEGWQNDLDAKSKALKRWEESLKNDEKRLLEEKQHMDQEKQQVEVSKSELERIKSRLEAEKERILEAQNNLKLTEEERQEHSVLTERLKKEIEEYRMRNNSLSEEIEDLRKQRQKFEEEWEQLDEKRAHLAEEDKKVKIERMNLERWRDSEEKRLNDAKFEMEEKYKEQLENLERKERVLNDDIKHKQMENDELLKGERADLQRQLQLHRHELEMEMEQKQASKEKELEDKANELNKKRDFVDNQLRHAIELNESKIQKIISEKKLLEAERKILLEERQKLETDQADIKRDIDSLHGLSQSLKVRREAYNRDMKNLIDLFEKYKVCKNCGITLFEGLDSLALKDSAEIEHPSLAVERDHRSLNADTSAPDTGTLVNSGGRLSLLQKCSRLFKFSPIKKGEQPTENIPFGARLEEASQSDGDYEPTPVYEIAHDSFGAEDDLPSESGARDNDESERHDPADDVQMESSVGVADNSIDILGAQSFDGTNDKAVDATIASTDQNGKDPAAPAEADLQPETSKQGRRQQNRKGRGKGGVKRTRSVRAVVEDAKAILGETFEEKNDGQGDPVAAVGGTRKRRFAGATISEQDEEGSEAHSESVSLGGQRRKRRQTAGAVTETPGEKRYNLRRSTVANATAATAQTDKKKAAKTGSKHMVQATADDTEGTSKADEEPAPESKRASESADYGASQLHEFSQAEIGDAHAPAEGTGEEDGDVVDGKDALPDVPMTPSGSELGAEQDDEDDDDSERRNQSISKKLWSFFTT

SEQ ID NO: 84778 - protein, 143 aa, Setaria italica
  misc_feature (18)..(18): Xaa can be any naturally occurring amino acid
  Transcript Sequence Number=SeqID_18804
  Gene Ontology: Mol. function=triacylglycerol lipase activity; Biological process=lipid metabolic process
  Homolog annotation: Hit_ID=B6SY41; Match level="QueryCoverage=100%, HitCoverage=24%, E-value=1e-53, Identity=71%"; Hit description =Triacylglycerol lipase like protein
IAGEWRRYHGKGGWEGLXLDPLDHNLRRELLRYGDFVQAAYTAFHSMPSAADQAAASSHGQHRTLVLPDRSYRPTRSLFASSSLAIPPWARRRSAPAWLTQRTSFVGYVAVCDNEREVRRMGRRDIAIVLRGTATCPEWAENL

SEQ ID NO: 84779 - protein, 79 aa, Setaria italica
  Transcript Sequence Number=SeqID_18805
LQSSPSPPALSRSLTRAHTHAGVFGNSLRRAKFAHQIEVLQHQIELLCRRIELFHHQIDLRTRRISHHQIGAKRTQFLS

SEQ ID NO: 84780 - protein, 223 aa, Setaria italica
  Transcript Sequence Number=SeqID_18806
  Homolog annotation: Hit_ID=Q9LNR9; Match level="QueryCoverage=92%, HitCoverage=80%, E-value=2e-13, Identity=30%"; Hit description=F1L3.5
WAGGNVSECRNDEFSDWPQSLLAIGTFGNKQIEEEAQSSSGNVQTVQDSVKFTEEEVDNIREEFEVLLEGNDQAEVQGSHADEQVASQKRVGEHDSAKHQEQLMNKEIIISKAREIVGKKGGAIKPRSIASLLRLFVCKGGFTAPVLEPRNSFPQTRMEKLLKAILQKKIHPQNSSTVATRRHLDWKLDEKEINECLEDALSDLDDDGAKWVKTDSDFIVLEM

SEQ ID NO: 84781 - protein, 60 aa, Setaria italica
  Transcript Sequence Number=SeqID_18807
RGSVRTGKGKEVCVYDYDVDDSDEEDGGALKRSVARGSGRWPLPGILGKGTPAPGAIRIK

SEQ ID NO: 84782 - protein, 81 aa, Setaria italica
  misc_feature (35)..(35): Xaa can be any naturally occurring amino acid
  Transcript Sequence Number=SeqID_18808
MASRSSSQFDDPAAARRPPQRERKPPYMLLLPLVXAPVLPLIRIGLRHNPVVRDRLFYGVLAGAFAHGAYLISELYDVESK

SEQ ID NO: 84783 - protein, 314 aa, Setaria italica
  misc_feature (63)..(63): Xaa can be any naturally occurring amino acid
  misc_feature (200)..(200): Xaa can be any naturally occurring amino acid
  misc_feature (296)..(296): Xaa can be any naturally occurring amino acid
  Transcript Sequence Number=SeqID_18809
  Gene Ontology: Mol. function=aspartic-type endopeptidase activity; Cellular component=chromatin; Biological process=chromatin assembly or disassembly
  Homolog annotation: Hit_ID=Q8SA91; Match level="QueryCoverage=100%, HitCoverage=13%, E-value=1e-108, Identity=59%"; Hit description =Putative gag-pol polyprotein
  Pfam annotation: Domain name=RVT_1; Domain location=139-305; Score =55.4; E_value=2.2e-13; Accession=PF00078.19; Description=Reverse transcriptase (RNA-dependent DNA pol
YDMILGLDWLESYSPMKVHWQQKWMAIPYQNSTALLYGSLPDMPVGSVIQLCTMEMSIQDSSXVSIPEAVQALIDEFATLFEVPTELPLERSCDHSIPLVEGASPVHMRPYRYAPVLKDEIEKQINEMLKSGLIQPSNNPFSSFVWLVKKKDNTWRFCVDYMFLNAITAKGKYPVPIIDEFLDELSNASWFTSLDLRAGXRMKLGEEYKTTFQIHFGQFEFRVMASGLTGDPETFQAAMNTTLAPYLRKFFLVFFDDILIYSKNLEERIMHIKLVLQLLSKDQWKIKLSKCSLHRXQIAYLGHTISEKGVGTDP

SEQ ID NO: 84784 - protein, 144 aa, Setaria italica
  Transcript Sequence Number=SeqID_18810
  Gene Ontology: Mol. function=hydrolase activity; Cellular component =cell wall
  Homolog annotation: Hit_ID=B9SCS2; Match level="QueryCoverage=79%, HitCoverage=29%, E-value=2e-40, Identity=68%"; Hit description =Catalytic, putative
AIFTFVSSHLKVPDLEKMAPKLVFVLPIVLLGWAFQAILRPPPTKLCGFPGGPPLTSPRIKLRDGRYLAYREDGIQKDKARYKIITVHAFDSTKDIPLPVSKVLLTELGIYFLAFDRAGYGESDPNPKRDVKSEALDIEELADQ

SEQ ID NO: 84785 - protein, 102 aa, Setaria italica
  Transcript Sequence Number=SeqID_18811
  Gene Ontology: Mol. function=receptor activity; Cellular component =integral to membrane
THRKLVIDGSVDGAIAGEVYETGVADGAGFADAEAAKAFFHRLDQQLNKVNRFYERKEGEFMERGESLRRQLQILVELKAAITQQQQARRHGGSYERECRHG

SEQ ID NO: 84786 - protein, 111 aa, Setaria italica
  Transcript Sequence Number=SeqID_18812
LYQMAQKENNTARKKKRKGYLFLNHICRYRGTPTLEEKSESVVFVDISPIQSGQKKKEAKHGESESDSLVKALHQAMLLVQSPPHASQLSRVAFGYACSSHNETGWDWVCH

SEQ ID NO: 84787 - protein, 42 aa, Setaria italica
  Transcript Sequence Number=SeqID_18813
MQCYKLLNTHVLSPDRSWALEDDCASFQVSLLNSSTQSYQNP

SEQ ID NO: 84788 - protein, 213 aa, Setaria italica
  misc_feature (154)..(154): Xaa can be any naturally occurring amino acid
  Transcript Sequence Number=SeqID_18814
  Gene Ontology: Mol. function=oxidoreductase activity, acting on NADH or NADPH, quinone or similar compound as acceptor; Cellular component=photosystem II; Biological process=oxidation reduction
  Homolog annotation: Hit_ID=Q7FB12; Match level="QueryCoverage=100%, HitCoverage=100%, E-value=2e-74, Identity=67%"; Hit description =NAD(P)H-quinone oxidoreductase subunit M, chloroplastic
  Pfam annotation: Domain name=DUF2485; Domain location=93-204; Score =195.6; E_value=1.3e-55; Accession=PF10664.1; Description =Hypothetical bacterial protein (DUF2485)
  Subcellular localization annotation: CTP_CleavageSite=47; ConfidenceScore=5.33e-01
MATTAFLSPAKLAPQAQGRRFAGAKTAGRVRFPPARAQPEQQVKEVEAEAAGVPPAQGSDEPAKARKGDAQSLPRQPLAESKNMSREYGGQWLSSTTRHVRIYAAYIDPETNAFDQTQMDKLTLMLDPQDEFAWTDETCQMVFNEFQDLVDHYXEGAELSEYTLRLIGSDLEHYIRKLLYDGLLKYNMRSRVLNFSMGKPRIKFNSSQIPEAK

SEQ ID NO: 84789 - protein, 622 aa, Setaria italica
  Transcript Sequence Number=SeqID_18815
  Gene Ontology: Mol. function=protein serine/threonine kinase activity; Cellular component=intrinsic to membrane; Biological process=regulation of transcription, DNA-dependent
  Homolog annotation: Hit_ID=Q7XQ05; Match level="QueryCoverage=100%, HitCoverage=87%, E-value=0.0, Identity=77%"; Hit description =OSJNBa0036B21.17 protein
  Subcellular localization annotation: CTP_CleavageSite=48; ConfidenceScore=5.03e-01
MDNSFMNIPHLPPMNDPFVLGCSTPSSTMENMDQSTFCMDGLSPAMANCSHFNGNMQIMNDITARDDGSRLVLGLGPTPNFYSADCQSTGSKQAERLSGQSSTFTDPGTLRLGLQMDGGEPIQYLQTPNGTVHSFGVVDEASTSATVRNMGGYMPSLLFAPRSNCTVNEAQVETPDSLDLTHNTNNSQHHRQLSPEPSAMTDSSFGVSSDVVTATTTSEQRSHPRHPKKCRFKGCSKGARGASGLCIAHGGGQRCHKPGCHKGAESSSAYCKAHGGGRRCEELGCTKSAEGKTDYCIAHGGGHRCEHPGCPKAARGKSGRCIKHGGGKRCSVKGCIRSAEGKAGLCISHGGGRRCQYPDCGKGAQGSTLYCKGHGGGKRCIFDGCSKGAEGSTPLCKAHGGGKRCMFEGGGVCAKSVHGATEYCVAHGGGKRCSVPGCTKSARGRTDCCVKHGGGKRCKVDNCGKSAQGSTDFCKAHGGGKRCTWSTGCEKFSRGKSGFCAAHGTMMARQREQDAVKNVGSMIGPGLFSGIVMSSATVGSSMTNEHSSSGISTASDCDGTVRSQSMIPPQVLVPRSMMPPWSSEPVDGGREGGHVVPEGRVHGGGLLSLLGGSFRNADVEKL

SEQ ID NO: 84790 - protein, 197 aa, Setaria italica
  Transcript Sequence Number=SeqID_18816
  Gene Ontology: Mol. function=enzyme activator activity; Cellular component=anaphase-promoting complex; Biological process=positive regulation of ubiquitin-protein ligase activity during mitotic cell cycle
  Homolog annotation: Hit_ID=Q8H8G7; Match level="QueryCoverage=100%, HitCoverage=35%, E-value=2e-97, Identity=84%"; Hit description =Putative cell cycle switch protein
  Pfam annotation: Domain name=WD40; Domain location=110-146; Score =22.8; E_value=0.0014; Accession=PF00400.24; Description=WD domain, G- beta repeat
  Pfam annotation: Domain name=WD40; Domain location=151-189; Score =38.1; E_value=3.6e-08; Accession=PF00400.24; Description=WD domain, G-beta repeat
  Pfam annotation: Domain name=WD40; Domain location=68-106; Score =14.3; E_value=0.51; Accession=PF00400.24; Description=WD domain, G -beta repeat
  Pfam module annotation: Pfam domain module=WD40::WD40::WD40; Domain location=110-146::151-189::68-106
DEEDALFPGIFTRRGAGPRKIPRSPYKVLDAPALQDDFYLNLVDWSSHNVLAVGLGNCVYLWNACSSKVTKLCDLGLDDNVCSVGWAQRGTHLAVGTNQGKVQIWDATRCKRIRTMESHRMRVGALAWSSSLLSSGSRDKSILHHDIRAQEDYVSKLTGHKSEVCGLKWSYDNRQLASGGNDNRLFVWNPHSVQPVL

SEQ ID NO: 84791 - protein, 102 aa, Setaria italica
  misc_feature (17)..(17): Xaa can be any naturally occurring amino acid
  Transcript Sequence Number=SeqID_18817
  Gene Ontology: Mol. function=protein serine/threonine kinase activity; Cellular component=plasma membrane; Biological process =protein amino acid phosphorylation
  Homolog annotation: Hit_ID=B9RLA3; Match level="QueryCoverage=96%, HitCoverage=13%, E-value=3e-39, Identity=72%"; Hit description=ATP binding protein, putative
LQSLVPNNTLHYHLHGXKIAAGAARGIAYLHEDCHPRIIHRDIKSSNILLDNNFEAKVADFGLARLALDAVTHVTTRVMGTFGYMAPEYASSGKLTERSDVF

SEQ ID NO: 84792 - protein, 70 aa, Setaria italica
  Transcript Sequence Number=SeqID_18818
  Gene Ontology: Mol. function=protein serine/threonine kinase activity
PSKLRTKMRSFRYLLLILAVFLILDSARAQSKPFLINCGSDSSTDVDGRTWVGDFRPDGGNFTVTLPGAI

SEQ ID NO: 84793 - protein, 348 aa, Setaria italica
  Transcript Sequence Number=SeqID_18819
  Gene Ontology: Mol. function=microtubule motor activity; Cellular component=microtubule associated complex; Biological process =microtubule-based movement
  Homolog annotation: Hit_ID=Q0WPV9; Match level="QueryCoverage=99%, HitCoverage=42%, E-value=1e-158, Identity=80%"; Hit description =Kinesin like protein
  Pfam annotation: Domain name=Kinesin; Domain location=20-348; Score =476.8; E_value=3.1e-140; Accession=PF00225.15; Description=Kinesin motor domain
MPSIRAPASKQTATLQVAVKCRPLTDTEQRRSRHIIQVIDDKTVVVLDPDLSKDYLDLIQNRTKERRYTFDHVYAPGCSNSDVYKNISSTIAGVVQGLNATVFAYGSTGSGKTYTMVGTHSDPGLMVLSFRTIFELIKMDASPDTFEVSCSYLEVYNEVIYDLLERSSGHLELREDPQHGIMVAGLRSIKVHSADRILELLNIGNSRRKTESTEANATSSRSHAVLEITVKRKQKGQYGNQVLRGKLALVDLAGSERASETNNFGQKLRDGANINRSLLALANCINALGKQNKKGLAYVPYRNSQLTRILKDGLSGNSRTVMVATISPADDQYHHTTNTLKYADRAKR

SEQ ID NO: 84794 - protein, 155 aa, Setaria italica
  misc_feature (8)..(8): Xaa can be any naturally occurring amino acid
  Transcript Sequence Number=SeqID_18820
  Gene Ontology: Mol. function=DNA photolyase activity; Cellular component=cytoplasm; Biological process=DNA repair
  Homolog annotation: Hit_ID=B9RV05; Match level="QueryCoverage=100%, HitCoverage=28%, E-value=2e-78, Identity=83%"; Hit description=DNA photolyase, putative
  Pfam annotation: Domain name=FAD_binding_7; Domain location=1-155; Score=22.7; E_value=4.2e-14; Accession=PF03441.6; Description=FAD binding domain of DNA photolyase
FGCLSSRXFYVCIQDVYRSVRNYTKPPVSLTGQLLWRDFFYTVSFGTPNFDQMKGNKICKQIPWSENEELFVAWRDSRTGYPWIDAIMIQLRKWGWMHHLARHSVACFLTRGDLFIHWEKGRDVFERLLIDSDWAINNGNWLWLSCSSFFYQYHR

SEQ ID NO: 84795 - protein, 48 aa, Setaria italica
  Transcript Sequence Number=SeqID_18821
  Subcellular localization annotation: CTP_CleavageSite=42; ConfidenceScore=5.14e-01
RPSTYSCMPNSRKQVLIQNFRYRCCATKRCTRPIPTRKQTVSSSSSSN

SEQ ID NO: 84796 - protein, 353 aa, Setaria italica
  Transcript Sequence Number=SeqID_18822
  Gene Ontology: Mol. function=2-alkenal reductase activity; Biological process=oxidation reduction
  Homolog annotation: Hit_ID=B6U8S0; Match level="QueryCoverage=96%, HitCoverage=99%, E-value=1e-179, Identity=88%"; Hit description=NADP- dependent oxidoreductase P2
  Pfam annotation: Domain name=ADH_zinc_N; Domain location=163-310; Score=110.0; E_value=8.2e-30; Accession=PF00107.18; Description=Zinc- binding dehydrogenase
MSGGGAMAAAGEEVPNKMVILKRYVTGFPSEDDMEVVTGTAHLAVPPGSAAMVVKNLYVSCDPYMRGRMTKHDRPSYVPDFVPGEVLVNFGVGKVMASGHPDFKVGDLVWGMTGWEEYTLVPKPETFFKINHPELPLSYYTGVLGMPGLTAWAGFFDVGKPKKGDYVFVSAASGAVGQLVGQLAKLTGCYVVGSAGSDEKVNLLKTKFGFDEAFNYKKEQDLGAALRRYFPEGIDIYFENVGGQTLEAVLDNMRVHGRIPVCGMISQYNLEQPEGVHNLFQVVAKRLRMEGFMVFDYFNQYYKFEEEMAGYLKEGKISYVEDVADGLEKAPAALIGLFTGRNVGKQLVAVARE

SEQ ID NO: 84797 - protein, 105 aa, Setaria italica
  Transcript Sequence Number=SeqID_18823
  Gene Ontology: Mol. function=protein kinase activity; Cellular component=plasma membrane; Biological process=protein amino acid phosphorylation
  Homolog annotation: Hit_ID=Q8RUT5; Match level="QueryCoverage=83%, HitCoverage=9%, E-value=4e-15, Identity=49%"; Hit description =Putative receptor-like protein kinase
  Pfam annotation: Domain name=LRRNT_2; Domain location=10-50; Score =40.6; E_value=6.1e-09; Accession=PF08263.4; Description=Leucine rich repeat N-terminal domain
AKGGAAGAGLGDDVLGLIVFKADVSDPEGRLATWSEDDERACAWDGVTCEPRTGRVSALSLAGFGLSGKLGRGLLRLEALQSLNLAHNNLSGDVPAELARLPALQ

SEQ ID NO: 84798 - protein, 172 aa, Setaria italica
  Transcript Sequence Number=SeqID_18824
  Gene Ontology: Mol. function=metal ion binding
  Homolog annotation: Hit_ID=B6TEE7; Match level="QueryCoverage=99%, HitCoverage=46%, E-value=1e-74, Identity=75%"; Hit description=VIP2 protein
WTTSENYDIATDLPFGFQWCPFSGFTQLASVFEEREAEPTSYHTIGDHPSAAASSSLVCPYLALRGFLHPVHVPSTSNSGAESTSFHRHSTGLEGHATPDLSNAQVFHATESRNHDRLPRYDTSSQQRSRSYAHHHPLIHRPTPRSGSNLVAPLGSVPAVVTETRGHGHGAR

SEQ ID NO: 84799 - protein, 60 aa, Setaria italica
  misc_feature (40)..(40): Xaa can be any naturally occurring amino acid
  misc_feature (50)..(50): Xaa can be any naturally occurring amino acid
  Transcript Sequence Number=SeqID_18825
  Gene Ontology: Mol. function=metal ion binding
  Homolog annotation: Hit_ID=B6TEE7; Match level="QueryCoverage=93%, HitCoverage=12%, E-value=3e-12, Identity=71%"; Hit description=VIP2 protein
  Subcellular localization annotation: CTP_CleavageSite=46; ConfidenceScore=5.07e-01
MFKYYRPTPRSGSNLVAPLGSVPAVVTETRGHGHGARGQXYQQSMHSSMXSSPFPPTTRR

SEQ ID NO: 84800 - protein, 135 aa, Setaria italica
  Transcript Sequence Number=SeqID_18826
  Gene Ontology: Mol. function=metal ion binding
  Homolog annotation: Hit_ID=B6TEE7; Match level="QueryCoverage=90%, HitCoverage=28%, E-value=2e-46, Identity=80%"; Hit description=VIP2 protein
TSFFFTALIFPFYEDHTIGDHPSAAASSSLVCPYLALRGFLHPVHVPSTSNSGAESTSFHRHSTGLEGHATPDLSNAQVFHATESRNHDSEHRHLSNLPVSGIPDHSMTPFGIGLPRYDTSDDVHMIWISVGCWC

SEQ ID NO: 84801 - protein, 433 aa, Setaria italica
  Transcript Sequence Number=SeqID_18827
  Gene Ontology: Mol. function=metal ion binding
  Homolog annotation: Hit_ID=B6TEE7; Match level="QueryCoverage=97%, HitCoverage=96%, E-value=1e-172, Identity=75%"; Hit description=VIP2 protein
  Pfam annotation: Domain name=PHD; Domain location=27-76; Score=3.3; E_ value=0.011; Accession=PF00628.21; Description=PHD-finger
  Pfam annotation: Domain name=zf-C3HC4; Domain location=28-73; Score =29.9; E_value=1e-05; Accession=PF00097.17; Description=Zinc finger, C3HC4 type (RING finger)
  Pfam module annotation: Pfam domain module=PHD::zf-C3HC4; Domain location=27-76::28-73
MDLERSPPASPAEAAGGGGGGGGGGAACSICLDPVLARGGGRSVAKLQCGHEFHLDCIGSAFNAKGAMQCPNCRKIEKGRWLYARGHRPSADIDMGGWTTSENYDIATDLPFGFQWCPFSGFTQLASVFEEREAEPTSYHTIGDHPSAAASSSLVCPYLALRGFLHPVHVPSTSNSGAESTSFHRHSTGLEGHATPDLSNAQVFHATESRNHDSEHRHLSNLPVSGIPDHSMTPFGIGLPRYDTSSQQRSRSYAHHHPLIHRPTPRSGSNLVAPLGSVPAVVTETRGHGHGARGHMYQQSMHSSMQSSPFPPTTRRVRPRALTITSFIAASSSAEVGGPHGFSAPGAVNRSVPDAEGISRPIDRPYAWGREGFAPFPWIPAEGEAHWWGTFNPMQNHAHGSFTRRPAGERMPQNHPENGYQPVPPPQRMPPFL

SEQ ID NO: 84802 - protein, 49 aa, Setaria italica
  Transcript Sequence Number=SeqID_18828
QKPGLRQKGQSHNNVRSAVCNIHHIQSISSQYEWFKTRLMSPAKIAYRQ

SEQ ID NO: 84803 - protein, 166 aa, Setaria italica
  Transcript Sequence Number=SeqID_18829
  Gene Ontology: Mol. function=protein serine/threonine kinase activity; Cellular component=plasma membrane; Biological process =protein amino acid phosphorylation
  Homolog annotation: Hit_ID=Q8GSB1; Match level="QueryCoverage=98%, HitCoverage=27%, E-value=6e-77, Identity=82%"; Hit description =Putative calcium/calmodulin-dependent protein kinase CaMK
THGRSALRALAKTLTIDQLFYLREQFTLLGPNKSGHISLQNMKTALMKNSSGAMNDSRVVDFVNSICNIPYGKFDFEEFSASAISVYQMEGLETWEQHARQAYELFDKEGNRPIVIEELVSELGLGPSVPLHIVLQDWIRHPDGKLSFLGFIKLLHGVSSRPIPKV

SEQ ID NO: 84804 - protein, 105 aa, Setaria italica
  Transcript Sequence Number=SeqID_18830
  Homolog annotation: Hit_ID=Q10KY3; Match level="QueryCoverage=33%, HitCoverage=5%, E-value=3e-12, Identity=100%"; Hit description =Calcium/calmodulin-dependent serine/threonine-protein kinase 1
MGLCHGKPTQIPEPDAEEDPHVTSGAGDAADGASSPSAAPPAAKPGTPKQPKFPFYLPSPLPPSSYKGSPANSSVASTPARGGFKRPFPPPSPAKHIRALLARRH

SEQ ID NO: 84805 - protein, 561 aa, Setaria italica
  Transcript Sequence Number=SeqID_18831
  Gene Ontology: Mol. function=protein serine/threonine kinase activity; Cellular component=plasma membrane; Biological process =protein amino acid phosphorylation
  Homolog annotation: Hit_ID=Q8GSB1; Match level="QueryCoverage=93%, HitCoverage=87%, E-value=0.0, Identity=91%"; Hit description =Putative calcium/calmodulin-dependent protein kinase CaMK
  Pfam annotation: Domain name=Pkinase; Domain location=108-370; Score =321.0; E_value=2.4e-93; Accession=PF00069.17; Description=Protein kinase domain
  Pfam annotation: Domain name=Pkinase_Tyr; Domain location=108-409; Score=-11.7; E_value=6e-13; Accession=PF07714.9; Description=Protein tyrosine kinase
  Pfam module annotation: Pfam domain module=Pkinase::Pkinase_Tyr; Domain location=108-370::108-409
  Subcellular localization annotation: CTP_CleavageSite=67; ConfidenceScore=5.64e-01
WGRVAGEFAPAAKPGTPKQPKFPFYLPSPLPPSSYKGSPANSSVASTPARGGFKRPFPPPSPAKHIRALLARRHGSVKPNEASIPEGGEPELGLDKSFGFSKHFFAKYDLGEEVGRGHFGYTCAAKAKKGELKGEDVAVKVIPKAKMTTAIAIEDVRREVRILSSLTGHNNLVQFYDAFEDEDNVYIVMELCKGGELLDRILARGGKYSEEDAKVVMVQILSVVSFCHLQGVVHRDLKPENFLFSSKDENSPLKVIDFGLSDFVKPDERLNDIVGSAYYVAPEVLHRSYGTEADMWSIGVIAYILLCGSRPFWARTESGIFRAVLKAEPSFDEAPWPTLTSEAKDFVKRLLNKDYRKRMTASQALSHPWIRNAQQVKVPLDMIIYKLMRAYISSSSLRKSALRALAKTLTTNQLFYVREQFELLGPNKNGYISLQNLKSALVKNSTDAMKDSRVVDFVNTVCTLQYRKLDFEEFAASAISVYQMEALETWEQHARRAYELFDKEGNRPIVIEELASELGLGPSVPLHVVLQDWIRHADGKLSFLGFIKLLHGVSSRSIPKA

SEQ ID NO: 84806 - protein, 160 aa, Setaria italica
  Transcript Sequence Number=SeqID_18832
  Gene Ontology: Mol. function=aspartic-type endopeptidase activity; Cellular component=lysosome; Biological process=sphingolipid metabolic process
  Homolog annotation: Hit_ID=B6TSQ9; Match level="QueryCoverage=88%, HitCoverage=27%, E-value=5e-71, Identity=88%"; Hit description =Aspartic proteinase oryzasin-1
  Pfam annotation: Domain name=SapB_1; Domain location=54-92; Score =75.3; E_value=2.3e-19; Accession=PF05184.7; Description=Saposin-like type B, region 1
SNLICFRVILQTQPAKICSQVGLCTFDGTHGVSAGIRSVVDDEAGKSNGGLRSDPMCNACEMAVVWMQNQLAQNKTQELILNYINQLCDRLPSPMGESSVDCASLKSMPNIAFTIGGKKFSLKPEQYILKVGEGSAAQCISGFTAINILAILKQTVVISS

SEQ ID NO: 84807 - protein, 66 aa, Setaria italica
  Transcript Sequence Number=SeqID_18833
LDHEWREGMSQEEAEKFCGEGCSLAMARDGASGGVVRTVTVSSCLMQLSCFLYFVSEILKCQKYLN

SEQ ID NO: 84808 - protein, 386 aa, Setaria italica
  misc_feature (351)..(351): Xaa can be any naturally occurring amino acid
  Transcript Sequence Number=SeqID_18834
  Gene Ontology: Mol. function=aspartic-type endopeptidase activity; Cellular component=lysosome; Biological process=sphingolipid metabolic process
  Homolog annotation: Hit_ID=B6TSQ9; Match level="QueryCoverage=91%, HitCoverage=68%, E-value=1e-173, Identity=85%"; Hit description =Aspartic proteinase oryzasin-1
  Pfam annotation: Domain name=Asp; Domain location=81-364; Score =366.2; E_value=5.8e-107; Accession=PF00026.15; Description =Eukaryotic aspartyl protease
  Pfam annotation: Domain name=SapB_2; Domain location=314-348; Score =61.0; E_value=4.4e-15; Accession=PF03489.9; Description=Saposin-like type B, region 2
  Pfam module annotation: Pfam domain module=Asp::SapB_2; Domain location=81-364::314-348
MGTRSVALVLLAAVLLQTLLPASAAEGLVRIALKKRAIDQNSRVAERLSAEEKQRLLRGANSLGSGGEGDIIALKNYMNAQYFGEIGVGTPAQKFTVIFDTGSSNLWVPSSKCYFSIACYFHSRYKSGQSSTYKENGKPAAIHYGTGAIAGFFSEDSVTLGGLVVKDQEFIEATKEPGLTFMVAKFDGILGLGFQEISVGNAVPVWYNMIKQGLISDPVFSFWFNRHAGEGEGGEIVFGGMDPNHYKGNHTYVPVTQKGYWQFNMGDVLVDGKSTGFCKGGCAAIADSGTSLLAGPTAIITEINEKIGAAGVVSQECKTVVSQYGQQILDLLLAETQPAKICSQVGLCYFXDATHGVSAGIRSVVDDEAGKSNGGCVSASNRSRIC

SEQ ID NO: 84809 - protein, 245 aa, Setaria italica
  Transcript Sequence Number=SeqID_18835
  Gene Ontology: Mol. function=threonine-type endopeptidase activity; Cellular component=proteasome core complex; Biological process =ubiquitin-dependent protein catabolic process
  Homolog annotation: Hit_ID=Q9LST9; Match level="QueryCoverage=96%, HitCoverage=96%, E-value=1e-129, Identity=92%"; Hit description =Proteasome subunit beta type
  Pfam annotation: Domain name=Proteasome; Domain location=21-203; Score=234.9; E_value=2e-67; Accession=PF00227.18; Description =Proteasome A-type and B-type
MAASHECSSAAVGEAPTTGEHRMGTTIVGVCYDGGVILGADSRTSTGMYVANRASDKITQLTDNVYVCRSGSAADTQVISDYVRYFLHQHTIQLGQPATVKVAANLIRLLAYQNKNMLQAGMIIGGWDKYEGGQIFSVPLGGTILRQPFAIGGSGSSYLYALLDHEWREGMSQEEAEKFVVKVVSLAMARDGASGGVVRTVTINADGVKRNFYPGDKLPLWHEEMEPHNSLLDILAAGNPDPMVQ

SEQ ID NO: 84810 - protein, 277 aa, Setaria italica
  misc_feature (251)..(251): Xaa can be any naturally occurring amino acid
  Transcript Sequence Number=SeqID_18836
  Gene Ontology: Mol. function=transcription elongation regulator activity; Cellular component=nucleoid
  Homolog annotation: Hit_ID=B6TZG2; Match level="QueryCoverage=100%, HitCoverage=82%, E-value=1e-108, Identity=71%"; Hit description =Transcription termination factor nusG family protein
  Pfam annotation: Domain name=KOW; Domain location=216-247; Score =27.3; E_value=6.1e-05; Accession=PF00467.21; Description=KOW motif
  Pfam annotation: Domain name=NusG; Domain location=43-151; Score =54.2; E_value=4.9e-13; Accession=PF02357.11; Description =Transcription termination factor nusG
  Pfam module annotation: Pfam domain module=KOW::NusG; Domain location= 216-247::43-151
RAMDWKEEVQERLIHEPARRRKKPPKRSWREELNLDLLAELGPQWWLVRVSMAPGTDYVDLLTKAISRRYPEVPFKFYNPSIQVKRRLKSGAISVKSKPLHPGLVFLHCALNKELHDFIRDTEGCYGFIGATVGSIKRQIKKPKPIPIEEVESIIREEKEEQAKVDREFEEMENMGNVESFSKPVEESELMLMNKIKKQFKKSPSKGGTSQRTFSPGATVHVLSGPFEDFTASILEVNRKNKKATVQLTLXFGKESFVDLDFDQIEAVEVDSNDSKL

SEQ ID NO: 84811 - protein, 81 aa, Setaria italica
  Transcript Sequence Number=SeqID_18837
  Gene Ontology: Mol. function=4 iron, 4 sulfur cluster binding; Cellular component=photosystem I; Biological process=electron transport chain
  Homolog annotation: Hit_ID=P62090; Match level="QueryCoverage=100%, HitCoverage=100%, E-value=5e-38, Identity=95%"; Hit description =Photosystem I iron-sulfur center
  Pfam annotation: Domain name=Fer4; Domain location=4-27; Score=31.2; E_value=4.3e-06; Accession=PF00037.19; Description=4Fe-4S binding domain
  Pfam annotation: Domain name=Fer4; Domain location=41-64; Score=26.8; E_value=2.5e-05; Accession=PF00037.19; Description=4Fe-4S binding domain
  Pfam module annotation: Pfam domain module=Fer4::Fer4; Domain location=4-27::41-64
MSHSVKIYDTCIGCTQCVRACPTDVLEMIPWDGCKAKQIASAPRTEDCVGCKRCESACPTDFLSVRVYLGPETTRSMALSY

SEQ ID NO: 84812 - protein, 227 aa, Setaria italica
  misc_feature (23)..(23): Xaa can be any naturally occurring amino acid
  Transcript Sequence Number=SeqID_18838
NGKVLTYSAQDGIYKVFDLKNYXFLYSIPDENVQEIKISPGIMLLIYDRTPSYVPLKILSIEDGKPLKFFKHLLHRNKKIDFIEQFNEKLLVKQEDENFQILDVRTSELIEVGVSKFMTPSAFIFLYENNLFLTFRNRTIAVWNFRGELVTSFEDHLLWHHDCSTNNIYITSDQDLIISYCKSEAVAEDGTVTPIGSINMSEIMTGKCIAKIAAGDPALNVTLAETV

SEQ ID NO: 84813 - protein, 402 aa, Setaria italica
  Transcript Sequence Number=SeqID_18839
WKSFDTYDANAHLFVKLQFLRRRSKIIEIVAAKDIIFALAHSGLCAAFNRVTNKRIAFLNLSPDEVIRSLFYNKNNDSLITVSVYASDNFSTLKCRTTPIEYIRRNQLDAGFPLFESESLKWPGFVEFDDVNGKVLTYSAQDGIYKVFDLKNYSFLYSIPDENVQEIKISPGIMLLIYDRTPSYVPLKILSIEDGKPLKFFKHLLHRNKKIDFIEQFNEKLLVKQEDENFQILDVRTSELIEVGVSKFMTPSAFIFLYENNLFLTFRNRTIAVWNFRGELVTSFEDHLLWHHDCSTNNIYITSDQDLIISYCKSEAVAEDGTVTPIGSINMSEIMTGKCIAKIAAGDPALNVTPSRNSSKKRSSVWSTVPEALEDVTALFYDEDRNEIYTGNSQGLVHVWSN

SEQ ID NO: 84814 - protein, 147 aa, Setaria italica
  Transcript Sequence Number=SeqID_18840
  Gene Ontology: Mol. function=ligase activity; Cellular component =integral to membrane
  Homolog annotation: Hit_ID=B6UC42; Match level="QueryCoverage=92%, HitCoverage=47%, E-value=5e-13, Identity=32%"; Hit description=Tumor- related protein
  Pfam annotation: Domain name=Methyltransf_16; Domain location=1-112; Score=1.4; E_value=5.6e-08; Accession=PF10294.1; Description =Putative methyltransferase
AALLGAHVVLTDLPDRLKLLRKNVSLNVDDPHVPGSARVTELVWGDDPHHELVREPLPDFVLGSDVIYNEEAVDDLLVTLNQLSGQHTTILLAGELRNDAVLECFLEAAMEDFLIACIEQDQWHPEFCSNRVALFILVKKPERASTD

SEQ ID NO: 84815 - protein, 113 aa, Setaria italica
  Transcript Sequence Number=SeqID_18841
  Gene Ontology: Mol. function=ATPase activity, coupled to transmembrane movement of substances; Cellular component=integral to membrane; Biological process=transport
  Homolog annotation: Hit_ID=Q8RVT7; Match level="QueryCoverage=59%, HitCoverage=5%, E-value=9e-24, Identity=77%"; Hit description =Multidrug resistance protein 1 homolog
YKAHFSLVPEVSCWTMAGERQSARIRSLYLNAVLRQDIAFFDTELTTGQAVSRMSSDTLVVQDALGEKVLHLFFLSHTTNTSVHRPYFTPIHRVASSSSWPRRRHPPLAAALS

SEQ ID NO: 84816 - protein, 112 aa, Setaria italica
  misc_feature (104)..(104): Xaa can be any naturally occurring amino acid
  Transcript Sequence Number=SeqID_18842
RTGTTTLPPVRPKPASQELSAPVEISRRKRRCRPWAASEHATFDQETGGGGDGEEDGSTDDAKQRSAKGLTIVVPPHVLLARRRLLGGRTAAYSMCAGKGRTLXKGRDLRDV

SEQ ID NO: 84817 - protein, 127 aa, Setaria italica
  Transcript Sequence Number=SeqID_18843
  Gene Ontology: Mol. function=zinc ion binding; Cellular component =intracellular
  Homolog annotation: Hit_ID=B6TSV8; Match level="QueryCoverage=99%, HitCoverage=42%, E-value=2e-18, Identity=50%"; Hit description=Salt tolerance-like protein
SDYLTNICPGWRVDDLLFDDAAFSAASNAGCDEHEQVPSLDADLFDVVAGRPGKRGAWYGGGAWYGGGALGLEKVSAASIAVPTAAKQQGRVRERHWSCDSDSDVFAVPEISPQPLAKKARPPATSF

SEQ ID NO: 84818 - protein, 190 aa, Setaria italica
  misc_feature (111)..(111): Xaa can be any naturally occurring amino acid
  misc_feature (142)..(142): Xaa can be any naturally occurring amino acid
  Transcript Sequence Number=SeqID_18844
  Gene Ontology: Mol. function=hydrolase activity; Cellular component =mitochondrion
  Homolog annotation: Hit_ID=B6TX41; Match level="QueryCoverage=97%, HitCoverage=92%, E-value=2e-80, Identity=83%"; Hit description=Nudix hydrolase 13
  Pfam annotation: Domain name=NUDIX; Domain location=25-163; Score =83.8; E_value=6.3e-22; Accession=PF00293.20; Description=NUDIX domain
MAPGGEKKILVARKGRLRQRYDGEYRLVAGCVPYRVGADGQPELLMVSTPNRDDLVFPKGGWEDDEDVHEAACREALEEAGVKGAINRTALGMWVFRSKSSPVSGDSPRGXCKGYIFALEVAEELEQWPEQDTHGRRWVSPXDAYRLCRYDWMREALSALLGRLAAKPAAQEMSDGHGGVYLMVKAAAAA

SEQ ID NO: 84819 - protein, 94 aa, Setaria italica
  Transcript Sequence Number=SeqID_18845
  Gene Ontology: Mol. function=DNA binding; Cellular component=nucleus
  Homolog annotation: Hit_ID=Q5N909; Match level="QueryCoverage=69%, HitCoverage=5%, E-value=2e-22, Identity=80%"; Hit description=AT hook motif-containing protein-like
MAVPPETTEAPPPPEYREGTTKDGVEVCLFDESADGFSRAVRAISELADLEPEPDFTEAEVERLASSITFLREWRHFSYEPKDVSFNNGIESTS

SEQ ID NO: 84820 - protein, 78 aa, Setaria italica
  Transcript Sequence Number=SeqID_18846
SDNANYCTKLTICRAQSEDSKGGGGFLTGFLIGGAIFGTLGYVFAPQVLPNFILHCAGTGNPSKRIYNRFCLAFLQIA

SEQ ID NO: 84821 - protein, 47 aa, Setaria italica
  Transcript Sequence Number=SeqID_18847
KHLIRNSAVHLLKYVLVRFSHKLIHCKWMHIRFCITLLFKLTVYPLK

SEQ ID NO: 84822 - protein, 196 aa, Setaria italica
  misc_feature (48)..(48): Xaa can be any naturally occurring amino acid
  Transcript Sequence Number=SeqID_18848
  Subcellular localization annotation: CTP_CleavageSite=54; ConfidenceScore=5.66e-01
MAAPSAALSVSGGAHTNTFGCRSNKLKSNRNRLQLAVPSSSDNANYCXKLTICRAQSEDSKGGGGFLTGFLIGGAIFGTLGYVFAPQISRTLDSLLDENGQDSESDETGLQRVPRPRRGQYYDEGLEKTRQTLGDKISQLNLAIDKAASRLKRVTGNVENEALTDETEIGMPSLNDNEHVVENLNEHGFVQGESAT

SEQ ID NO: 84823 - protein, 66 aa, Setaria italica
  Transcript Sequence Number=SeqID_18849
FFTVFDHLPILTRDAPYMHSPCMFSKENSFLFQKPQPPRINRSGNCLLKYVRTSKITSFRSSSFLV

SEQ ID NO: 84824 - protein, 137 aa, Setaria italica
  Transcript Sequence Number=SeqID_18850
DEAVRRRPFLPIWRLATQRGVSQPGVAGTAHEALDCEPATGGTRGCDGGDGRGAVVSRVRAEVRRWRRGGVAGSGLLGCTPAMPWWRGWLWSSEGVPAAPWWRGWRRWPPHAPLVRVGRPCSMLLSLSRGWRLRLRR

SEQ ID NO: 84825 - protein, 138 aa, Setaria italica
  Transcript Sequence Number=SeqID_18851
  Gene Ontology: Mol. function=hydrolase activity, hydrolyzing O -glycosyl compounds; Cellular component=cell wall; Biological process= carbohydrate metabolic process
  Homolog annotation: Hit_ID=B6TWP1; Match level="QueryCoverage=100%, HitCoverage=45%, E-value=2e-72, Identity=92%"; Hit description =Xyloglucan endotransglucosylase/hydrolase protein 26
  Pfam annotation: Domain name=Glyco_hydro_16; Domain location=1-131; Score=167.6; E_value=3.7e-47; Accession=PF00722.13; Description =Glycosyl hydrolases family 16
VPGDSAGTVTTYYASSVGDNHDEIDFEFLGNVTGQPYTIHTNVYADGVGNKEMQFKPWFDPTTGYHNYTISWTPCMIVWYIDGVPIRAFRNYEASHGVAFPTSQPMYAYSSIWAAEDWATQGGRVKADWSKAPFVASY

SEQ ID NO: 84826 - protein, 55 aa, Setaria italica
  Transcript Sequence Number=SeqID_18852
  Gene Ontology: Mol. function=transcription regulator activity; Cellular component=intracellular
  Homolog annotation: Hit_ID=B6THI3; Match level="QueryCoverage=98%, HitCoverage=10%, E-value=3e-19, Identity=79%"; Hit description =Nucleic acid binding protein
LRMHMRGHGDEYKSPAALAKPPRDASAEHELVRRYSCPFVGCKRNKLHKNFQPLL

SEQ ID NO: 84827 - protein, 477 aa, Setaria italica
  Transcript Sequence Number=SeqID_18853
  Gene Ontology: Mol. function=zinc ion binding; Cellular component =intracellular
  Homolog annotation: Hit_ID=B6THI3; Match level="QueryCoverage=92%, HitCoverage=85%, E-value=1e-116, Identity=52%"; Hit description =Nucleic acid binding protein
  Pfam annotation: Domain name=zf-C2H2; Domain location=233-255; Score =30.7; E_value=5.8e-06; Accession=PF00096.18; Description=Zinc finger, C2H2 type
  Pfam annotation: Domain name=zf-C2H2; Domain location=320-343; Score =12.4; E_value=0.55; Accession=PF00096.18; Description=Zinc finger, C2H2 type
  Pfam annotation: Domain name=zf-C2H2; Domain location=348-372; Score =9.5; E_value=1.1; Accession=PF00096.18; Description=Zinc finger, C2H2 type
  Pfam module annotation: Pfam domain module=zf-C2H2::zf-C2H2::zf-C2H2; Domain location=233-255::320-343::348-372
  Subcellular localization annotation: CTP_CleavageSite=57; ConfidenceScore=5.33e-01
MDHSQNHIHGQSAANFCYQFGSDNPFLGMGVQQPFASFTSPFGATPSTNIPHMDWNPATMLDNLTFIEEKIRQVKDVIRTMVDDGGQRPGELAQQQQVVNADLTCLIVQLISTAGSLLPSLKNSTFLSHPQAGHMGIVNHVGSSSSFVPNVTTISEENKEEMCGPEDYEELFKGFTDGALEGGIEIGNVLVEEQDAKDGDEGGDVGMDGESLPPGSYELLQLEKDEILAPHTHFCSICGKGFKRDANLRMHMRGHGDEYKSPAALAKPPRDASAEHELVRRYSCPFVGCKRNKLHKNFQPLKTILCVKNHYKRSHCEKSYTCSRCHTKKFSVMADLKTHEKHCGRDKWLCSCGTSFTRKDKLFAHVALFQGHTPALPTEEPKTSSDQISRVGSHQEPAKLPSSMGSSFVWGTSSGNENALDIKGVDGCSDDFLSTANFGSFNFSFGPADGFTGEPSGSSFSMLPSEHFQSAQKKGKN

SEQ ID NO: 84828 - protein, 265 aa, Setaria italica
  misc_feature (227)..(227): Xaa can be any naturally occurring amino acid
  Transcript Sequence Number=SeqID_18854
  Gene Ontology: Mol. function=protein binding; Cellular component =nucleus; Biological process=rRNA processing
  Homolog annotation: Hit_ID=B6U076; Match level="QueryCoverage=98%, HitCoverage=47%, E-value=1e-144, Identity=93%"; Hit description=WD -repeat protein 50
  Pfam annotation: Domain name=WD40; Domain location=127-164; Score =8.0; E_value=4.5; Accession=PF00400.24; Description=WD domain, G -beta repeat
  Pfam annotation: Domain name=WD40; Domain location=222-258; Score =3.3; E_value=16; Accession=PF00400.24; Description=WD domain, G-beta repeat
  Pfam annotation: Domain name=WD40; Domain location=84-121; Score =29.6; E_value=1.2e-05; Accession=PF00400.24; Description=WD domain, G-beta repeat
  Pfam module annotation: Pfam domain module=WD40::WD40::WD40; Domain location=127-164::222-258::84-121
SRAYYWDCPVLKASFLPDGSEVILSGRRKFFYSFDLVNASVSKIGPLTGREEKSLESFEISPDSRTIAFVGNEGYILLISAKTKQLIGTLKMNGSVRSLAFADGGNQLLSSGGDGHVYHWDLGTRKCIHKAMDDGSLSGVSLCTSQDSSLFATGSTSGIVNVYKRDDFLGGKRKPLKTIENLTTDVGEMKFNHDAQILAITSRKERNGMRLVHVPSFSVFQNWPGPXFSLHYPRCLDFSPGSGFLSVGHAGGKVLLYKLHHYQNA

SEQ ID NO: 84829 - protein, 78 aa, Setaria italica
  misc_feature (49)..(49): Xaa can be any naturally occurring amino acid
  Transcript Sequence Number=SeqID_18855
  Gene Ontology: Cellular component=nucleus; Biological process=rRNA processing
  Homolog annotation: Hit_ID=B6U076; Match level="QueryCoverage=55%, HitCoverage=7%, E-value=1e-16, Identity=86%"; Hit description=WD -repeat protein 50
MVKLDMRNWTFILRPLKISVQKMITRCRIGIHHQSPGPRFSLHYPRCIXYPSPGSGFLSVGHAGGKVVLYKLHHYQNA

SEQ ID NO: 84830 - protein, 358 aa, Setaria italica
  Transcript Sequence Number=SeqID_18856
  Gene Ontology: Mol. function=metal ion binding; Cellular component =nucleus; Biological process=rRNA processing
  Homolog annotation: Hit_ID=B6U076; Match level="QueryCoverage=94%, HitCoverage=61%, E-value=1e-150, Identity=81%"; Hit description=WD -repeat protein 50
MSLISQNAQKRRLEKSGADDGNEGIGSPVAIDGEVGKGAKLKNHNKERKKRTKMPEAQQNKEEEEMRQLESSLFGALYAPLDFGTEVGAAVAAPDRGAPLFFTDRSAADGADVLPIYEEDLAHDDEEDGVIIKGRKPVWVDEEEERTEVDIVKVARLRKLRKEADEHLISGKEYEARLRGQHAKLNPFTAWADMDRKTPLPGASDGESDDEGGVDDILQNNDELVVKDTVKLLPGMLEFSRLVDANIQDPSSGPINSVQFHRNGQLMLAAGLDKHLRFFQIDGKRNPKIQSIFIGDCPVLKASFLPDGSEVILSGRRKFFYSFDLVNASVSKIGPLTGREGSRNSFFLFSLSIWYLLY

SEQ ID NO: 84831 - protein, 97 aa, Setaria italica
  Transcript Sequence Number=SeqID_18857
  Gene Ontology: Mol. function=transcription regulator activity; Cellular component=nucleus; Biological process=regulation of transcription
  Subcellular localization annotation: CTP_CleavageSite=68; ConfidenceScore=5.46e-01
SLPAFFNGFTSNESCSGLNPHIVAMPVNSKSINSVKVFQSDSNLRHSYTSENAQQIKSTRQPGFNLASAATSYSSLANLPRIEHELSSTPNKLRITV

SEQ ID NO: 84832 - protein, 189 aa, Setaria italica
  Transcript Sequence Number=SeqID_18858
  Homolog annotation: Hit_ID=Q9SSF7; Match level="QueryCoverage=54%, HitCoverage=8%, E-value=3e-33, Identity=74%"; Hit description =F25A4.30 protein
  Pfam annotation: Domain name=DUF1118; Domain location=1-189; Score =380.8; E_value=2.4e-111; Accession=PF06549.4; Description=Protein of unknown function (DUF1118)
  Subcellular localization annotation: CTP_CleavageSite=35; ConfidenceScore=5.60e-01
MAAIPAAISGCCSSSRLSQPAGLLPSSSRRRFKVTAMAPKKKVNRYDENWSKQWFGAGIFAEGSEEVSVDVFKKLERRKVLSTVEKAGLLSKAEELGVTLSSLEQLGLLSKAEDLGLLSLVETAAGTSPSVLASISLPLLVAAVAEVVVVPDDSVALVAVQAVVAAVLAAGAAGLFVGSVVLAGLQESD

SEQ ID NO: 84833 - protein, 204 aa, Setaria italica
  Transcript Sequence Number=SeqID_18859
  Gene Ontology: Mol. function=transcription initiation factor activity; Cellular component=transcription factor TFIID complex; Biological process=transcription initiation
  Homolog annotation: Hit_ID=Q10IY9; Match level="QueryCoverage=85%, HitCoverage=25%, E-value=8e-60, Identity=67%"; Hit description =Transcription initiation factor TFIID component TAF4 family protein, expressed
  Subcellular localization annotation: CTP_CleavageSite=15; ConfidenceScore=5.01e-01
MKSEQAPIVALQQPLQQMKSQQTPHTNQTNGATTAAKAPVVTFHMLLPILRRYIDKDKDMQVQSIFAKLRKNEVSKEHFLKVVRNIVGDKVLKLALSEYQMQAQRNTQTNPGNYSLLSQVSGQQTVPSGSMTDEQEAYPGAHTIPMKQAIDNLRPPQFRPSLSSQVQSIRGYSPSQSNAHKANETGNMSDGKGAHMRQLNPFLP

SEQ ID NO: 84834 - protein, 147 aa, Setaria italica
  misc_feature (69)..(69): Xaa can be any naturally occurring amino acid
  misc_feature (139)..(139): Xaa can be any naturally occurring amino acid
  Transcript Sequence Number=SeqID_18860
  Homolog annotation: Hit_ID=Q10A51; Match level="QueryCoverage=98%, HitCoverage=57%, E-value=3e-37, Identity=52%"; Hit description=F-box domain containing protein, expressed
SYYWLLKPKHILVFDFCTHELYHIECPPETHDICRRNVRVRNEDSGWGAWTDCFEGFFLWLWVMETNTXGATSWVLHKVIDLEPYLSEAVSTLPSTNNHTTIRHPVMILGIIEDEDVVFLWMISGVFAVKLKSMQFKRXFESDVSVT

SEQ ID NO: 84835 - protein, 213 aa, Setaria italica
  misc_feature (57)..(57): Xaa can be any naturally occurring amino acid
  misc_feature (151)..(151): Xaa can be any naturally occurring amino acid
  misc_feature (165)..(165): Xaa can be any naturally occurring amino acid
  Transcript Sequence Number=SeqID_18861
  Gene Ontology: Mol. function=cysteine-type peptidase activity; Biological process=proteolysis
  Homolog annotation: Hit_ID=Q10A52; Match level="QueryCoverage=99%, HitCoverage=59%, E-value=3e-56, Identity=51%"; Hit description=F-box domain containing protein, expressed
RFFLRLSSHPSCILNASLVCKHWRHLITSPMFLRCFHEFHHAPPLLGVFTNSTRIPXFLPYGDAPNRVIAKAFSLPDPYWQVLSYRHSRVILVNSTWTRMLAWDPITNEKRFVPMLELTIEPGSQAAVFCKVGHNDHSCPFFIVWVYTYGXGAAYAHEYSSERGXWDFLEISSVPYGSMVYPRPSVLIRNVLYWLLKPKHILVFDFCTHELYS

SEQ ID NO: 84836 - protein, 59 aa, Setaria italica
  Transcript Sequence Number=SeqID_18862
  Subcellular localization annotation: CTP_CleavageSite=32; ConfidenceScore=5.03e-01
MEEQVPRGGGGRPPIPAGGRRPALARHASFVRSPANSTRPETERTFESMDTEFIPVIRS

SEQ ID NO: 84837 - protein, 335 aa, Setaria italica
  misc_feature (56)..(56): Xaa can be any naturally occurring amino acid
  Transcript Sequence Number=SeqID_18863
  Gene Ontology: Cellular component=plasma membrane
  Homolog annotation: Hit_ID=B6THR5; Match level="QueryCoverage=100%, HitCoverage=88%, E-value=1e-171, Identity=86%"; Hit description =Clathrin binding protein
  Pfam annotation: Domain name=BAR; Domain location=12-212; Score= -65.8; E_value=0.065; Accession=PF03114.10; Description=BAR domain
  Pfam annotation: Domain name=SH3_1; Domain location=265-319; Score =49.1; E_value=1.7e-11; Accession=PF00018.20; Description=SH3 domain
  Pfam annotation: Domain name=SH3_2; Domain location=266-319; Score =25.7; E_value=0.00019; Accession=PF07653.9; Description=Variant SH3 domain
  Pfam module annotation: Pfam domain module=BAR::SH3_1::SH3_2; Domain location=12-212::265-319::266-319
QNLQRLYSTTRAAKHFQRNIVRGVEFTIAVSTKQMEIVRKLAEDCCKYGNDNHHFXFALAKASEEFGKSHKQIEKEREDLLKILGEQVFEPLREMIMSAPLEDARLLTYRYQRIRQDMESQIADVMRKQLKSKESSGNADNSMKLQHAESKLSELRTTLAALGREATAAMEAVEAQQQQVTYERLLAMVDAERTYHQNAADILSKLHDEMLLAKHHNESTNHYDEQSSEPESETAPAQLHSDSTSDDPVLTKPSEPTGNGQEVQFLGEVIHPFDAQADGELSLSVGEYVVIRQVAANGWSEGECKGKAGWFPSAYVERRDKAPASKVIEPGLLTT

SEQ ID NO: 84838 - protein, 81 aa, Setaria italica
  Transcript Sequence Number=SeqID_18864
  Gene Ontology: Mol. function=zinc ion binding; Cellular component =intracellular; Biological process=inflorescence development
  Homolog annotation: Hit_ID=Q9FRZ7; Match level="QueryCoverage=69%, HitCoverage=16%, E-value=2e-23, Identity=94%"; Hit description=Hd1
  Pfam annotation: Domain name=zf-B_box; Domain location=22-69; Score =44.8; E_value=3.4e-10; Accession=PF00643.16; Description=B-box zinc finger
MNYNFGGSVLEEEVGGGEGSRPWARPCDGCRAAPSVVYCRADAAYLCASCDTRVHAANRVASRHERVRVCEACECRPRVLA

SEQ ID NO: 84839 - protein, 125 aa, Setaria italica
  Transcript Sequence Number=SeqID_18865
  Gene Ontology: Mol. function=nucleotide binding; Cellular component =cytoplasm; Biological process=defense response
  Homolog annotation: Hit_ID=B9RK93; Match level="QueryCoverage=100%, HitCoverage=14%, E-value=6e-30, Identity=52%"; Hit description =Leucine-rich repeat-containing protein 2, lrrc2, putative
  Pfam annotation: Domain name=LRR_1; Domain location=71-94; Score=7.0; E_value=14; Accession=PF00560.25; Description=Leucine Rich Repeat
  Pfam annotation: Domain name=LRR_1; Domain location=96-117; Score =17.6; E_value=0.051; Accession=PF00560.25; Description=Leucine Rich Repeat
  Pfam module annotation: Pfam domain module=LRR_1::LRR_1; Domain location=71-94::96-117
KEYNNIKMHPMVRAMALWIASDFGTKETKWLVRAGVGLKEAPGAEKWSDAERISFMRNNILELYEKPNCPLLKTLMLQGNPGLDKICDGFFQFMPSLRVLDLSHTSISELPSGISSLVQLQYLDL

SEQ ID NO: 84840 - protein, 86 aa, Setaria italica
  misc_feature (62)..(62): Xaa can be any naturally occurring amino acid
  Transcript Sequence Number=SeqID_18866
  Gene Ontology: Cellular component=chloroplast
  Homolog annotation: Hit_ID=Q6Z6Q2; Match level="QueryCoverage=62%, HitCoverage=19%, E-value=4e-20, Identity=94%"; Hit description =Pentatricopeptide (PPR) repeat-containing protein-like
  Pfam annotation: Domain name=PPR; Domain location=28-62; Score=23.8; E_value=0.00069; Accession=PF01535.12; Description=PPR repeat
VSGRAGDLRLASGLLLEMRDRGVAPDAFSYSTLLAALTRAGHLDHALTFLPLMEDDAVAPDXILFSNLIHLALRGGDAPKALALFS

SEQ ID NO: 84841 - protein, 109 aa, Setaria italica
  Transcript Sequence Number=SeqID_18867
  Gene Ontology: Mol. function=pectinesterase activity; Cellular component=cell wall; Biological process=cell wall modification
  Pfam annotation: Domain name=Pectinesterase; Domain location=1-109; Score=-163.0; E_value=3.1e-09; Accession=PF01095.11; Description =Pectinesterase
IFGNAAAVFEECVIKTVPRAEGVRKTARNVVAANGRIDPGQTTGFVFQNCTVDGNKEFLELFRTKPQSYRLYLGRPWKEYARTLYVSCYLGTVIRPEGWLPWRGDFAFR

SEQ ID NO: 84842 - protein, 192 aa, Setaria italica
  Transcript Sequence Number=SeqID_18868
  Gene Ontology: Mol. function=methyltransferase activity
  Homolog annotation: Hit_ID=B9HX83; Match level="QueryCoverage=56%, HitCoverage=18%, E-value=3e-10, Identity=35%"; Hit description=DNA methyltransferase (Fragment)
TMKFSQQEVDLAFKKLGDEAPLEQLVNCIVNAQLGGSSGGLENGDTTNEGKAEALFGIMEKTLSLLQKGYTEEEVSSAIDSFGHRATVQVLEDSILARRIANSIEQKEIKVESDFLGEAETDYSTYQTSYSAVRCYDDDVNNTRVKRAKHIFMNDRGASSSNPANPWSMGRCAGTSDMPVKVELEAVTPGCR

SEQ ID NO: 84843 - protein, 606 aa, Setaria italica
  misc_feature (23)..(23): Xaa can be any naturally occurring amino acid
  Transcript Sequence Number=SeqID_18869
  Gene Ontology: Mol. function=methyltransferase activity; Biological process=DNA methylation
  Homolog annotation: Hit_ID=B9HX83; Match level="QueryCoverage=91%, HitCoverage=89%, E-value=1e-109, Identity=40%"; Hit description=DNA methyltransferase (Fragment)
MVKIEDLTEDSSADADARVPREXAVGLLPGSVHASLKEEDQPSSSSSSLRLQFIGMGFSPKLVDKVLKRHGDDDSNTSQESLLSYSDLQQSGSESSGSLGSLFDSDNEENNSPLESMKGIGQNIKPEPDSFSEKWSYLLQTMKFSQQEVDLAFKKLGDEAPLEQLVNCIVNAQLGGSSGGLENGDTTNEGKAEALFGIMEKTLSLLQKGYTEEEVSSAIDSFVAHASTVQVLEDSILARRIANSIEQKEIKVESDFLGEAETDYSTYQTSYSAVRCYDDDVNNTRVKRAKHIFMNDRGASSSNPANPWSMGRCAGTSDMPVKVELEAVTPGCRAKVQGDLAKPPYFLYGNVVEIPKDTWHQLKQFLYNVEPEFVSSQFFSALTRKEGYIHNLPVEGRHVVVPKSPMTIEEALPFTRQWWPSWDTRKHISVVTIEAAGIDQTCERLGRMVRESRGVLSQERQMQIMHQCTVSNLIWVGRDKLSPLEPRQLERILGYPHNHTNLFELNQSDRFAAMRYAFQTDTLSYFLSVLKDQFPHGIRVLSIYSGIGGAEVTLHRLGIPLKCVVSVEESEVNRKILKRWWLKTEQTGELRQLPGIWKLKIQVIED

SEQ ID NO: 84844 - protein, 149 aa, Setaria italica
  Transcript Sequence Number=SeqID_18870
  Gene Ontology: Mol. function=methyltransferase activity; Biological process=DNA methylation
  Homolog annotation: Hit_ID=B4XTT0; Match level="QueryCoverage=90%, HitCoverage=23%, E-value=1e-31, Identity=52%"; Hit description=DRM -type DNA-methyltransferase
FAAMRYAFQTDTLSYFLSVLKDQFPHGIRVLSIYSGIGGAEVTLHRLGIPLKCVVSVEESEVNRKILKRWWLKTEQTGELRQLPGIWKLKIQVIEDFITEFGGFDLIIGGNYTSCKGGTTVNTTMGMDSNRFYEYARVVKRVRAAVGVN

SEQ ID NO: 84845 - protein, 1063 aa, Setaria italica
  Transcript Sequence Number=SeqID_18871
  Gene Ontology: Mol. function=protein serine/threonine kinase activity; Biological process=protein amino acid phosphorylation
  Homolog annotation: Hit_ID=Q5SMJ0; Match level="QueryCoverage=99%, HitCoverage=83%, E-value=0.0, Identity=67%"; Hit description =Putative salt-inducible protein kinase
  Pfam annotation: Domain name=Pkinase; Domain location=786-1049; Score= 205.1; E_value=1.9e-58; Accession=PF00069.17; Description=Protein kinase domain
  Pfam annotation: Domain name=Pkinase_Tyr; Domain location=786-1049; Score=245.0; E_value=1.8e-70; Accession=PF07714.9; Description =Protein tyrosine kinase
  Pfam module annotation: Pfam domain module=Pkinase::Pkinase_Tyr; Domain location=786-1049::786-1049
LSKGMSPHAGPPPPSVATEYTYSGGAHYHGGFPDSVGFTSAVTMSAPAMGIPAQNPILVRTEPSTMQPHHVAAAAYATSQQPPQVTSYVQQQQPPQVAQYVPHQQPQSASYQQQMPQSYIEPQQVHYINAQQFGVHGVPQSVNFVPVQMSQFMPSIPVTSSMATAAAQQVGTFRPVSAGVEPVQENMQFTRTVQAPVDQSYRVLQTPLSQLPPLPSVHLQTSDTQRYGVQPAMTSAISTPVVTSSGTIPVVLSSATVPSVRYDDCTMCQKSLPHAHSDNIIQERGNPRALSNPEAAPVFYSLHQDSGSNKSSPDANSGTPANYMVEPRAGNAVGMSQFESVLPARMPGVQATASPDAGVPVQPTMVALPVSSPPAPNGAFVGHPIQAGVEDPARYQQQPYSYSLQPQQVPVNGPQVIDAGAYKNANYPAAEPLREYARDLPHDYTRAIDARMQGVHLGPIAPPESSVQGKPSFPHGTIDHAKAEKPPVNIDGSSMYKSQAGGYHMGITNAFTAPALTQEDNIARHSEQPPPAFDVGAQSVHPDIIQNPLNVPVQNNLRAPIEPPVSNEKVPVRPPYSGVQVPAGTPPQLPREMLGHLVSAPPDGSSNFPLQATAGIDRVEATRELAYTDSLFSNQDPWKAVGNVSLVPPRPSKLAKEPLASGDQYMDGHVPDINANGPILLEEGNLPHIQDPGFKDIHTIKVNKGFGEENIKRQLQAVAEGVAASVLQSPFPEKPAALSGDHIDSHGAVVDAKVKDEGNNQSDKTSQGVQVLDDIDNLQIIKNSDLEELRELGSGTFGTVYHGKWRGSDVAIKRINDRCFAGKASEQERMRTDFWNEAGKLASLHHPNVVAFYGVVLDGPGGSVATVTEYMANGSLRQALQRHEKIFDRRRRLLIAMDVAFGMEYLHGKNIVHFDLKSDNLLVNLRDPQRPICKVGDLGLSKVKCQTLISGGVRGTLPWMAPELLNGSSSLVSEKVDVFSFGIVMWELLTGEEPYAELHYGAIIGGIVNNTLRPRVPESCDPQWRALMEQCWAAEPSERPSFTEVGNSLRAMAASPTKAQPQK

SEQ ID NO: 84846 - protein, 105 aa, Setaria italica
  Transcript Sequence Number=SeqID_18872
KGDERCGGRRRRRVSLGCLDEVICRTWRSTRSRCAGRRRPSTPSPCLPRTASRCTLGTDPPASTEPARLQPPPAATPPIMHHGCSVVGRPACCFNRHGRRLRLHL

SEQ ID NO: 84847 - protein, 122 aa, Setaria italica
  Transcript Sequence Number=SeqID_18873
  Gene Ontology: Mol. function=aminopeptidase activity; Cellular component=cytoplasm; Biological process=proteolysis
  Homolog annotation: Hit_ID=B4F869; Match level="QueryCoverage=95%, HitCoverage=35%, E-value=8e-58, Identity=83%"; Hit description =Proline iminopeptidase
CPGAGTSPGNRRFFDPEFYRIVLFDQRGAGRSTPHACLEQNTTWDLVADIEKLREHLDIPEWQVFGGSWGSTLALAYSQTHPDKELDWFYEGGAAAIFPDAWEPFRDFIPEEERNWFYKLSI

SEQ ID NO: 84848 - protein, 108 aa, Setaria italica
  Transcript Sequence Number=SeqID_18874
  Gene Ontology: Mol. function=aminopeptidase activity; Cellular component=cytoplasm; Biological process=proteolysis
  Homolog annotation: Hit_ID=B4F869; Match level="QueryCoverage=87%, HitCoverage=25%, E-value=2e-47, Identity=94%"; Hit description =Proline iminopeptidase
HVILYLLIHGSIFQAFARIENHYFVNKGFLPSDSYLLDNVDKIRHIKAFIVQGRYDVCCPMMSAWDLHKAWPEAEFKVVPDAGHSANEVGIAAELRSATEKLRDMLRK

SEQ ID NO: 84849 - protein, 57 aa, Setaria italica
  Transcript Sequence Number=SeqID_18875
  Gene Ontology: Mol. function=aminopeptidase activity; Cellular component=cytoplasm
  Homolog annotation: Hit_ID=B4F869; Match level="QueryCoverage=84%, HitCoverage=13%, E-value=2e-19, Identity=87%"; Hit description =Proline iminopeptidase
VNNFSFKFAAWEPFRDFIPEEERNCFIAAYSKRLTSSDPTVQIEAAKRWTMWEMMTA

SEQ ID NO: 84850 - protein, 107 aa, Setaria italica
  Transcript Sequence Number=SeqID_18876
  Gene Ontology: Mol. function=aminopeptidase activity; Cellular component=cytoplasm; Biological process=proteolysis
  Homolog annotation: Hit_ID=B4F869; Match level="QueryCoverage=59%, HitCoverage=17%, E-value=7e-34, Identity=96%"; Hit description =Proline iminopeptidase
FYYLLIHGSIFQAFARIENHYFVNKGFLPSDSYLLDNVDKIRHIKAFIVQGRYDVCCPMMSAWDLHKAWPEAEFKVNYACIILPKISDMIFMLELGLIGLLILKHKK

SEQ ID NO: 84851 - protein, 110 aa, Setaria italica
  Transcript Sequence Number=SeqID_18877
RMGVKARMAYPSEVNGKILLALNDVRHTELSVGKKYVFRLKLQGEGKITGAVDVFFFNFGGIQMRKRSESYGCVLYRLSIYGSVKQSLKLWCCVTLTTTCGYVKIPNNIC

SEQ ID NO: 84852 - protein, 216 aa, Setaria italica
  Transcript Sequence Number=SeqID_18878
LPIGTLVTAPSVLKHPGVLQENSTEVPPSPASWCSSPPDEMSRGGYPSPVSPLEAAFSGHRSPLRTATKDMISSGCEPGILSEQVQTTEERAETSPVLDDQDDDMDELDHPIKSFIRDVLVVAGMYRSRQNPVNLLSDCEAKPIPKRVLEEVESSSSTVAASSNVGAAAIDHRLLFDLINEALPGAVRSSTTLCTFDKFYAAAPRRAPGGKKLLEA

SEQ ID NO: 84853 - protein, 92 aa, Setaria italica
  Transcript Sequence Number=SeqID_18879
LTLSGFSKLRVSEYSPRLDVLEGPAAEELDLLGGRLNFLYSNGGRRSCSRAVGGAADSNGGSASPSPAALGTRTGAARCTGTGAARCGWSRA

SEQ ID NO: 84854 - protein, 596 aa, Setaria italica
  Transcript Sequence Number=SeqID_18880
  Gene Ontology: Mol. function=acyl-CoA binding
  Homolog annotation: Hit_ID=B6U8G5; Match level="QueryCoverage=97%, HitCoverage=79%, E-value=1e-141, Identity=46%"; Hit description=Acyl- CoA binding protein
  Pfam annotation: Domain name=Kelch_1; Domain location=122-168; Score =14.9; E_value=0.055; Accession=PF01344.17; Description=Kelch motif
  Pfam annotation: Domain name=Kelch_1; Domain location=173-219; Score =21.2; E_value=0.0043; Accession=PF01344.17; Description=Kelch motif
  Pfam annotation: Domain name=Kelch_1; Domain location=225-270; Score =12.6; E_value=0.1; Accession=PF01344.17; Description=Kelch motif
  Pfam annotation: Domain name=Kelch_1; Domain location=343-388; Score =21.4; E_value=0.0037; Accession=PF01344.17; Description=Kelch motif
  Pfam annotation: Domain name=Kelch_1; Domain location=67-112; Score =34.5; E_value=4.2e-07; Accession=PF01344.17; Description=Kelch motif
  Pfam annotation: Domain name=Kelch_2; Domain location=122-168; Score =8.4; E_value=3.3; Accession=PF07646.7; Description=Kelch motif
  Pfam annotation: Domain name=Kelch_2; Domain location=173-219; Score =30.6; E_value=6.2e-06; Accession=PF07646.7; Description=Kelch motif
  Pfam annotation: Domain name=Kelch_2; Domain location=225-270; Score =21.4; E_value=0.0039; Accession=PF07646.7; Description=Kelch motif
  Pfam annotation: Domain name=Kelch_2; Domain location=291-338; Score =7.2; E_value=4.8; Accession=PF07646.7; Description=Kelch motif
  Pfam annotation: Domain name=Kelch_2; Domain location=343-388; Score =6.9; E_value=5.3; Accession=PF07646.7; Description=Kelch motif
  Pfam annotation: Domain name=Kelch_2; Domain location=67-112; Score =33.3; E_value=9.6e-07; Accession=PF07646.7; Description=Kelch motif
  Pfam module annotation: Pfam domain module=Kelch_1::Kelch_1::Kelch _1::Kelch_1::Kelch_1::Kelch_2::Kelch_2::Kelch_2::Kelch_2::Kelch _2::Kelch_2; Domain location=122-168::173-219::225-270::343-388::67 -112::122-168::173-219::...
  Pfam module annotation: Domain location=225-270::291-338::343-388::67- 112
MATVQGPMAIGSASHNGIAPEEPKVVVVENGKAVDVQENEISMEGFCSISAYDQWTPLSVSGQLPRPRYKHGAVVIQQKMYVFGGNHNGRYLGDTQVLDLKSLSWSMLEAKSESAEAVSFAACAGHSLIPWGNKILCLAGHSREPTESLSVKEFDPQTCTWSSLRTYGSSPSSRGGQSVTLVGDTLVVFGGEGHGRSLLNDLHILDLETMTWDEFETTGTPPSPRSEHAAACFAERYLLIFGGGSHSTCFSDLHLLDTQTMEWSRPEQQGVNFLVTSGHAGVTIGEYWFWSNALLVCSGLDHSIVCVSRRCRSHSTCFSDLHLLDTQTMEWSRPEQQGVTPEPRAGHAGVTIGEYWFITGGGNSRKGVTDTLVLNMSTYEWSVVTGLEARAPPTSEGSSLVMHTIDGENFLVSFGGYSGRYSNQVYALKTSLKSSVPIQQKTETDINGTTPISMPENSSRKVIFEIEELKDKPGNRADTSKTSAQVVKGERNQIEDRLNQEQLQSLHLKQELATVENRNAELTEEIHLVLDQLSAEQMRASKLENEVSDIQERLQKMDVLQKEFELLRGEIDSGPNKAAAGSDQPPRGGGFWRWNG

SEQ ID NO: 84855 - protein, 83 aa, Setaria italica
  Transcript Sequence Number=SeqID_18881
  Subcellular localization annotation: CTP_CleavageSite=15; ConfidenceScore=5.07e-01
GSSFNGSKISVSPVMISRKQETQNNMYLSSCQLLGFLDCNFSQTHLSKTSPYKFLPSQTGGDGNQQVYNHGAKCIGAAATKTC

SEQ ID NO: 84856 - protein, 114 aa, Setaria italica
  misc_feature (75)..(75): Xaa can be any naturally occurring amino acid
  misc_feature (95)..(95): Xaa can be any naturally occurring amino acid
  Transcript Sequence Number=SeqID_18882
  Homolog annotation: Hit_ID=Q93ZR8; Match level="QueryCoverage=97%, HitCoverage=21%, E-value=9e-45, Identity=72%"; Hit description =Putative auxin-independent growth promoter protein
  Pfam annotation: Domain name=DUF246; Domain location=1-114; Score= -139.7; E_value=1.9e-06; Accession=PF03138.6; Description=Plant protein family
TEIKRGVELGKFHSMPPISWSDISYYHKQILPLIRKYKVLHLNRTDARLANNGLPLEIQRLRCRVNYAALKFTPXIEELGRRVIRILRQNGPFLXLHLRYEMDMLAFSGCTQGS

SEQ ID NO: 84857 - protein, 459 aa, Setaria italica
  Transcript Sequence Number=SeqID_18883
  Gene Ontology: Mol. function=binding
  Homolog annotation: Hit_ID=B9SNU2; Match level="QueryCoverage=89%, HitCoverage=87%, E-value=7e-79, Identity=28%"; Hit description =Pentatricopeptide repeat-containing protein, putative
  Pfam annotation: Domain name=PPR; Domain location=175-209; Score =25.5; E_value=0.00021; Accession=PF01535.12; Description=PPR repeat
  Pfam annotation: Domain name=PPR; Domain location=212-246; Score =12.0; E_value=0.34; Accession=PF01535.12; Description=PPR repeat
  Pfam annotation: Domain name=PPR; Domain location=247-281; Score =18.2; E_value=0.033; Accession=PF01535.12; Description=PPR repeat
  Pfam annotation: Domain name=PPR; Domain location=282-316; Score =47.1; E_value=6.9e-11; Accession=PF01535.12; Description=PPR repeat
  Pfam annotation: Domain name=PPR; Domain location=317-351; Score =41.0; E_value=4.8e-09; Accession=PF01535.12; Description=PPR repeat
  Pfam annotation: Domain name=PPR; Domain location=352-386; Score =37.9; E_value=4.1e-08; Accession=PF01535.12; Description=PPR repeat
  Pfam annotation: Domain name=PPR; Domain location=387-421; Score =24.3; E_value=0.00051; Accession=PF01535.12; Description=PPR repeat
  Pfam annotation: Domain name=PPR; Domain location=422-456; Score =35.4; E_value=2.2e-07; Accession=PF01535.12; Description=PPR repeat
  Pfam module annotation: Pfam domain module=PPR::PPR::PPR::PPR::PPR::PP R::PPR::PPR; Domain location=175-209::212-246::247-281::282-316::317 -351::352-386::387-421::422-456
MHRAVPGFLRRAHAIRSYPPVLRLSSQACCLNSSDNEEPGRNSAYIDYRSQCLLPSITLAVRTANWDAARNISFRECVRLYGLSQSIGLFALLVQLFLPRRIREIQCLIQSIVDYCENAGQELFELAPILVSRLGGSMTLLQVYAAVIRILVELSMFEDALLTYIEARKVGAELRLCNFLLKCLVKGNQIVYARSLFDDMKSSGPSPNVYSYSVLMSMYTHGERLCLEEAFELLREMEMNGVRPNAATYGTYLYGLCRSRQLTSAWDFLQNLCQRGCPCNTYCFNAVIHGFCSEGQVHKAIEVFNGMKKCGFLPDVHSYSILVDGLCKQGELLKGYDMLDEMARNGISPNHVSYSSLLHGLCKTGNVEFAFEIFKRLKDQGFKHDQIMYSILFHGCCQHLHLDIVNGLWDDMIHHDFVLDVYDYTNRIYALCRHRCLIEALEVFELMLENGITPNIVTC

SEQ ID NO: 84858 - protein, 85 aa, Setaria italica
  misc_feature (78)..(78): Xaa can be any naturally occurring amino acid
  Transcript Sequence Number=SeqID_18884
  Gene Ontology: Mol. function=electron carrier activity; Biological process=oxidation reduction
  Homolog annotation: Hit_ID=B6SXJ1; Match level="QueryCoverage=67%, HitCoverage=10%, E-value=2e-22, Identity=87%"; Hit description =Flavonoid 3-monooxygenase
MELSPSPASFLAVVLAAALFLVAILRQRRPTRKYNLPPGPRPWPVIGNLNLIGPLPHHSIHDLSARYGPLMSLRFGSXPVVVGSS

SEQ ID NO: 84859 - protein, 97 aa, Setaria italica
  Transcript Sequence Number=SeqID_18885
  Gene Ontology: Mol. function=protein serine/threonine kinase activity; Cellular component=cytoplasmic vesicle; Biological process= protein amino acid phosphorylation
  Homolog annotation: Hit_ID=Q656X4; Match level="QueryCoverage=100%, HitCoverage=14%, E-value=5e-33, Identity=74%"; Hit description =Putative receptor serine/threonine kinase PR5K
  Pfam annotation: Domain name=Thaumatin; Domain location=1-97; Score= -18.9; E_value=1e-06; Accession=PF00314.9; Description=Thaumatin family
FDISLVDGFNVPMDFLPVPANRLGAQGCSRGPRCAANITSQCPKDLKAPGGCNSACTVFEDKAKYCCIGNGTNTCEPTTYSLVFVRMCPDAYSYSRD

SEQ ID NO: 84860 - protein, 72 aa, Setaria italica
  Transcript Sequence Number=SeqID_18886
VMIFPSCLASLITDSFRNTSMVLHIYIVIFGIVSYYVQLRVWFPKHAFGILARLWLWYKIEGTFQDKSAYII

SEQ ID NO: 84861 - protein, 117 aa, Setaria italica
  Transcript Sequence Number=SeqID_18887
  Gene Ontology: Mol. function=catalytic activity; Biological process =metabolic process
  Homolog annotation: Hit_ID=B9T359; Match level="QueryCoverage=67%, HitCoverage=17%, E-value=4e-31, Identity=77%"; Hit description =Carboxyphosphonoenolpyruvate mutase, putative
GAYHFFSYSANVQAGVSKHWILFTYVSFPGFCVSAARLGLPDVGLISYGEMVDQGRLINEAVSIPVIGDGDNGYGNSMNIKRTIKGYINAGFAAIMLEDQVCSLWNTNQSFHTLAPY

SEQ ID NO: 84862 - protein, 106 aa, Setaria italica
  Transcript Sequence Number=SeqID_18888
ISRYLFVHRNRVANKNEQKKRLQASQILNLPHMLHYAAMVTASTQIQWACINFRWYLSHGHLGSTSSRIHNHQTVVDYCRFAPLELWHPSLVQLVLFLFFVVAVEP

SEQ ID NO: 84863 - protein, 50 aa, Setaria italica
  Transcript Sequence Number=SeqID_18889
  Homolog annotation: Hit_ID=A2Q4X2; Match level="QueryCoverage=94%, HitCoverage=9%, E-value=2e-11, Identity=65%"; Hit description =Isocitrate lyase and phosphorylmutase
GASIRAMEDALDAIKDGGVPPPTIMPSFKKIKDTLGFDRYYKEDKQYQLE

SEQ ID NO: 84864 - protein, 339 aa, Setaria italica
  misc_feature (14)..(14): Xaa can be any naturally occurring amino acid
  Transcript Sequence Number=SeqID_18890
  Gene Ontology: Mol. function=helicase activity
  Homolog annotation: Hit_ID=Q0DA50; Match level="QueryCoverage=62%, HitCoverage=32%, E-value=6e-96, Identity=82%"; Hit description=Zinc finger CCCH domain-containing protein 45
  Pfam annotation: Domain name=YTH; Domain location=59-153; Score =142.4; E_value=1.4e-39; Accession=PF04146.7; Description=YT521-B -like family
GHQTARIAHPPQGXSRYLIVKSCNRENLEISVQQGIWATQRSNEAKLNEAFESTENVILIFSINRTRHFQGCAKMTSRIGGYIGGGNWKSAHGTAHYGRNFSMQWLKLCELSFQKTHHLRNPYNDNLPVKISRDCQELEPFIGEQLASLLYLEPDSELTAMLIAAEAKREEEKAKGVSADEAADNQDIVLFDDNEEEEEEESEEEEESNGQESQGRGRGRGMMWPPQMPMMRGPMMGGRFPPNMIGDGFGFGGGFGMPDPFGMPRGFPPFGGPRFPGDFPRGPMPGMAFPGRPPQPFPLGLDMMMGPGRGPMMGGMGMGGPGRPNRPMGMAPFMPPPPP

SEQ ID NO: 84865 - protein, 54 aa, Setaria italica
  Transcript Sequence Number=SeqID_18891
VRCSWSNESVKDNLRVDEYGFALISPPVQFSLFPPLRKVQSPLMSDEKLRIRES

SEQ ID NO: 84866 - protein, 114 aa, Setaria italica
  Transcript Sequence Number=SeqID_18892
  Gene Ontology: Mol. function=binding; Cellular component=mitochondrion
  Homolog annotation: Hit_ID=B8Y6I0; Match level="QueryCoverage=100%, HitCoverage=72%, E-value=8e-57, Identity=43%"; Hit description =Chloroplast pentatricopeptide repeat protein 10
  Pfam annotation: Domain name=PPR; Domain location=20-54; Score=50.6; E_value=6.3e-12; Accession=PF01535.12; Description=PPR repeat
  Pfam annotation: Domain name=PPR; Domain location=55-89; Score=29.4; E_value=1.4e-05; Accession=PF01535.12; Description=PPR repeat
  Pfam module annotation: Pfam domain module=PPR::PPR; Domain location =20-54::55-89
DEAVAFFEDLKARGHNPCVVTYNALLQVFGKAGNYTEALRVLKEMEQNGCQPDAVTYNELAGTYARAGFYEEAAKCLDTMTGKGLLPNTFTYNTVMTAYGNVGKVDEALALFNR

SEQ ID NO: 84867 - protein, 90 aa, Setaria italica
  Transcript Sequence Number=SeqID_18893
  Homolog annotation: Hit_ID=Q01L54; Match level="QueryCoverage=80%, HitCoverage=22%, E-value=6e-32, Identity=91%"; Hit description =H0321H01.2 protein
VLPLTCWSTKARFLEAGAEHEIGVVLLDGDAEAWVTVDGRKVVQLRRLRWNFRGSHTIFLDGGAPVDMTWDLHGWLFHAGAGPPHASSSS

SEQ ID NO: 84868 - protein, 78 aa, Setaria italica
  Transcript Sequence Number=SeqID_18894
LLLRCKSCSDCQGANQLGKEGASSCLLKPWPPLLQETNLAAYYKLLLQSGRENRGKCQGLEMVGCELEMANGRKACCL

SEQ ID NO: 84869 - protein, 182 aa, Setaria italica
  misc_feature (117)..(117): Xaa can be any naturally occurring amino acid
  Transcript Sequence Number=SeqID_18895
  Gene Ontology: Mol. function=phosphatidylinositol-4,5-bisphosphate 5 -phosphatase activity
  Homolog annotation: Hit_ID=Q84W55; Match level="QueryCoverage=71%, HitCoverage=11%, E-value=2e-37, Identity=55%"; Hit description=Type II inositol-1,4,5-trisphosphate 5-phosphatase FRA3
LLFRINCISITIHCNSLSRESLLAKLVDNIPRSSEALVVRIFTFIFLIGYDSSEKKRIPAWCDRILYRDSRASSETECSLECPVVGSISLYDSCMEATDSDHKPVKCVFNLDIPQLXHEQTMRKKYGEIMTSNKKVRYLLEGMEAFPEVNISTDDIILQDQNPSVVKLQNRSTKGVPDEFGI

SEQ ID NO: 84870 - protein, 639 aa, Setaria italica
  Transcript Sequence Number=SeqID_18896
  Gene Ontology: Mol. function=phosphatidylinositol-4,5-bisphosphate 5 -phosphatase activity; Cellular component=integral to membrane; Biological process=signal transduction
  Homolog annotation: Hit_ID=B9RM01; Match level="QueryCoverage=96%, HitCoverage=56%, E-value=0.0, Identity=57%"; Hit description=Type II inositol 5-phosphatase, putative
  Pfam annotation: Domain name=Exo_endo_phos; Domain location=126-460; Score=133.2; E_value=8.2e-37; Accession=PF03372.15; Description =EndonucleaseExonucleasephosphatase family
  Pfam annotation: Domain name=WD40; Domain location=21-57; Score=15.5; E_value=0.22; Accession=PF00400.24; Description=WD domain, G-beta repeat
  Pfam annotation: Domain name=WD40; Domain location=60-96; Score=11.7; E_value=1.6; Accession=PF00400.24; Description=WD domain, G-beta repeat
  Pfam module annotation: Pfam domain module=Exo_endo_phos::WD40::WD40; Domain location=126-460::21-57::60-96
TDGMIWTGSANGSLAQWDGSGNRLQEFLHHSSSVQCICSFGTRLWVGYMDGSIQLLDLEGNLLGQWAAHSSPILSMAVGGSYIFTLAGHGGIRGWNLSSPGPLDSILRSELIEKDASYKNFEYMKVLVGSWNVGQEKASYESLRAWLKLPTPEVGVIVVGLQEVDMGAGFLAMSAAKETVGLEGSPNGEWWLDVIGQILKGHSFVRVGSRQMAGLIIAIWVRINLKQFIGDIDNAAVACGLGRAIGNKGAVGLRMRIHDRSICFVNCHFAAHMEAVSRRNEDFDHVFRSMTFSSPSNGLLTTSVSGSGTQLLRGANGSGLPELSDTDMIVFLGDLNYRLSNISYDEAMGLVSRRCFDWLRDNDQLRAEMRSGRVFQGLREGEFKFPPTYKFEKHIAGLSGYDSSEKKRIPAWCDRILYRDSRASSETECSLECPVVGSISLYDSCMEATDSDHKPVKCVFNLDIAHVDKQTMRKKYGEIMTSNKKVRYLLEGMEAFPEVNISTDDIILQDQNPSVVKLQNRSTKELACFEIIGQIPNSSGTPFSGFPSWLKVSPAVGMISPGQSVEVTLQHGQLRSQDYLSGTSGNSSGADQEKAATLLVTVTGVYSTARRDHKIHVQHQNGRDAFPARGYNFADRFFG

SEQ ID NO: 84871 - protein, 85 aa, Setaria italica
  Transcript Sequence Number=SeqID_18897
  Gene Ontology: Mol. function=protein serine/threonine kinase activity; Biological process=protein amino acid phosphorylation
  Homolog annotation: Hit_ID=Q9LL57; Match level="QueryCoverage=98%, HitCoverage=12%, E-value=4e-29, Identity=73%"; Hit description =Receptor-like kinase
CSATSSVATILVLSVIVAAALYLTLKSKYDEEIHSKVEMFLNTYSASKPTRYTFSEVKKITRRFNNKLGQVGFGSVYKGDLSNGV

SEQ ID NO: 84872 - protein, 211 aa, Setaria italica
  Transcript Sequence Number=SeqID_18898
  Homolog annotation: Hit_ID=B6TMA1; Match level="QueryCoverage=100%, HitCoverage=100%, E-value=4e-71, Identity=67%"; Hit description=SAM domain family protein
  Pfam annotation: Domain name=SAM_1; Domain location=149-211; Score =50.6; E_value=6.1e-12; Accession=PF00536.22; Description=SAM domain (Sterile alpha motif)
  Pfam annotation: Domain name=SAM_2; Domain location=148-210; Score =21.0; E_value=0.005; Accession=PF07647.9; Description=SAM domain (Sterile alpha motif)
  Pfam module annotation: Pfam domain module=SAM_1::SAM_2; Domain location=149-211::148-210
MYSDQISTSRKRSIHERLDGDLPAGAGAGGRARHTASKRQRQIDEKWKHDLYREDDEPASKSIDPRDLRLKLQRRSSQLGFTSTKSSGVRDLREKLSGTMHPQPSNADPPKPKPVSEVVKISRREAADEMPARQSKKASKQTSSKKTSQPKAESPLDIFLSSLGLEKYSITFQAEEVDMAALRHMTDSDLKALGIPMGPRKKIILALESRA

SEQ ID NO: 84873 - protein, 490 aa, Setaria italica
  Transcript Sequence Number=SeqID_18899
  Gene Ontology: Mol. function=hydrolase activity, hydrolyzing O -glycosyl compounds; Biological process=carbohydrate metabolic process
  Homolog annotation: Hit_ID=Q6UY81; Match level="QueryCoverage=81%, HitCoverage=63%, E-value=1e-156, Identity=66%"; Hit description=Exo -beta-glucanase
  Pfam annotation: Domain name=Glyco_hydro_3; Domain location=1-160; Score=20.7; E_value=3.5e-10; Accession=PF00933.13; Description =Glycosyl hydrolase family 3 N terminal domain
  Pfam annotation: Domain name=Glyco_hydro_3_C; Domain location=232 -443; Score=208.2; E_value=2.2e-59; Accession=PF01915.14; Description= Glycosyl hydrolase family 3 C terminal domain
  Pfam module annotation: Pfam domain module=Glyco_hydro_3::Glyco_hydro_ 3_C; Domain location=1-160::232-443
QHPISTLCTSRLKLVLGSKLLLISCSVKEFSVYTSAYGFCRDKVAACAKHFVGDGGTHNGINENNTIIDEHGLLSIHMPPYYDSIIKGVATIMVSYSSLNGVKMHANHDLVTGYLKSKLHFRVSVISDWLGIDRITSPPGENYTYSVQAGINAGIDMVMVPYNYTDYIDDLTSLVHKGIVNMNRIDDAVRRILRVKFTMGLFENPLADLSFADQLGKKEHRELAREAVRKSLVLLKNGNPPNQQFLPLPKKARRILVAGSHASNLGYQCGGWSIQWMGSSGDITTGTTILDAIKSTVADSTPVVYSENPDESFMKHNDFSFAIVVVGEPPYSETVGDSTDLTILDPGPDTIRTVCSAVKCVVVIVSERPVVIEPYVPLMEALVAAWLPGTEGQGVADVLFGDYGFTGKLPRTWFKSVDQLPMNVGDPHYDPLYPFGFGLAINSSLPGFSGVDSLGHAKQRVIYVVLGSLLSLVLINDLSTGLFQHPAALL

SEQ ID NO: 84874 - protein, 298 aa, Setaria italica
  Transcript Sequence Number=SeqID_18900
  Homolog annotation: Hit_ID=UPI0001A7B041; Match level="QueryCoverage =97%, HitCoverage=13%, E-value=6e-31, Identity=32%"; Hit description =EMB2016 (embryo defective 2016)
RNVTLRRLCQPFLYSHSSSNVLEVEAIVTNHLVLRGTYRSLTLVIYGNTAEDLGQFNIELGLDHSLANIVSSPSEGKLEDLPPALYSSKLSFEESLSSLKPFHFQATDVDLSIEAKKVLHLTLKMYQMSAVENLIPNLRSAVISAISKYVTASTNYILRTWNQDLTNAFTKSDSDSQEIDKILTDASNELSEIWKNVHAVADSNDNDFAIGVDEELPTTKILVELFNRCFPYYKNISLLDLQCPSQNKWLVLSLSLVLLLCSSKESCFYFVGSGGMEKIINLLCWKTPKSAATTLLTT

SEQ ID NO: 84875 - protein, 96 aa, Setaria italica
  misc_feature (64)..(64): Xaa can be any naturally occurring amino acid
  Transcript Sequence Number=SeqID_18901
  Gene Ontology: Cellular component=integral to membrane
MMKPGAGEEDVQVLVERPYSHENRRPPDHHPVPRQGQQLIRARPYYRRWSPWLVSAATVAFVVXSLFLVTMYVNDCPKHNSNCAAGFLGRFAFQPL

SEQ ID NO: 84876 - protein, 128 aa, Setaria italica
  Transcript Sequence Number=SeqID_18902
  Gene Ontology: Cellular component=integral to membrane
  Homolog annotation: Hit_ID=Q9SQV0; Match level="QueryCoverage=94%, HitCoverage=43%, E-value=3e-28, Identity=54%"; Hit description =F24P17.3 protein
  Pfam annotation: Domain name=ELO; Domain location=1-128; Score=18.9; E_value=6.3e-10; Accession=PF01151.10; Description=GNS1SUR4 family
FPPGGATEASGPVFFWAHVFYLSKVYELGDTLLILLGRRPLTLLHVYHHAVVIAMCYLWLATRQSLMPIALVTNAGVHVVMYSYYLSCSVGLRWPRRLKRAVTELQIVQFLFSFAASVVMLWLHFAAG

SEQ ID NO: 84877 - protein, 104 aa, Setaria italica
  Transcript Sequence Number=SeqID_18903
  Gene Ontology: Cellular component=integral to membrane
  Homolog annotation: Hit_ID=Q2HTN1; Match level="QueryCoverage=83%, HitCoverage=31%, E-value=1e-24, Identity=66%"; Hit description =GNS1/SUR4 membrane protein
  Pfam annotation: Domain name=ELO; Domain location=1-100; Score=-94.7; E_value=0.004; Accession=PF01151.10; Description=GNS1SUR4 family
MPIALVTNAGVHVVMYSYYLSCSVGLRWPRRLKRAVTELQIVQFLFSFAASVVMLWLHFAAGGCEGMAGWVFNAVFNASLLALFLDFHGVAYKAAKGGSKGKAE

SEQ ID NO: 84878 - protein, 93 aa, Setaria italica
  Transcript Sequence Number=SeqID_18904
SSGICTTGVLERRCRVGRQGGCALMAHAASDLALAGSPSPPGTPASSPAPVCHFNPQAHHCTVATTITQCTGPPLPASHPTITVPAASRSRSR

SEQ ID NO: 84879 - protein, 128 aa, Setaria italica
  Transcript Sequence Number=SeqID_18905
  Subcellular localization annotation: CTP_CleavageSite=61; ConfidenceScore=5.45e-01
KRNPRFPSKSINIVMSALTRATRQPNKTKLLPHRKRKANQNRSSVDDSTPSPFPDYHTAPTAGAGHATGGTSPRGVHGRLRCLGQRGRLQGRAPHPHFQERARRALLRLRPHPGLNRRRHRRRVQRPR

SEQ ID NO: 84880 - protein, 92 aa, Setaria italica
  Transcript Sequence Number=SeqID_18906
  Subcellular localization annotation: CTP_CleavageSite=35; ConfidenceScore=5.66e-01
MQGDGSEARWRTSFRSSTATADRMRARAFSFPLPRASRPAKRIRAFLQLNLRSASRIPATPSPPHPGSPAAPSQIPARRPAAPPRAPPPPPP

SEQ ID NO: 84881 - protein, 78 aa, Setaria italica
  Transcript Sequence Number=SeqID_18907
VVILAIYMKPPNRIIKPELIYFLVSRSLFLISLLLDATAATSTCFTGRKPAAQRPATSHSYPIHSLPHGRDNLVSEPG

SEQ ID NO: 84882 - protein, 204 aa, Setaria italica
  Transcript Sequence Number=SeqID_18908
  Gene Ontology: Mol. function=protein binding; Biological process =apoptosis
  Homolog annotation: Hit_ID=Q2R0F1; Match level="QueryCoverage=91%, HitCoverage=13%, E-value=4e-44, Identity=53%"; Hit description=NB -ARC domain containing protein
KGKNWPTVVHHAKQCFEALIDRQLVMPVDLSAAGKIKSCMVGGQVHEFITKIANKEHILDTRLSQLQARHFSTSSGLRLRASDNINTVVEKLRPKYLHKLWLLKLLDLEGCDRRLNKKHIKDICSTILRLKYLSIRGTDVDDLSSEINNLHELEVLDIRQTKVPERATRGIVLLKLRRLLAGQRVDPSTSQEMGTLPGANKRLP

SEQ ID NO: 84883 - protein, 186 aa, Setaria italica
  Transcript Sequence Number=SeqID_18909
  Gene Ontology: Mol. function=acid phosphatase activity; Cellular component=chloroplast
  Homolog annotation: Hit_ID=B6UE38; Match level="QueryCoverage=88%, HitCoverage=25%, E-value=6e-75, Identity=81%"; Hit description =Hydrolase/ protein serine/threonine phosphatase
AALATAGEAAAGTTLTASPARLSPSDRQIKIRWAGLPSPDGLDYVAIYSPPSSRDRDFLGYLFLNGSASWRDGHGELSLPRLPTLRAPYQFRLFRWPANEYSYHHIDHDRNPLPHAKHRVAVSGDVAVGDPARPEQVHLAFADAVDEMRVMFLCGDAGKRVVRYGLEEEEKNWTEVGTEVRTYEQK

SEQ ID NO: 84884 - protein, 46 aa, Setaria italica
  Transcript Sequence Number=SeqID_18910
HRYCNLKLAPAGPEVPSLRHITPLLDASHIIIKVRWKVKQRSTLHR

SEQ ID NO: 84885 - protein, 90 aa, Setaria italica
  Transcript Sequence Number=SeqID_18911
LHEQEGWHGLNTKLLSNGQLVLLMASSIWMLHSSRLWIAITEPSAGPTGGGAGAGAASAPEDAISVSRVPLVFLTRGVDTLDGRGTTVSN

SEQ ID NO: 84886 - protein, 61 aa, Setaria italica
  misc_feature (51)..(51): Xaa can be any naturally occurring amino acid
  Transcript Sequence Number=SeqID_18912
  Gene Ontology: Mol. function=protein binding; Cellular component =cytoplasm; Biological process=electron transport chain
  Homolog annotation: Hit_ID=B6TVJ4; Match level="QueryCoverage=100%, HitCoverage=42%, E-value=3e-20, Identity=78%"; Hit description =Thioredoxin H-type
  Pfam annotation: Domain name=Thioredoxin; Domain location=1-61; Score= -15.4; E_value=0.0037; Accession=PF00085.12; Description=Thioredoxin
VVIDFTASWCPPCRTIAPIFADMAKKNSNVVFLKVDVDEMKAIAEQFGLVXLLITFLFMKE

SEQ ID NO: 84887 - protein, 162 aa, Setaria italica
  Transcript Sequence Number=SeqID_18913
  Gene Ontology: Mol. function=protein binding; Cellular component =cytoplasm; Biological process=electron transport chain
  Homolog annotation: Hit_ID=B6TVJ4; Match level="QueryCoverage=67%, HitCoverage=78%, E-value=6e-49, Identity=85%"; Hit description =Thioredoxin H-type
  Pfam annotation: Domain name=AhpC-TSA; Domain location=52-143; Score=- 15.8; E_value=0.016; Accession=PF00578.13; Description=AhpCTSA family
  Pfam annotation: Domain name=Thioredoxin; Domain location=55-159; Score=113.2; E_value=8.9e-31; Accession=PF00085.12; Description =Thioredoxin
  Pfam module annotation: Pfam domain module=AhpC-TSA::Thioredoxin; Domain location=52-143::55-159
EENLVGRQYNRVRPVCPPLALETQAVRARQRWRLRVLRRRRRRRRHRWDRRRGSVIAIHSLDEWSIQIEEAISKNKLVVIDFTASWCPPCRTIAPIFADMAKKNSNVVFLKVDVDEMKAIAEQFSVEAMPTFLFMKEGEVKDRVVGAAKDELAVKLELHMAQ

SEQ ID NO: 84888 - protein, 76 aa, Setaria italica
  Transcript Sequence Number=SeqID_18914
ILWCIYFLCFSGWIFHLGILSSQQSTEIFMLVCDGFYSDHFQVLNVILVYVVVCPMFSVSTDNWFPLDTKIVLNLN

SEQ ID NO: 84889 - protein, 182 aa, Setaria italica
  misc_feature (114)..(114): Xaa can be any naturally occurring amino acid
  Transcript Sequence Number=SeqID_18915
  Gene Ontology: Mol. function=zinc ion binding
MPPLPASTTATRFASQWVADALAGDEALDFSVLKALSYAYVQLLAGAPEATRERVALRCLEEVSAVIAAGGDAAATAKVLRADGARTCEDLLLHLIGEVGSSGNLEKDLLVPFXQEIQNIIRIKKPTLPETSFELLKEVDPEITSMAPPSQLKQNGTTQLDNDQSLCSSHDHVNIREKLSSL

SEQ ID NO: 84890 - protein, 43 aa, Setaria italica
  Transcript Sequence Number=SeqID_18916
GVNHAEDTGMRQGASWRADVEELLLRRTGELTVAVIEVEEVEA

SEQ ID NO: 84891 - protein, 52 aa, Setaria italica
  Transcript Sequence Number=SeqID_18917
  Gene Ontology: Mol. function=protein dimerization activity
  Homolog annotation: Hit_ID=Q53QK5; Match level="QueryCoverage=67%, HitCoverage=5%, E-value=2e-10, Identity=80%"; Hit description=O -methyltransferase family protein
HHWSDEDCVKILANCKKAIASREEGGKVLIGDIVLNPALMKMSRQSFKSRCR

SEQ ID NO: 84892 - protein, 148 aa, Setaria italica
  misc_feature (75)..(75): Xaa can be any naturally occurring amino acid
  Transcript Sequence Number=SeqID_18918
  Subcellular localization annotation: CTP_CleavageSite=28; ConfidenceScore=5.37e-01
MASDKSIAASPALVFLAVAALMVAASVRAQAPTPAPTPAPAPTPAPTPAPAPSQPAPTPAPAPTPAPTPAPAPSXQSPCPPGFSNSTAFILGVKQFLRRGILSVGALPCAGHPRHQHHKCLCYYSTNITTNVPPLFGTFPLPPSSGPT

SEQ ID NO: 84893 - protein, 59 aa, Setaria italica
  Transcript Sequence Number=SeqID_18919
ASRTSCMRGKHEAVNQHQRYTPTTTMNTGLLFQLLQDLPTDVLMLQPFTNDPQPQHGPC

SEQ ID NO: 84894 - protein, 42 aa, Setaria italica
  Transcript Sequence Number=SeqID_18920
MMSESLVNVDLGTACGKYYRVCCLSIIDPGDSDIISTTPGTQ

SEQ ID NO: 84895 - protein, 63 aa, Setaria italica
  Transcript Sequence Number=SeqID_18921
  Gene Ontology: Mol. function=structural molecule activity; Cellular component=cytoplasmic vesicle; Biological process=retrograde vesicle- mediated transport, Golgi to ER
  Homolog annotation: Hit_ID=Q9MAX6; Match level="QueryCoverage=87%, HitCoverage=19%, E-value=4e-22, Identity=90%"; Hit description =Coatomer subunit epsilon-1
TIRNKGTTKDPETLANLIVCNLHLGKPSSRFLSQLKLSHPDHVLVKNAASSEANFERALQAVA

SEQ ID NO: 84896 - protein, 101 aa, Setaria italica
  Transcript Sequence Number=SeqID_18922
SLNLFDNKDFDWTISLKLHKKIFKKDEAACFLVLVRSGLWGSHWLKFLQEELGTEYLVQPLGRAEDEEHSSDFEPEENGEAAEDEIDEEDDADDVEDSVKA

SEQ ID NO: 84897 - protein, 181 aa, Setaria italica
  misc_feature (92)..(92): Xaa can be any naturally occurring amino acid
  Transcript Sequence Number=SeqID_18923
  Gene Ontology: Mol. function=transferase activity, transferring groups other than amino-acyl groups; Cellular component=cellular _component; Biological process=flavonoid biosynthetic process
  Homolog annotation: Hit_ID=Q2R2G0; Match level="QueryCoverage=100%, HitCoverage=45%, E-value=8e-63, Identity=64%"; Hit description =Chalcone and stilbene synthases, N-terminal domain containing protein, expressed
  Pfam annotation: Domain name=Chal_sti_synt_N; Domain location=7-181; Score=183.0; E_value=8.6e-52; Accession=PF00195.11; Description =Chalcone and stilbene synthases, N-te
MGSLMAPDASHPIGCPHEGRRATIMGIGTAVPSHEFQQKSFSDYYFEITSSNHMVDLKAKFANICEKTMIEKRHFYMSNEMLRDSPSITAYXSPSLTLRQELADVGVPELGAKAARLAISDWGKQASDITHLVASTSSSGCMPGADCELARLLGLKPSTKRFMLYQTGCHGGCTALGLSKD

SEQ ID NO: 84898 - protein, 150 aa, Setaria italica
  misc_feature (41)..(41): Xaa can be any naturally occurring amino acid
  Transcript Sequence Number=SeqID_18924
  Subcellular localization annotation: CTP_CleavageSite=23; ConfidenceScore=5.19e-01
MASDKSIAASPALVFLAVAALMLAASVRAPAPTPAPAPIPXPAPTPAPAPTPAPTPAPAPSQSPCPPGFSNSTAFILGVKQFLRRGILLLGPFLAPVIPGTSTTKCLCYYSTNITTNVPPLFGTFPLPPIVRPNITGPIACVRGPATINF

SEQ ID NO: 84899 - protein, 168 aa, Setaria italica
  Transcript Sequence Number=SeqID_18925
SLPLRRGLCLHRILNVIGIIFFVNLILGSFTVFFWLEVTRVLFIFSSTKGLDQILSSQFLLLLVFTIDDDDDDEVDGEDEQEEELGTEYLVQPLGRAEDEEHSSDFEPEENGEAADDEEIEEEDDADDGKDSVKAQSSVKRKRSGDDEDDGDDDGDDDDDDGRPPSKR

SEQ ID NO: 84900 - protein, 277 aa, Setaria italica
  misc_feature (14)..(14): Xaa can be any naturally occurring amino acid
  misc_feature (121)..(121): Xaa can be any naturally occurring amino acid
  misc_feature (152)..(152): Xaa can be any naturally occurring amino acid
  Transcript Sequence Number=SeqID_18926
  Gene Ontology: Mol. function=protein dimerization activity; Biological process=RNA-dependent DNA replication
  Homolog annotation: Hit_ID=Q2R6G9; Match level="QueryCoverage=93%, HitCoverage=70%, E-value=9e-84, Identity=56%"; Hit description=O -methyltransferase family protein, expressed
  Pfam annotation: Domain name=Methyltransf_2; Domain location=4-254; Score=178.7; E_value=1.7e-50; Accession=PF00891.10; Description=O -methyltransferase
FDSTEATYSLTPLXSYLLVDGIEADDHINHAPFLLTVTATHYIDLAMGLAHWFKQDAKKPPFDHVHGASLFEESMERKHPEFHKMAMQGLIVHDNFGTNIALRELSDIYQGINSLTDCCYXGDGMTAKAIVKAFPHMKVTVLDLPQEIRKIXPTDGVVNYVGGDMFKSIPRAQVVLLKMVLHHWSDEDCVKILANCKKAIASREEGGKVLIGDIVLDPASEPVMFETHLLMDVCMMLMKGGRQRDLNDWRDIFIKAGFSDFKLVRKFGARGVLEAYP

SEQ ID NO: 84901 - protein, 125 aa, Setaria italica
  Transcript Sequence Number=SeqID_18927
  Gene Ontology: Mol. function=structural constituent of ribosome; Cellular component=intracellular; Biological process=translation
  Homolog annotation: Hit_ID=B6U9H6; Match level="QueryCoverage=84%, HitCoverage=92%, E-value=1e-44, Identity=85%"; Hit description=60S ribosomal protein L30
  Pfam annotation: Domain name=Ribosomal_L7Ae; Domain location=12-106; Score=115.7; E_value=1.5e-31; Accession=PF01248.18; Description =Ribosomal protein L7AeL30eS12eGadd45 family
MAPTKKSKKSTESINNKLQLVMKSGKYTLGYKTVLKTLRNSKGKLIILANNCPPLRKSEIEYYAMLAKVSVHHFHGNNVDLGTACGKYYRVCCLSIIDPGDSDIISTTPWHPVSEEEERALPIPR

SEQ ID NO: 84902 - protein, 159 aa, Setaria italica
  misc_feature (61)..(61): Xaa can be any naturally occurring amino acid
  Transcript Sequence Number=SeqID_18928
  Subcellular localization annotation: CTP_CleavageSite=6; ConfidenceScore=5.20e-01
PLPLRSCSLPWQHSWWPLPCAPTAPTPAPTPAPAPTPAPTPAPAPSQPAPTPAPAPTPAPXTPAPAPSQSPCPPGFSNSTAFILGVKQFLRRGILLLGPFLAPVIPGTSTTKCLCYYSTNITTNVPPLFGTFPPPAPSSGPTSLGPSHACVDRPPLTSN

SEQ ID NO: 84903 - protein, 288 aa, Setaria italica
  Transcript Sequence Number=SeqID_18929
  Gene Ontology: Mol. function=structural molecule activity; Cellular component=cytoplasmic vesicle; Biological process=retrograde vesicle- mediated transport, Golgi to ER
  Homolog annotation: Hit_ID=Q9MAX6; Match level="QueryCoverage=100%, HitCoverage=100%, E-value=1e-145, Identity=91%"; Hit description =Coatomer subunit epsilon-1
  Pfam annotation: Domain name=Coatomer_E; Domain location=3-288; Score= 634.8; E_value=8.2e-188; Accession=PF04733.6; Description=Coatomer epsilon subunit
  Pfam annotation: Domain name=TPR_1; Domain location=202-235; Score =15.0; E_value=0.093; Accession=PF00515.20; Description =Tetratricopeptide repeat
  Pfam annotation: Domain name=TPR_2; Domain location=202-235; Score =17.0; E_value=0.077; Accession=PF07719.9; Description=Tetratricopepti de repeat
  Pfam module annotation: Pfam domain module=Coatomer_E::TPR_1::TPR_2; Domain location=3-288::202-235::202-235
MATPDLLFNLRNLFYLGAYQAAINNSDVPGLDADAAAERDAIVFRSYIALGSYQLVISEIDSSAATSLQAVKLLALYLTGDKEGAISSLKEWLSDSAIGSNPVLRLIAGIIFMHEQDYNEALKHTHSGGTLDLHALNVQIFIKMHRSDYAEKQLKNTMQQIDEDHTLTQLANAWLDIAVGGSKIREAYLIFQDFAEKYPMTGMVLNGKAVCCMHMGSFEEAETLLLEALNKDAKDPETLANLIVCNLHLGKPSSRFLSQLKLSHPDHVLVKNAASSEANFERALQAVA

SEQ ID NO: 84904 - protein, 315 aa, Setaria italica
  Transcript Sequence Number=SeqID_18930
  Gene Ontology: Mol. function=protein dimerization activity; Biological process=RNA-dependent DNA replication
  Homolog annotation: Hit_ID=Q2R6G9; Match level="QueryCoverage=99%, HitCoverage=86%, E-value=1e-104, Identity=57%"; Hit description=O -methyltransferase family protein, expressed
  Pfam annotation: Domain name=Dimerisation; Domain location=15-63; Score=60.4; E_value=7e-15; Accession=PF08100.3; Description =Dimerisation domain
  Pfam annotation: Domain name=Methyltransf_2; Domain location=70-315; Score=158.6; E_value=1.9e-44; Accession=PF00891.10; Description=O -methyltransferase
  Pfam module annotation: Pfam domain module=Dimerisation::Methyltransf_ 2; Domain location=15-63::70-315
QADLWRHSLYYLKSMALKCAVELGIPTAIYRLGGSASIPDLITALSLPVAKQQFLSRLMRLLASSGVFSVVDSTEATYSLTPLSYLLVDGIEADDHINHAPFLLTVTATHYIDLAMGLAHWFKQDAKKPPFDHVHGASLFEESMERKHPEFHKMAMQGLIVHDNFGTNIALRELSDIYQGINSLTDCCYHGDGMTAKAIVKAFPHMKVTVLDLPQEIRKIPTDGVVNYVGGDMFKSIPRAQVVLLKMVLHHWSDEDCVKILANCKKAIASREEGGKVLIGDIVLDPASEPVMFETHLLMDVCMMLMKGGRQRDLN

SEQ ID NO: 84905 - protein, 365 aa, Setaria italica
  misc_feature (165)..(165): Xaa can be any naturally occurring amino acid
  Transcript Sequence Number=SeqID_18931
  Gene Ontology: Mol. function=protein dimerization activity; Biological process=RNA-dependent DNA replication
  Homolog annotation: Hit_ID=Q2R6G9; Match level="QueryCoverage=100%, HitCoverage=100%, E-value=1e-128, Identity=60%"; Hit description=O -methyltransferase family protein, expressed
  Pfam annotation: Domain name=Dimerisation; Domain location=34-82; Score=60.4; E_value=7e-15; Accession=PF08100.3; Description =Dimerisation domain
  Pfam annotation: Domain name=Methyltransf_2; Domain location=89-342; Score=187.3; E_value=4.4e-53; Accession=PF00891.10; Description=O -methyltransferase
  Pfam module annotation: Pfam domain module=Dimerisation::Methyltransf_ 2; Domain location=34-82::89-342
MATQATPIVVPTDAELLQAQADLWRHSLYYLKSMALKCAVELGIPTAIYRLGGSASIPDLITALSLPVAKQQFLSRLMRLLASSGVFSVVDSTEATYSLTPLSYLLVDGIEADDHINHAPFLLTVTATHYIDLAMGLAHWFKQDAKKPPFDHVHGASLFEESMEXRKHPEFHKMAMQGLIVHDNFGTNIALREFSDIFQGINSLTDCCYHGDGMTAKAIAKAFPHMKVTVLDLPQEIRKIPTDGVVNYVGGDMFKSIPRAQVVMLKMVLHHWSDEDCVKILANCKKAIASREEGGKVLIGDIVLDPASEPVMFETQLLMDVCMMLMKGGRQRDLNDWRDIFIKAGFSDFKLVKKFGARGVLEAYP

SEQ ID NO: 84906 - protein, 121 aa, Setaria italica
  Transcript Sequence Number=SeqID_18932
  Gene Ontology: Mol. function=ATP-dependent helicase activity; Cellular component=nucleus; Biological process=mRNA processing
  Homolog annotation: Hit_ID=Q6K4U8; Match level="QueryCoverage=100%, HitCoverage=9%, E-value=9e-65, Identity=99%"; Hit description =Putative RNA helicase
RQGLDSLVITPISQASAKQRAGRAGRTGPGKCYRLYTESAYRNEMSPTTIPEIQRINLGSTVLNMKAMGINDLLSFDFMDPPAPQALISAMEQLYSLGALDEEGLLTKLGRKMAEFPLDPP

SEQ ID NO: 84907 - protein, 75 aa, Setaria italica
  Transcript Sequence Number=SeqID_18933
  Gene Ontology: Mol. function=ATP-dependent helicase activity; Cellular component=nucleus; Biological process=mRNA processing
  Homolog annotation: Hit_ID=B9R8Y0; Match level="QueryCoverage=100%, HitCoverage=6%, E-value=2e-37, Identity=97%"; Hit description=ATP -dependent RNA helicase, putative
RQPDWVIYHELVMTTKEYMREVTVIDPKWLVELAPRFYKGADPTKMSKRKRQERIEPLYDRYHEPNSWRLSKRRA

SEQ ID NO: 84908 - protein, 317 aa, Setaria italica
  misc_feature (58)..(58): Xaa can be any naturally occurring amino acid
  misc_feature (285)..(285): Xaa can be any naturally occurring amino acid
  Transcript Sequence Number=SeqID_18934
  Gene Ontology: Mol. function=ATP-dependent helicase activity; Cellular component=nucleus; Biological process=mRNA processing
  Homolog annotation: Hit_ID=Q6K4U8; Match level="QueryCoverage=100%, HitCoverage=25%, E-value=0.0, Identity=98%"; Hit description =Putative RNA helicase
  Pfam annotation: Domain name=Helicase_C; Domain location=173-267; Score=47.2; E_value=6.2e-11; Accession=PF00271.23; Description =Helicase conserved C-terminal domain
MAEEFGCRLGEEVGYAIRFEDCTGPDTVIKYMTDGMLLREILVDENLSQYSVIMLDEXAHERTIHTDVLFGLLKQLIKRRSDMRLIVTSATLDAEKFSGYFFNCNIFTIPGRTFPVEILYTKQPESDYLDAALITVLQIHLTEPEGDILVFLTGQEEIDHACQCLYERMKGLGKDVPELIILPVYSALPSEMQSKIFDPAPPGKRKVVVATNIAEASLTIDGIYYVVDPGFAKINVYNSKQGLDSLVITPISQASAKQRAGRAGRTGPGKCYRLYTESAYRNEMXPTTIPEIQRINLGSTVLNMKAMGINDLLSFDF

SEQ ID NO: 84909 - protein, 312 aa, Setaria italica
  Transcript Sequence Number=SeqID_18935
  Gene Ontology: Mol. function=ATP-dependent helicase activity; Cellular component=nucleus; Biological process=mRNA processing
  Homolog annotation: Hit_ID=Q6K4U8; Match level="QueryCoverage=99%, HitCoverage=25%, E-value=0.0, Identity=99%"; Hit description =Putative RNA helicase
  Pfam annotation: Domain name=DUF1605; Domain location=174-275; Score =123.0; E_value=9.5e-34; Accession=PF07717.8; Description=Domain of unknown function (DUF1605)
  Pfam annotation: Domain name=HA2; Domain location=50-140; Score =122.4; E_value=1.5e-33; Accession=PF04408.15; Description=Helicase associated domain (HA2)
  Pfam module annotation: Pfam domain module=DUF1605::HA2; Domain location=174-275::50-140
PNRNEMSPTTIPEIQRINLGSTVLNMKAMGINDLLSFDFMDPPAPQALISAMEQLYSLGALDEEGLLTKLGRKMAEFPLDPPLSKMLLASVDLGCSDEILTIIAMIQTGNIFYRPREKQAQADQKRAKFFQPEGDHLTLLAVYEAWKAKNFSGPWCFENFVQSRSLRRAQDVRKQLLTIMDRYKLDVVSAGKNFTKIRKAITAGFFFHAARKDPQEGYRTLVENQPVYIHPSSALFQRQPDWVIYHELVMTTKEYMREVTVIDPKWLVELAPRFYKGADPTKMSKRKRQERIEPLYDRYHEPNSWRLSKRRA

SEQ ID NO: 84910 - protein, 77 aa, Setaria italica
  Transcript Sequence Number=SeqID_18936
  Gene Ontology: Mol. function=triacylglycerol lipase activity; Biological process=lipid metabolic process
  Homolog annotation: Hit_ID=Q6K2K7; Match level="QueryCoverage=90%, HitCoverage=6%, E-value=6e-29, Identity=80%"; Hit description=Lipase class 3-like
LVLFSLCRIYDLCMCANAPIFTGIEQLPQFSHIQELIGLAAADSVELGHIVDPPVIRTATSILPLGWDGLPGGKNAE

SEQ ID NO: 84911 - protein, 126 aa, Setaria italica
  Transcript Sequence Number=SeqID_18937
  Gene Ontology: Mol. function=triacylglycerol lipase activity; Biological process=lipid metabolic process
  Homolog annotation: Hit_ID=Q6K2K7; Match level="QueryCoverage=77%, HitCoverage=9%, E-value=4e-31, Identity=68%"; Hit description=Lipase class 3-like
  Pfam annotation: Domain name=Lipase_3; Domain location=2-112; Score =8.8; E_value=0.00012; Accession=PF01764.17; Description=Lipase (class 3)
KSYRETSKKLRKSKPAVHRGFMARAKGIPALELYNLAKKRNRKLVLCGHSLGGAVAALATLAILRAIASSPSKEDNRLHVKCITFSQPPVGNAALREYVSLDIAIMLHLTEHKIISLLQILLTNPT

SEQ ID NO: 84912 - protein, 442 aa, Setaria italica
  Transcript Sequence Number=SeqID_18938
  Gene Ontology: Mol. function=triacylglycerol lipase activity; Biological process=lipid metabolic process
  Homolog annotation: Hit_ID=Q6K2K7; Match level="QueryCoverage=99%, HitCoverage=42%, E-value=0.0, Identity=73%"; Hit description=Lipase class 3-like
  Pfam annotation: Domain name=Miro; Domain location=144-276; Score= -10.3; E_value=0.1; Accession=PF08477.5; Description=Miro-like protein
LNATSILPLGWDGLPGGNAEPLKVDIIGHGLQLCTHFQAQINGNWYSTVVETLPSATSYSPNEEMQPTLQKMRILVGHPLKQPPNYISEDFLVPLIKGADSTPDFGFESLFEDKDCCKGLSGFLIYGTNDFVTVRKKVYVRTRRVRLLGLEGAGKTSLLKAMLGQVKERNSVVLECIHVDLHGKGISSGLCYIDSTTVNLQELPSEVRRFKEELLLGVHDVSKRTDLVIAVHNLAHRIPQYQQSNTSRPQPALSLLLDEAKALGIPWILAITNKFSVSAHEQNTLISLAMEAYQASPEMTKVVNSTPFLMPSARNSLMPIGSSAGNLGNKDPANRSTYLPVNFVLSPFQRKDIVMHVEGVTALRQLVHQVVLNNEEPAFEELAHERLSLDLAREKAASLQAKQKPPKRDGSVTAAAVGASLGAGLGIVMAVIMGAASALRKP

SEQ ID NO: 84913 - protein, 480 aa, Setaria italica
  misc_feature (416)..(416): Xaa can be any naturally occurring amino acid
  Transcript Sequence Number=SeqID_18939
  Gene Ontology: Mol. function=triacylglycerol lipase activity; Biological process=lipid metabolic process
  Homolog annotation: Hit_ID=Q6K2K7; Match level="QueryCoverage=100%, HitCoverage=46%, E-value=0.0, Identity=78%"; Hit description=Lipase class 3-like
  Pfam annotation: Domain name=Lipase_3; Domain location=33-210; Score =38.4; E_value=2.9e-08; Accession=PF01764.17; Description=Lipase (class 3)
DFGGTIVSLERVQPSLDHVPHRYLLAEAGDTLFATFIGTKDYKDIIADANILQGTMFHEETAQGFAPDVDSAQNDAQKGEENLGKSYRETSKKLRKSKPAVHRGFMARAKGIPALELYNLAKKRNRKLVLCGHSLGGAVAALATLAILRAIASSPSKEDNRLHVKCITFSQPPVGNAALRDYVHTRGWQDYFKSYCILEDLVPRILSPAYFHHYNAQTLEASFINKTDVKSEENMETSAERAKGNNGEQLVLGVGPVQKSLWRLSKLVPLEGVRKSLSVIQKQANVFRKAPSQLDSYLQSKIDESEEEPQSLEIQEGSQGIVLTPLSDKDGEHNEDTNRTEKINASETGRSKRWTRVPSLPSYVPFGELYLLGDSSVNTLSDSEYSKMTSVQSVISELRECLQSHSMKSYRARFQXIYDLCMCANAPIFTGIEQLPQFSHIQELIGLAAADSVELGHIVDPPVIRTATSILPLGWDGLPG

SEQ ID NO: 84914 - protein, 180 aa, Setaria italica
  Transcript Sequence Number=SeqID_18940
  Gene Ontology: Mol. function=protein serine/threonine kinase activity; Biological process=protein amino acid phosphorylation
  Homolog annotation: Hit_ID=Q6Z6V2; Match level="QueryCoverage=42%, HitCoverage=16%, E-value=6e-13, Identity=55%"; Hit description =Protein kinase-like
KAAPIELRVSPKSVLDQAFWEDSDSDTTVSLTPADRVRALAYDVAADWTWSGEHWITVCAHAGIFGNNDDTAASPRFEAGAGSSITGVSEEQIGSGGGGGGGEHMRVDAPRGDASSHGHHQGSSAVHGDADADASSGSGSSSSRCNSVISGSNSDSCCSSSSNFASSGNKCCCSVVKKKN

SEQ ID NO: 84915 - protein, 92 aa, Setaria italica
  Transcript Sequence Number=SeqID_18941
  Gene Ontology: Mol. function=transporter activity; Cellular component= membrane; Biological process=transport
  Homolog annotation: Hit_ID=C4TNX3; Match level="QueryCoverage=96%, HitCoverage=16%, E-value=3e-29, Identity=69%"; Hit description=Metal transporter
MSGADQCSSQPQFMTSVGRSNRSNGPGTPLIESIDVDQIVIPEKNSWKNLFSYIGPGFLVSIAYIDPGNFETDLQAGAQYKYELLWIILVAS

SEQ ID NO: 84916 - protein, 144 aa, Setaria italica
  Transcript Sequence Number=SeqID_18942
  Gene Ontology: Mol. function=calcium ion binding; Cellular component =recycling endosome membrane; Biological process=endosome transport
  Homolog annotation: Hit_ID=B6U193; Match level="QueryCoverage=100%, HitCoverage=26%, E-value=1e-75, Identity=93%"; Hit description=EH -domain-containing protein 1
NETAVGPIGKDLFEREQDDLLCDLKDIPKKACDRQVNEFVKRARAAKIHAYIIGHLKKEMPAMMGKAKAQQRLIDNLEDEFAKVQREYHLPAGDFPDVEHFKQVLGGYNIDKFEKLKPKLVQAVDDMLAYDIPELLKNFKNPYE

SEQ ID NO: 84917 - protein, 118 aa, Setaria italica
  Transcript Sequence Number=SeqID_18943
  Subcellular localization annotation: CTP_CleavageSite=11; ConfidenceScore=5.70e-01
LSRTSRGLGATCQTQSAIHPNPGSSLIPLPRSRRDAPFLHWLSSRRSSVSRSPVAAPRTMPCSLLPAPSPRPCLIASLRRPPHCKAGSCCPGPGGGQGCGLGTCAWPRWARVGSGEVS

SEQ ID NO: 84918 - protein, 149 aa, Setaria italica
  misc_feature (124)..(124): Xaa can be any naturally occurring amino acid
  Transcript Sequence Number=SeqID_18944
  Gene Ontology: Cellular component=cytoplasm
  Homolog annotation: Hit_ID=C5FWM9; Match level="QueryCoverage=83%, HitCoverage=25%, E-value=3e-22, Identity=50%"; Hit description =DUF895 domain membrane protein
  Pfam annotation: Domain name=DUF895; Domain location=46-149; Score= -79.5; E_value=0.072; Accession=PF05978.8; Description=Eukaryotic protein of unknown function (DUF895)
MAVTEVEGPPPPPPPSEVPARRGLLRYNSPLAQVSLLGLICFCCPGMFNALSGLGGGGQVDNTTADNANTALYACFAVFGVLGGAAHNLLGPRVTLLLGAITYPLYAGSFLYYNHHASQAFPVXAGAILGAGAGFLWAAQGAIMTSYPT

SEQ ID NO: 84919 - protein, 361 aa, Setaria italica
  misc_feature (15)..(15): Xaa can be any naturally occurring amino acid
  misc_feature (72)..(72): Xaa can be any naturally occurring amino acid
  misc_feature (220)..(220): Xaa can be any naturally occurring amino acid
  Transcript Sequence Number=SeqID_18945
  Gene Ontology: Mol. function=nucleic acid binding; Biological process= transposition, DNA-mediated
  Homolog annotation: Hit_ID=Q8LMJ1; Match level="QueryCoverage=98%, HitCoverage=53%, E-value=1e-82, Identity=56%"; Hit description =Putative transposon protein
  Pfam annotation: Domain name=MULE; Domain location=127-224; Score =83.1; E_value=9.8e-22; Accession=PF10551.1; Description=MULE transposase domain
  Pfam annotation: Domain name=SWIM; Domain location=291-323; Score =29.4; E_value=1.5e-05; Accession=PF04434.9; Description=SWIM zinc finger
  Pfam module annotation: Pfam domain module=MULE::SWIM; Domain location=127-224::291-323
TKSTSKVQNNCMANXFWVRDRVIQWLRQDPTIGASPLKNKLEEKYLIKLSYWIVYNGRQLALDEILGKREDXRFDYAFAFKAEIERKSPRIIVEIDYEKVGSKMRFSMMFIALKPCIDGFKNGSRPYLGIDSTTLTGRWKGQLASVIGIDGHNWMFLVAYGVFGSETWDNCGWFMSKLAMAIGSLPRLVISTDAGKGIDIAVTKVITNGVEHRECMRHLXIELMDKIRQKIMEKLFQRRSLAMKLNSKVLPHIIRALNAKSRGLVGCSIHEGVVHMAEISGVYKDLTPWGHTVNQEHRTCSCKRWQLIGLPCNHAISLICSYRGLELEDYVNSCYFVSKFKSRYEGWIEPIPDKTQWPQDT

SEQ ID NO: 84920 - protein, 60 aa, Setaria italica
  Transcript Sequence Number=SeqID_18946
  Subcellular localization annotation: CTP_CleavageSite=45; ConfidenceScore=5.20e-01
RIKQGFLRLTSSPPWVYEQQRRLHVRTISTSKITRSSASVLVILLVDMVRTCSFLRLTSS

SEQ ID NO: 84921 - protein, 665 aa, Setaria italica
  Transcript Sequence Number=SeqID_18947
  Gene Ontology: Cellular component=integral to membrane
  Homolog annotation: Hit_ID=UPI0001A84525; Match level="QueryCoverage =98%, HitCoverage=96%, E-value=0.0, Identity=85%"; Hit description =integral membrane single C2 domain protein
  Pfam annotation: Domain name=C2; Domain location=270-351; Score=78.6; E_value=2.2e-20; Accession=PF00168.22; Description=C2 domain
ALWAAGALGIRHSFLFLLAFLYLYMVNARCAMRLRKRIQHEEMKSAYQRRLLSDAESVRWLNHAINKMWPICMEKIVSQLLRPIIPWFLDKFKPWTVSKASVQELYMGRNPPMFTSMRVLPETSDDDHLVLELGMNFLSAEDMSAILAMQLHKSVGLGMTANMHLTSMHVEGKILVGVKFVRSWPFLGRVRLCFVEPPYFQMTVKPLINHGLDVTEFPGISGWLDKLMDTAFGQTLVEPNMIVINVEKFASTPSENNWFSIEERPPIAYVKLEILEGTDMKPSDINGLADPYVKGRLGPFKFQTEIQRKTLSPKWFEEFKIPITSWEASNELVMEVRDKDPMFDDSLGGCTIDLHELRGGQRHDKWISLNNVKKGRIHLAVTVEDISEDKNVSCSDEPLKKADAELPVLTSADSTTDAGELPEEKKVLMDEVEHINIDGQEQPGGLYVHRPGAGVPKTWESRKGRARAPDTQIYQEVDKSKEIPAPKSSGHGGLFNLGSFFRKNSRKESFKGDPSLPTTPGSQSVTELDPKLPKTPHPNLKELGEKRTSIKLVVNEEASPASKVGDTDNSTEDVAKVIQKNAGEPGRSLTSTLSRNISRKREEDRLSDIQEQIEAHGSESVTVSEEHIPVEGEPIEKEGHQTTEHENGDGAEEDSVGAEIATQAS

SEQ ID NO: 84922 - protein, 143 aa, Setaria italica
  Transcript Sequence Number=SeqID_18948
  Gene Ontology: Mol. function=binding; Cellular component =intracellular; Biological process=RNA processing
  Homolog annotation: Hit_ID=Q1EPK1; Match level="QueryCoverage=94%, HitCoverage=26%, E-value=4e-33, Identity=50%"; Hit description=Pre -mRNA processing protein-related
KASSNFTSGFYANINRLANMEKRMGNSKAASKIYETAIEDAMQKQNIELLQDLYSNFAQFIYAASHSIVEAKEVFVKGINRVPCKPLIKGLIQFMSTHGGPTEIPLLDSVISNAVTPGSDVSTALSPEDREDISLLFLEFVDL

SEQ ID NO: 84923 - protein, 124 aa, Setaria italica
  Transcript Sequence Number=SeqID_18949
  Homolog annotation: Hit_ID=UPI0001A7B120; Match level="QueryCoverage =34%, HitCoverage=2%, E-value=7e-10, Identity=55%"; Hit description =DCAF1 (DDB1-CUL4 ASSOCIATED FACTOR 1); nucleotide binding
VQIDRCVLDLATEPNDSLIGVVAMDDHEELFSSARLFEVGRKRITDDDSDPEDAGDTDDEDDDDDDNSDDGVLLEPVLEGESDSDDLSNSSDDGGDDDIPSSDEIRKNRIPRSYNTNRTVEPLD

SEQ ID NO: 84924 - protein, 388 aa, Setaria italica
  Transcript Sequence Number=SeqID_18950
  Gene Ontology: Mol. function=binding; Cellular component=cytoplasm; Biological process=ubiquitin-dependent protein catabolic process
  Homolog annotation: Hit_ID=UPI0001A7B120; Match level="QueryCoverage =71%, HitCoverage=14%, E-value=3e-92, Identity=56%"; Hit description =DCAF1 (DDB1-CUL4 ASSOCIATED FACTOR 1); nucleotide binding
CNTANLLETQTCHQHLVTMMESTYSGGNELILTSSLNEVKIWDAFSVSGGPLHTFEDCKAARFSHSGTSFAALSTDTAQREILLYDAQTYTIFQRLPDNTSNSSSGRGYVQPIIHFSPSDTMLLWNGVLWDTREANPVHQFDQFTDYCGGGFHPAGNEVILNSEVWDLRKFKLLRSVPSLDQTVIKFNGTGDVIYAILRRNLDDVTSSINARRVRHPLFPAFRTIDAVTYSDIATVQIDRCVLDLATEPNDSLIGVVAMDDHEELFSSARLFEVGRKRITDDDSDPEDAGDTDDEDDDDDDNSDDGVLLEPVLEGESDSDDLSNSSDDGGDDDIPSSDEIEDDPEFIDDGDLDGGGGLLDIMGDGEGEDDESDMIGSFSSGDEDGWIL

SEQ ID NO: 84925 - protein, 799 aa, Setaria italica
  misc_feature (24)..(24): Xaa can be any naturally occurring amino acid
  misc_feature (363)..(363): Xaa can be any naturally occurring amino acid
  Transcript Sequence Number=SeqID_18951
  Gene Ontology: Mol. function=nucleic acid binding; Cellular component= chloroplast
  Homolog annotation: Hit_ID=Q1EHT7; Match level="QueryCoverage=100%, HitCoverage=79%, E-value=0.0, Identity=70%"; Hit description=Zinc finger CCCH domain-containing protein 4
  Pfam annotation: Domain name=Helicase_C; Domain location=80-173; Score=39.3; E_value=1.5e-08; Accession=PF00271.23; Description =Helicase conserved C-terminal domain
  Pfam annotation: Domain name=zf-CCCH; Domain location=516-541; Score =24.1; E_value=0.00058; Accession=PF00642.16; Description=Zinc finger C-x8-C-x5-C-x3-H type (and similar)
  Pfam annotation: Domain name=zf-CCCH; Domain location=543-569; Score =20.8; E_value=0.0027; Accession=PF00642.16; Description=Zinc finger C-x8-C-x5-C-x3-H type (and similar)
  Pfam module annotation: Pfam domain module=Helicase_C::zf-CCCH::zf -CCCH; Domain location=80-173::516-541::543-569
RKVLYLEQIADILKINSQSLSTKXCSGLDASADAEINYDVYELIHKLLLHIHQSEPDISKSILVFLPTYYALEQQWIRLLPYSSTFKVHILHRSIDTDEALQTMKISKSCRKVILATNIAESSVTIPGVAYVIDSCRSLQVYWDPIRKTDAAGLVWISKSQAEQRKGRTGRTCDGQIYRLVTGTFYSSLNDHEYPAILRLSLREQVLMVCCAEPRSMNDPSALLQKVLNPPDSDAIEDALESLVQIHALEKTGPGRYQPTFYGCLLNSLPLSFDSSVLTLKFCELGAVHEGILISILLDIQPLPILQPFGYQALCQKYRDNYFKENGSVQIGKKEATTVGNLCAFQFWERVLKDKHRLDYLKXVANTEESEESHTFLAKPEEEWCAIHNLVPAAFKNISEIYDDVMQQLHRFRPSFLVKINPPKHLQPSKFNHTCLHHETLELEEDMNSLSLEAENSHCDLPKRCAATPYVSQTDFGTTIIVEMLKTLVKEIKVQHVEEKKVSYKGPLGPYMKPTLGTEACVFFVNGSCNQGAACRFSHSSFAPKPACKFFLTLQGCRHGNSCPYSHDTGFLISTPITSGICSQEGRATSLCCTRLFPADGDGHILILNDKNLQFTSKLSLYYDACKIVAGTPGLQPVESHSVPKGLKILQNVADPSSLITGRDHKLPVPWTKLKRVFWFADFDNEESASEQALLQKLFENMAIKILSERLSDLKVILIMKNTRYIQLQVERLARECFFSLSESFMFDEATLGWFSDISRHPRGMQVSAPVTYIFNMHPPSVTQFGDYPAELRKALSKN

SEQ ID NO: 84926 - protein, 118 aa, Setaria italica
  Transcript Sequence Number=SeqID_18952
  Subcellular localization annotation: CTP_CleavageSite=44; ConfidenceScore=5.04e-01
GQLSSLLLLPATPAGPEDRRRPTARASFFPHHSPTDPKRVPGAREMERGRERTEARALLSTPNHAPSRFGLRSLAAPPPPPPNRPNLLAPSAPPAGAKAQSFRSESSNLHHDASLFVP

SEQ ID NO: 84927 - protein, 67 aa, Setaria italica
  Transcript Sequence Number=SeqID_18953
  Subcellular localization annotation: CTP_CleavageSite=48; ConfidenceScore=5.37e-01
MPSLAGRLTVPAAALLFLFFAAPASAANFTCATPGATCQSAIGYAVPNATTYAGLAARFNTTTTLAE

SEQ ID NO: 84928 - protein, 210 aa, Setaria italica
  misc_feature (53)..(53): Xaa can be any naturally occurring amino acid
  Transcript Sequence Number=SeqID_18954
  Gene Ontology: Mol. function=ubiquitin-protein ligase activity; Cellular component=nucleus; Biological process=ubiquitin-dependent protein catabolic process
  Homolog annotation: Hit_ID=Q5Z7Y0; Match level="QueryCoverage=99%, HitCoverage=36%, E-value=4e-76, Identity=62%"; Hit description=SIAH1 protein-like
  Pfam annotation: Domain name=Sina; Domain location=13-199; Score= -24.2; E_value=2.6e-05; Accession=PF03145.8; Description=Seven in absentia protein family
NKCHICSYDANFARNIALEKVVESVKSSCSYAKWGCRKLVSYSLRHAHEESCXFAPSICPIPGCGYKGFTGWWSGHFLTNHNTDGSLRFSYGQWFEVSLEMSVPFLVLLAEDDHLFLLVNKNVLPFGHALSVGCLRTGNLNWNFTYEMRAASKANTENNLQLKACVTNIREWQGLHPTEAFLLVPYAFCKSNKLTLNVCIQRSADLRVNM

SEQ ID NO: 84929 - protein, 142 aa, Setaria italica
  misc_feature (24)..(24): Xaa can be any naturally occurring amino acid
  misc_feature (44)..(44): Xaa can be any naturally occurring amino acid
  Transcript Sequence Number=SeqID_18955
  Subcellular localization annotation: CTP_CleavageSite=56; ConfidenceScore=5.16e-01
LLPQLPAPPCLVPSGEAPDRVPPXRFSLRANTGRWHFLGCCRGXRPWLRPPRLVLRQFASWGLLMVWEPLAGRRAVPLPATFYNRSFRGTAAPSSFVRATAASASASTRAHPVSQDPTPDVPRIHRPVFLMQLPITLIILSS

SEQ ID NO: 84930 - protein, 76 aa, Setaria italica
  Transcript Sequence Number=SeqID_18956
QFGSLRGKMFPAYFILISVCSAISVAAFAYLHGFLLSALICNLSNLLVITPMMVEVKYFVRGLELFSTSRFAFARC

SEQ ID NO: 84931 - protein, 328 aa, Setaria italica
  misc_feature (67)..(67): Xaa can be any naturally occurring amino acid
  misc_feature (148)..(148): Xaa can be any naturally occurring amino acid
  Transcript Sequence Number=SeqID_18957
KKAQFIDVNITHVMPYDMRDMECHSLNVSAKVSGVRLGGGMSYTESLLHRFGILGPDGGPGEGLLRXLKDLSSGPLAKLFKSSHLTEEENERSKVDDHSSKFDLGVPDDLDVSVELRNWLFALEGTEEVGDCFTPTRGADRISREEKXCWHSTFRNLHVSGKSSDRLNLGGAGKVSSKRAFPVERFTAGIEGLQAIKPRPKDQHAGKGTSNNHQMSSGFNNASSVGDHGVDVEATMVIGEDEIEGAKWTMDNVKFSVKEPIEAVATKEELEHLAMLCRSEADAMGRITAGILRLLKLDKSLGQGTIEQLRNLGSGGMDNIFSPRRLSR

SEQ ID NO: 84932 - protein, 50 aa, Setaria italica
  Transcript Sequence Number=SeqID_18958
LGLSLPQVENNVLMHWLYFLNKKLNNVFLDSYHNAPSLFFSFWKGTFYSL

SEQ ID NO: 84933 - protein, 134 aa, Setaria italica
  Transcript Sequence Number=SeqID_18959
ELLQLASYLEFAPQLETLKVHMFYYKLSSSCWKGEVTGKGISFMHGLDHLKSVYMSGFRGFWAQVEFLCGILAKGDALEHVTIEPQVKLRCARMVNVFILEWEINEWARRLSERFGKAITVAPPVQEPLLCRRK

SEQ ID NO: 84934 - protein, 158 aa, Setaria italica
  misc_feature (139)..(139): Xaa can be any naturally occurring amino acid
  Transcript Sequence Number=SeqID_18960
  Gene Ontology: Mol. function=chlorophyll binding; Cellular component =chloroplast; Biological process=photosynthesis, light harvesting
  Homolog annotation: Hit_ID=Q41748; Match level="QueryCoverage=81%, HitCoverage=52%, E-value=6e-64, Identity=93%"; Hit description =Chlorophyll a/b-binding apoprotein CP24
  Pfam annotation: Domain name=Chloroa_b-bind; Domain location=44-158; Score=105.1; E_value=2.4e-28; Accession=PF00504.13; Description =Chlorophyll A-B binding protein
  Subcellular localization annotation: CTP_CleavageSite=26; ConfidenceScore=5.12e-01
TARSSTAAASPSTRPSPAAARAPAAAAAAKKSWIPAFKSDAEFINPPWLDGSLPGDFGFDPLGLGKDPAFLKWYREAELIHGRWAMAAVLGIFVGQAWSGIPWFEAGADPGAIAPFSFGSLLGTQLLLMGWVESKRWVXFFNPDSQSVEWATPWSRTA

SEQ ID NO: 84935 - protein, 232 aa, Setaria italica
  misc_feature (77)..(77): Xaa can be any naturally occurring amino acid
  misc_feature (99)..(99): Xaa can be any naturally occurring amino acid
  misc_feature (148)..(148): Xaa can be any naturally occurring amino acid
  misc_feature (169)..(169): Xaa can be any naturally occurring amino acid
  Transcript Sequence Number=SeqID_18961
  Gene Ontology: Mol. function=chlorophyll binding; Cellular component =chloroplast; Biological process=photosynthesis, light harvesting
  Homolog annotation: Hit_ID=Q41748; Match level="QueryCoverage=90%, HitCoverage=82%, E-value=4e-99, Identity=89%"; Hit description =Chlorophyll a/b-binding apoprotein CP24
  Pfam annotation: Domain name=Chloroa_b-bind; Domain location=38-221; Score=213.3; E_value=6.6e-61; Accession=PF00504.13; Description =Chlorophyll A-B binding protein
MPLPSPPPSPAPRRALVVAAAAAKKSWIPAFKSDAEFINPPWLDGSLPGDFGFDPLGLGKDPAFLKWYREAELIHGXRWAMAAVLGIFVGQAWSGIPWXFEAGADPGAIAPFSFGSLLGTQLLLMGWVESKRWVDFFNPDSQSVEWAXPHWSRTAENFANFTGDQGYPXGGKFFDPLGLAGTVKDGVYIPDTEKLERLKLAEIKHARIAMLAMLTFYFEAGQGKTPLGALGL

SEQ ID NO: 84936 - protein, 86 aa, Setaria italica
  Transcript Sequence Number=SeqID_18962
  Subcellular localization annotation: CTP_CleavageSite=33; ConfidenceScore=5.13e-01
GDVWCTPGIPFAAEASSVNCVVAPHQTAGARRRAEAERPRRERPGSPPARRVTMREHMSSSPMNSPPHHGMPFIDADRAPSVRNRI

SEQ ID NO: 84937 - protein, 98 aa, Setaria italica
  Transcript Sequence Number=SeqID_18963
  Subcellular localization annotation: CTP_CleavageSite=26; ConfidenceScore=5.46e-01
RRRLLRSTARRPSSAASAFPGGESVTAATTSASLKGRVARHAGQRQRKPTTGTRESERGPAAKEQELGGSRGAMRQERPSRPGRKKGNPRGEGNRCRA

SEQ ID NO: 84938 - protein, 128 aa, Setaria italica
  Transcript Sequence Number=SeqID_18964
  Gene Ontology: Mol. function=metal ion binding
PRTPHAKPAPAAFDDFVEPSEPRDFAPGAGAWGQPEDLAARVRLRYVRGLQVILQRQLQVLVEQHRVDALVCGVAGTIWLRWVAASRVFDDMWARQVLADHDQRSGSGDNNKPDRRKVEFAFLRSLRT

SEQ ID NO: 84939 - protein, 109 aa, Setaria italica
  Transcript Sequence Number=SeqID_18965
  Homolog annotation: Hit_ID=B6SWP2; Match level="QueryCoverage=83%, HitCoverage=18%, E-value=3e-09, Identity=46%"; Hit description=Rac GTPase activating protein 1
  Subcellular localization annotation: CTP_CleavageSite=19; ConfidenceScore=5.16e-01
MTEVALLRGPTNLASPASRASASSSLRYLANADSDVLPGSGSPEHPAGSTGSRRLQERRGQEAAGGSEEEEEEERWSFLALLFELLRKSLLGCRTVGGGGEGERGGCGM

SEQ ID NO: 84940 - protein, 335 aa, Setaria italica
  misc_feature (14)..(14): Xaa can be any naturally occurring amino acid
  Transcript Sequence Number=SeqID_18966
  Gene Ontology: Mol. function=catalytic activity; Cellular component =chloroplast; Biological process=metabolic process
  Homolog annotation: Hit_ID=B6U0V0; Match level="QueryCoverage=97%, HitCoverage=65%, E-value=1e-138, Identity=74%"; Hit description=Male sterility protein 2
  Pfam annotation: Domain name=Epimerase; Domain location=20-323; Score= -61.7; E_value=0.016; Accession=PF01370.13; Description=NAD dependent epimerasedehydratase family
  Pfam annotation: Domain name=NAD_binding_4; Domain location=22-325; Score=356.1; E_value=6.6e-104; Accession=PF07993.4; Description=Male sterility protein
  Pfam annotation: Domain name=adh_short; Domain location=18-176; Score= -52.6; E_value=0.04; Accession=PF00106.17; Description=short chain dehydrogenase
  Pfam module annotation: Pfam domain module=Epimerase::NAD_binding _4::adh_short; Domain location=20-323::22-325::18-176
MMHDSLDASRIVGXFKGKSILITGSTGFLGKLVVEKILRVQPDANKMYLLVRGTDAASAQQRVQQEVIDTELFGLLREKHSDGFQQLIQEKVVALAGDIIYENLGLEAPMLKELAKEIDAIVNIAATTNFYERYDVSLDVNVMGVKHLCHFAKQCPRLKMFMHVSTAFVCGDREGLILEKPIQPGESLREGTYLDIDAELRLVGEAKKELKTMMNKDDKKTEERKAMKELGLQRARHFGWSNTYVFTKAMGGWLLGQLRGDMPVVIMRPSIITSVRADPARGWMQGTRTIDTLIIGYAEQNLSCFLADLDLVMDVIPGDMVVNAMMAAMVAHSSE

SEQ ID NO: 84941 - protein, 205 aa, Setaria italica
  Transcript Sequence Number=SeqID_18967
  Gene Ontology: Mol. function=catalytic activity; Cellular component =chloroplast; Biological process=metabolic process
  Homolog annotation: Hit_ID=B6U0V0; Match level="QueryCoverage=92%, HitCoverage=37%, E-value=1e-69, Identity=70%"; Hit description=Male sterility protein 2
  Pfam annotation: Domain name=Sterile; Domain location=102-205; Score =52.1; E_value=2.1e-12; Accession=PF03015.11; Description=Male sterility protein
RLTYDRTYEPTYNGTSIPGDMVVNAMMAAMVAHSSEEKGAQAVPVYHATSSLRNPVTYSVLYESGRRHFYENPRVGKNGEIIPTREMRFFTTIARFHLYMMLTFKLPLEILHLVNLLLLETGGFFSRLYNDLNRKYKFVMHLVDVYGPFAFFKGCFDDMNLERLRLMMAMKTPEDQMFNFDPKTIDWDDYFTRIHIPGVLKYLCK

SEQ ID NO: 84942 - protein, 497 aa, Setaria italica
  Transcript Sequence Number=SeqID_18968
  Gene Ontology: Mol. function=catalytic activity; Cellular component =chloroplast; Biological process=metabolic process
  Homolog annotation: Hit_ID=B6U0V0; Match level="QueryCoverage=100%, HitCoverage=100%, E-value=0.0, Identity=80%"; Hit description=Male sterility protein 2
  Pfam annotation: Domain name=Epimerase; Domain location=17-341; Score= -42.8; E_value=0.00062; Accession=PF01370.13; Description=NAD dependent epimerasedehydratase family
  Pfam annotation: Domain name=NAD_binding_4; Domain location=19-324; Score=367.6; E_value=2.3e-107; Accession=PF07993.4; Description=Male sterility protein
  Pfam annotation: Domain name=Polysacc_synt_2; Domain location=17-287; Score=-196.4; E_value=0.099; Accession=PF02719.7; Description =Polysaccharide biosynthesis protein
  Pfam annotation: Domain name=Sterile; Domain location=397-497; Score =58.3; E_value=2.9e-14; Accession=PF03015.11; Description=Male sterility protein
  Pfam annotation: Domain name=adh_short; Domain location=15-178; Score= -54.8; E_value=0.055; Accession=PF00106.17; Description=short chain dehydrogenase
  Pfam module annotation: Pfam domain module=Epimerase::NAD_binding _4::Polysacc_synt_2::Sterile::adh_short; Domain location=17-341::19 -324::17-287::397-497::15-178
MTMDAASIIGYFNGKSILITGATGFLGKILVEKILRVQPQVHKIYLLVRGIDEPTARQRVQQEVIDTELFGLLREKHGKGFQQFVEEKVVALAGDIIHHNLGQEAPMLEALSKEIDVIVNIAATTNFYERYDVSLDVNVMGVKHLCQFAKQCARLKMFMQVSTAFVSGFSEGLILEKPIKPGESLREGTHLDIDTELRLVREVKKQLTMNDGAASDDKKAEERKAMKELGLQRARHFGWSNTYVFTKAMGEVLLGHLRGDIPVVIMRPSIITSVRADPVPGWMQGTRTIDTIIIGYAKQNLSCFLADLDLVMDVIPGDMVVNAMMAAMVAHSEEKGALVVYHSTSSLRNPAKYNVLYQSGRRHFYENPRVGKDGKAIPTREMYFFPTIARFHLYMIFTYKIPLEILHLVNLLLCGFFSRLYNDLNRKYKFVMHLVDVYGPFAFFKGCFDDMNLERLRLMMAMKTPEDQMFNFDPKTIDWDDYFTRIHIPGVLKYLCK

SEQ ID NO: 84943 - protein, 266 aa, Setaria italica
  Transcript Sequence Number=SeqID_18969
  Gene Ontology: Mol. function=protein methyltransferase activity; Cellular component=cytoplasm; Biological process=protein amino acid methylation
  Homolog annotation: Hit_ID=Q55DL2; Match level="QueryCoverage=83%, HitCoverage=61%, E-value=2e-34, Identity=40%"; Hit description =UPF0558 protein
  Pfam annotation: Domain name=Methyltransf_16; Domain location=43-239; Score=-25.2; E_value=1.4e-05; Accession=PF10294.1; Description =Putative methyltransferase
PPAIEVQLSEESPVAADRLEPVVVDDSLSIYKGRVSTSDVFGVKDSDLVPGKYEGGLKLWEGSLDLVKALNSDIKEGRLLLEGKRVLELGCGHGLPGIFAGLKGAGLIHFQDFNAEVLKCLTIPNVKVNLFKESPEETCTSRSVGFFAGDWSEMDKLLLTGDAKQDKTNSGDTEDKTYNGYDIILMAETVYALSSLPNLYRLIKKCLHYPGGVVYMAGKKHYFGVGGGTRQFLRLIEEDGTMQTERLNDVADGSSNVREVWKFSFK

SEQ ID NO: 84944 - protein, 76 aa, Setaria italica
  Transcript Sequence Number=SeqID_18970
  Gene Ontology: Mol. function=hydrolase activity, acting on acid anhydrides, catalyzing transmembrane movement of substances; Cellular component=proton-transporting ATP synthase complex, catalytic core F(1); Biological ...
  Gene Ontology: Cellular component=process=ATP synthesis coupled proton transport
  Homolog annotation: Hit_ID=P0C2Z6; Match level="QueryCoverage=100%, HitCoverage=14%, E-value=2e-33, Identity=93%"; Hit description=ATP synthase subunit alpha, chloroplastic
EEQVATIYTGTRGYLDSLEIEQVKKFLDELRKHLKDTKPQFQEIISSSKTFTEQAETLLKEAIQEQLERFSLQEQT

SEQ ID NO: 84945 - protein, 162 aa, Setaria italica
  Transcript Sequence Number=SeqID_18971
  Gene Ontology: Mol. function=serine-type endopeptidase activity; Biological process=proteolysis
  Homolog annotation: Hit_ID=B9RNE4; Match level="QueryCoverage=96%, HitCoverage=16%, E-value=4e-61, Identity=67%"; Hit description =Dipeptidyl-peptidase, putative
QMRSTKEMLKDLHEEELFDYYATSQIVLVTLDGTVKMIALPAIYISLDPSPDGKYLILTSVHRPYSSIVSYKRFPKKVELWTVEGRFVREVCDLPLAEDIPVAANSVRKGKRLIRWRPDMPSTLFWVEAQDGGDANIEVSPRDIVYMEHAEPLDGEKPQVFV

SEQ ID NO: 84946 - protein, 67 aa, Setaria italica
  Transcript Sequence Number=SeqID_18972
  Homolog annotation: Hit_ID=B2MUU4; Match level="QueryCoverage=53%, HitCoverage=5%, E-value=6e-13, Identity=80%"; Hit description=Starch synthase V
YDNIHCFGLCLIHLDYWKQSYHVHCIRVAQIRYTSINMDGIHGLRKAEAEYESYFGDIWHKNRIWTG

SEQ ID NO: 84947 - protein, 112 aa, Setaria italica
  Transcript Sequence Number=SeqID_18973
  Gene Ontology: Mol. function=transporter activity; Cellular component= integral to membrane; Biological process=transport
  Homolog annotation: Hit_ID=B2MUU4; Match level="QueryCoverage=78%, HitCoverage=12%, E-value=2e-33, Identity=77%"; Hit description =Starch synthase V
SDLREKVVNNRSIIQSTFSEIHHKANTELLSELRLFLRKPIEKSLHVVHICSELDPISSCGSLSTYVAGVSCAVQGKGNLVEVILPKYAISLPLPNPWYNNTAAGLLDQLDT

SEQ ID NO: 84948 - protein, 105 aa, Setaria italica
  misc_feature (101)..(101): Xaa can be any naturally occurring amino acid
  Transcript Sequence Number=SeqID_18974
  Gene Ontology: Mol. function=transporter activity; Cellular component= integral to membrane; Biological process=transport
  Homolog annotation: Hit_ID=B2MUU4; Match level="QueryCoverage=76%, HitCoverage=11%, E-value=4e-32, Identity=76%"; Hit description =Starch synthase V
SSNLFNLNLRYHVCRCYISSYVQCGKSLDVVHICSELDPISSCGSLSTYVASVSCAVQGKGNLVEVILPKYTSINMDGIHGLRKAEAEYESYFGGIWHKNXIWTG

SEQ ID NO: 84949 - protein, 270 aa, Setaria italica
  misc_feature (17)..(17): Xaa can be any naturally occurring amino acid
  misc_feature (38)..(38): Xaa can be any naturally occurring amino acid
  Transcript Sequence Number=SeqID_18975
  Homolog annotation: Hit_ID=B2MUU4; Match level="QueryCoverage=75%, HitCoverage=28%, E-value=3e-61, Identity=64%"; Hit description =Starch synthase V
  Subcellular localization annotation: CTP_CleavageSite=9; ConfidenceScore=5.60e-01
METTRLVVGAAMRAQTXPPPAPQFRRRRRLPHPRGGAXHCPLFARAARPTLLTRCSYSRKGNGNPRGTPRRESSSTVRLDVEESSDQGTDLASEQRKGDIMELFSQAQRNILSLNKQRLLAMEELKKLQDENKSLLQEIEVLETEVQGVPLEAVQSSTFCELLLRIDTMVVSGMISMHEASDLREKVVNNRSIIQSTFSEIHHKLHMGIFWHPATHLSELEDARQNGNLLHSSIICEVARESSSAPALASIRPPRPGCLGRRRLADALPP

SEQ ID NO: 84950 - protein, 55 aa, Setaria italica
  Transcript Sequence Number=SeqID_18976
  Subcellular localization annotation: CTP_CleavageSite=27; ConfidenceScore=5.08e-01
GRIPSQAGYPGGQDTNKQPRGPASVPRQRAAQDARGTFGESKAADSTISSESFPN

SEQ ID NO: 84951 - protein, 334 aa, Setaria italica
  Transcript Sequence Number=SeqID_18977
  Homolog annotation: Hit_ID=B6TBE4; Match level="QueryCoverage=87%, HitCoverage=71%, E-value=3e-83, Identity=53%"; Hit description=F-box domain containing protein
YHEDADPGWTIVDCHGGCLLLLNSDTGQIAAYNPLTWALHLHPTPPDEISKGRRGKFNRLDFFLLLSDETPGSFRVICLCHDKSRVRAVVYSSGTREWQILPWSVAAPAQPSGKKHWLLKGRLANGNLYWAHAREAYMVVLDTATLQFSFMDLSDFMKGQGHLYAIGETRDGKLCMVFTLGFILFILFRRVDTDGVEKWVIHDGFPLQEEILRATEGTRDDDDELKLMVWAVMGSIVYLSPFICGDPHLPCWFLSFCLETRKLEKLFHRTFDNSFFPYIMAWPPSLVGRGFCQLWNNKLRRKRETRTGTLCVCFVYMDVVLFDFLIISVYQGIF

SEQ ID NO: 84952 - protein, 116 aa, Setaria italica
  Transcript Sequence Number=SeqID_18978
  Gene Ontology: Mol. function=amine oxidase activity; Biological process=cellular amine metabolic process
  Homolog annotation: Hit_ID=Q7XKT9; Match level="QueryCoverage=100%, HitCoverage=16%, E-value=6e-61, Identity=93%"; Hit description =OSJNBa0022H21.18 protein
  Pfam annotation: Domain name=Cu_amine_oxidN3; Domain location=1-103; Score=151.0; E_value=3.6e-42; Accession=PF02728.8; Description =Copper amine oxidase, N3 domain
MDAMEYAECEATVKSYPPFIEAMKIRGIDDMDLVMVDAWCAGYYSDADAPNRRIGKPLIFCRTESDSPMENGYARPVEGIHVVVDMQNNVVIEFEDRKLVPLPPPDHLRNYTPGET

SEQ ID NO: 84953 - protein, 182 aa, Setaria italica
  Transcript Sequence Number=SeqID_18979
  Gene Ontology: Mol. function=kinase activity; Cellular component =plastoglobule; Biological process=protein amino acid phosphorylation
  Homolog annotation: Hit_ID=B6TN02; Match level="QueryCoverage=92%, HitCoverage=30%, E-value=1e-91, Identity=97%"; Hit description =Ubiquinone biosynthesis protein ubiB
GYLLFSIVLLGILYRQAKAPFVYQHCSTKRVLTMERLYGVPLTDLDSIRSLVPDPELTLVTALNVWFGSLISCESFHADVHAGNLWLLRDGRIGFIDFGIVGRISPRTWAAMEVFLASFTAEDYDAMASALSEMGATGNDINIDEFAKDLRKIFSSIQDLDTEIIVATARGPDATAVSANVV

SEQ ID NO: 84954 - protein, 150 aa, Setaria italica
  misc_feature (32)..(32): Xaa can be any naturally occurring amino acid
  misc_feature (46)..(46): Xaa can be any naturally occurring amino acid
  Transcript Sequence Number=SeqID_18980
  Gene Ontology: Mol. function=kinase activity; Cellular component =plastoglobule; Biological process=protein amino acid phosphorylation
  Homolog annotation: Hit_ID=B6TN02; Match level="QueryCoverage=82%, HitCoverage=22%, E-value=7e-61, Identity=95%"; Hit description =Ubiquinone biosynthesis protein ubiB
FFFFFYFFFFYFFLFFYFFIFCFLCLSEMGAXTGNDINIDEFAKDXRKIFSSIQDLDTEIIVATARGPDATAVSANVVLDERQMNALFLDLVRVSESYGLKFPREFALLMKQLLYFDRYTRLLAPSMNMLRDERINISTDRQPRRTDRFQ

SEQ ID NO: 84955 - protein, 391 aa, Setaria italica
  Transcript Sequence Number=SeqID_18981
  Gene Ontology: Mol. function=kinase activity; Cellular component =plastoglobule; Biological process=protein amino acid phosphorylation
  Homolog annotation: Hit_ID=B6TN02; Match level="QueryCoverage=82%, HitCoverage=58%, E-value=1e-173, Identity=92%"; Hit description =Ubiquinone biosynthesis protein ubiB
  Pfam annotation: Domain name=ABC1; Domain location=198-321; Score =125.9; E_value=1.3e-34; Accession=PF03109.8; Description=ABC1 family
  Subcellular localization annotation: CTP_CleavageSite=58; ConfidenceScore=5.37e-01
MAAAARCASAARSPLLIHQHRRVPKVPSGGGGSLRVGGAGIGAGRGREGRRRAQVGVRVFARYSQAQDLSTRLQDRVGELPKLVEDLLQTSISTGPRGAFRMAQGIQAVLGVGGEWLNDLSKTANASAGIPAQMQLGLLSPLYLRRLFERMGATYIKLGQFIASAPTLFPAEYVEEFQNCFDRAPAVPYDVIESILREELQQPLDSVYEYIDHVPIASASIAQVHGARLKSSQKDVVIKVLKPGIEDTLVADLNFIYVVARILEFLNPELQRTSLVGIVKDIKESMLEEVDFRKEAANIQAFQGYIDAMGFDRQAKAPFVYQHCSTKRVLTMERLYGVPLTDLDSIRSLVPDPELTLVTALNVWFGSLISCESFHADVHAGNLWLSVINFH

SEQ ID NO: 84956 - protein, 232 aa, Setaria italica
  Transcript Sequence Number=SeqID_18982
  Gene Ontology: Mol. function=nucleic acid binding; Cellular component= ribonucleoprotein complex; Biological process=nuclear mRNA splicing, via spliceosome
  Homolog annotation: Hit_ID=Q41499; Match level="QueryCoverage=100%, HitCoverage=99%, E-value=2e-75, Identity=62%"; Hit description =Spliceosomal protein
  Pfam annotation: Domain name=RRM_1; Domain location=12-83; Score =27.9; E_value=4.1e-05; Accession=PF00076.14; Description=RNA recognition motif. (a.k.a. RRM, RBD, o
  Pfam annotation: Domain name=RRM_1; Domain location=160-226; Score =34.9; E_value=3.1e-07; Accession=PF00076.14; Description=RNA recognition motif. (a.k.a. RRM, RBD, o
  Pfam module annotation: Pfam domain module=RRM_1::RRM_1; Domain location=12-83::160-226
MLSGDIPPNQTIYLNNLNEKVKKEELKRSLYALCSQYGRILDVVALKTQKLRGQAWVVFSEITAATNAFRGLQDFDFYGKKMRVQYAKTKSDCIAKEDGTYAPKEKRKKQEEKAAEKKRRAEEAQQSGPNASAAQSNGTGYQASRLGKVSQEQLPPNNILFIQNLPDQTTSMMLQILFQQYPGFREVRMIEAKPGIAFVEFEDDSQSNVAMLALQGFKITPENPMAISYAKK

SEQ ID NO: 84957 - protein, 80 aa, Setaria italica
  Transcript Sequence Number=SeqID_18983
RGQGTMVMAAEGSRNRHPHMRTPAKKQPRQKMPPQENNQALRQTGDPPWHKHEPETRLNYEGWTEVLPLRLYICIWRMSI

SEQ ID NO: 84958 - protein, 470 aa, Setaria italica
  Transcript Sequence Number=SeqID_18984
  Gene Ontology: Mol. function=protein binding; Cellular component =nucleus; Biological process=ubiquitin-dependent protein catabolic process
  Homolog annotation: Hit_ID=B6SST4; Match level="QueryCoverage=100%, HitCoverage=80%, E-value=0.0, Identity=65%"; Hit description=EIN3 -binding F-box protein 1
  Pfam annotation: Domain name=LRR_1; Domain location=176-199; Score =0.9; E_value=2.1e+02; Accession=PF00560.25; Description=Leucine Rich Repeat
  Pfam annotation: Domain name=LRR_1; Domain location=282-304; Score =3.0; E_value=82; Accession=PF00560.25; Description=Leucine Rich Repeat
  Pfam annotation: Domain name=LRR_1; Domain location=335-358; Score =4.8; E_value=37; Accession=PF00560.25; Description=Leucine Rich Repeat
  Pfam annotation: Domain name=LRR_1; Domain location=362-385; Score =4.2; E_value=48; Accession=PF00560.25; Description=Leucine Rich Repeat
  Pfam annotation: Domain name=LRR_1; Domain location=388-410; Score =6.2; E_value=20; Accession=PF00560.25; Description=Leucine Rich Repeat
  Pfam annotation: Domain name=LRR_1; Domain location=414-437; Score =7.5; E_value=11; Accession=PF00560.25; Description=Leucine Rich Repeat
  Pfam annotation: Domain name=LRR_1; Domain location=44-68; Score=3.4; E_value=69; Accession=PF00560.25; Description=Leucine Rich Repeat
  Pfam annotation: Domain name=LRR_1; Domain location=440-462; Score =4.4; E_value=43; Accession=PF00560.25; Description=Leucine Rich Repeat
  Pfam module annotation: Pfam domain module=LRR_1::LRR_1::LRR_1::LRR _1::LRR_1::LRR_1::LRR_1::LRR_1; Domain location=176-199::282-304::335- 358::362-385::388-410::414-437::44-68::440-462
ARGVTDAGVSALARGCPALRSLSLWDVPQVTDAGLAEIAAECHALERLDITGCPLVTDKALIAVAQGCPELKSLTIEACSGVANEGLKAIGRSCTKLQAVNIKNCAHVDDQGVSGLVCSATASLAKVRLQGLSITDASLAVIGYYGKAITDLTLARLPAVGERGFWVMANAMGLQKLRCMTVTSCPGLTDLALASVAKFSPSLKLVNLKKCSKVSDGCLKEFAESARVLENLQIEECNKVTLMGILAFLLNCSPKFKALSLVKCIGIKDICSAPAQLPVCKSLRSLTIKDCPGFTDASLAMVGMICPQLENVNLSGLGAVTDNGFLPLIKSSESGLVNVDLNGCENLTDAAVSALVKAHGASLAHLSLEGCSRITDASLFAISESCSQLAELDLSNCMVSDYGVAVLAAAKQLKLRILSLSGCMKVTQKSVPFLGSMSSSLEGLNLQFNFIGNHNIASLEKQLWRCDILA

SEQ ID NO: 84959 - protein, 42 aa, Setaria italica
  Transcript Sequence Number=SeqID_18985
PSRSSSPPYPTLTSTSSPESLPTISYADFYQLAGVVAGDLNG

SEQ ID NO: 84960 - protein, 253 aa, Setaria italica
  misc_feature (42)..(42): Xaa can be any naturally occurring amino acid
  misc_feature (54)..(54): Xaa can be any naturally occurring amino acid
  misc_feature (153)..(153): Xaa can be any naturally occurring amino acid
  Transcript Sequence Number=SeqID_18986
  Gene Ontology: Mol. function=peroxidase activity; Cellular component =cytoplasm; Biological process=hydrogen peroxide catabolic process
  Homolog annotation: Hit_ID=Q945R5; Match level="QueryCoverage=99%, HitCoverage=97%, E-value=1e-106, Identity=77%"; Hit description =Ascorbate peroxidase
  Pfam annotation: Domain name=peroxidase; Domain location=19-230; Score=194.0; E_value=4.2e-55; Accession=PF00141.15; Description =Peroxidase
MVKAYPTVSEDYLKAIDKAKRKLRGLIAEKNCAPLMLRLAWXSAGTFDVGTKTXGGPFGTMKDPAELAHGANAGLDIAVRLLEPIKEQFPTISYADFYQLAGVVAVEVTGGPDVPFPPQGRQDKPEPPPEGRLPDATQGSDHLRQVFSTQIGXLSDQDIVALSGGHTLGRCHKDRSGFEGAWTSNPLIFDNSYFKELLSGEKEGLLQLPSDKALLSDPSFRPLVEKYAADEDAFFADYAEAHLKLSELGFAEA

SEQ ID NO: 84961 - protein, 102 aa, Setaria italica
  Transcript Sequence Number=SeqID_18987
  Subcellular localization annotation: CTP_CleavageSite=49; ConfidenceScore=5.49e-01
SDGVLLNFYMPRSLTRSFTAPRPSRTPSISGGRTPSVASECNKRERDPDAETVKCWSLLWDRRWRKSSRRDPGAPPGESAIHVASAAILKAAKHSAASPGKV

SEQ ID NO: 84962 - protein, 89 aa, Setaria italica
  misc_feature (81)..(81): Xaa can be any naturally occurring amino acid
  Transcript Sequence Number=SeqID_18988
  Gene Ontology: Mol. function=molecular_function; Cellular component =nucleus; Biological process=DNA recombination
  Homolog annotation: Hit_ID=B6TAH2; Match level="QueryCoverage=98%, HitCoverage=38%, E-value=7e-42, Identity=95%"; Hit description =Pairing protein meu13-like
  Pfam annotation: Domain name=TBPIP; Domain location=7-89; Score=-1.7; E_value=1.1e-05; Accession=PF07106.5; Description=Tat binding protein 1(TBP-1)-interacting pro
MPPKSDSVEGIVLGFVNEQNRPLNSQNVADALQKFNLKKTAVQKALDALADSGQVSFKEYGKQKIYIARQDQFDIPNGEEXLEEMKKAK

SEQ ID NO: 84963 - protein, 70 aa, Setaria italica
  Transcript Sequence Number=SeqID_18989
  Subcellular localization annotation: CTP_CleavageSite=52; ConfidenceScore=5.58e-01
PPPSNLPAPNPPADPTPPTAVPPPPPRHHRPPRKPGTQPAPPPSGIPVEPSPASPAPTSGDPLIPTPTTP

SEQ ID NO: 84964 - protein, 42 aa, Setaria italica
  Transcript Sequence Number=SeqID_18990
QLHVKAFLPVNTYYWPCSFMSTSASHDTAAEMQMGLLCIALV

SEQ ID NO: 84965 - protein, 106 aa, Setaria italica
  misc_feature (42)..(42): Xaa can be any naturally occurring amino acid
  Transcript Sequence Number=SeqID_18991
  Gene Ontology: Mol. function=nucleic acid binding; Cellular component= mRNA cap binding complex; Biological process=positive regulation of RNA export from nucleus
  Homolog annotation: Hit_ID=B6TL33; Match level="QueryCoverage=93%, HitCoverage=37%, E-value=3e-35, Identity=77%"; Hit description =Nuclear cap-binding protein subunit 2
TPRTEQAYELFSRAGEIKKIIMGLDKNSKTPCGFCFVLCVPXPLIWYYSREDAEDAVKYISGTMLDDRPIRVDFDWGFEEGRQWGRGRSGGQVRDEYRTDYDPDIL

SEQ ID NO: 84966 - protein, 242 aa, Setaria italica
  Transcript Sequence Number=SeqID_18992
  Gene Ontology: Mol. function=nucleic acid binding; Cellular component= mRNA cap binding complex; Biological process=positive regulation of RNA export from nucleus
  Homolog annotation: Hit_ID=B6TL33; Match level="QueryCoverage=92%, HitCoverage=92%, E-value=1e-109, Identity=87%"; Hit description =Nuclear cap-binding protein subunit 2
  Pfam annotation: Domain name=RRM_1; Domain location=36-106; Score =56.4; E_value=1.1e-13; Accession=PF00076.14; Description=RNA recognition motif. (a.k.a. RRM, RBD, o
MASLFKDPSKLSAYRDRRFNGTQEEYEAALQASTTVYIGNMSFYTTEEQAYELFSRAGEIKKIIMGLDKNSKTPCGFCFVLYYSREDAEDAVKYISGTMLDDRPIRVDFDWGFEEGRQWGRGRSGGQVRDEYRTDYDPGRGGYGKMVQKELEAQRELVDYGGAFQPNAPPPYERGERKRGYGDSYRNDRGDYQRKRNRNDDRSAPEGSRRAPDSDPAEKNPRFREKGDSDEEDDDYDKRRRR

SEQ ID NO: 84967 - protein, 306 aa, Setaria italica
  Transcript Sequence Number=SeqID_18993
  Homolog annotation: Hit_ID=Q2HSF0; Match level="QueryCoverage=100%, HitCoverage=57%, E-value=1e-102, Identity=43%"; Hit description =Tetratricopeptide-like helical
  Pfam annotation: Domain name=PPR; Domain location=186-220; Score =49.5; E_value=1.3e-11; Accession=PF01535.12; Description=PPR repeat
  Pfam annotation: Domain name=PPR; Domain location=221-255; Score =27.9; E_value=4.3e-05; Accession=PF01535.12; Description=PPR repeat
  Pfam annotation: Domain name=PPR; Domain location=256-289; Score =15.1; E_value=0.15; Accession=PF01535.12; Description=PPR repeat
  Pfam annotation: Domain name=PPR; Domain location=82-116; Score=29.1; E_value=1.8e-05; Accession=PF01535.12; Description=PPR repeat
  Pfam module annotation: Pfam domain module=PPR::PPR::PPR::PPR; Domain location=186-220::221-255::256-289::82-116
MGRLGVPVDSYSYAHGLKACIAGSASHAPASARVREMHAHAIRRGYGLHTHVATTLIDCYAKLGIVTYAERVFAWMPERNVVSWSAMIGCYAKNERPGDAIELFQEMIASDADLVPNSITIVSVLHACAVVNALGQGKVLHAYILRRGFDSLVSVLNALMAMYMKCGCLQIGRYIFDWIGRRRDVVSWNSLISGYGMHGFGRESLQVFEEMIKEGISPSIITFVSVLGACSHAGFVEEGKKLFESMVEYNVTPRAEHYACMVDLLGRAGRLDEAVELIQSMRIGPSPQVWGSLLGACRIHGHVEYA

SEQ ID NO: 84968 - protein, 192 aa, Setaria italica
  Transcript Sequence Number=SeqID_18994
  Gene Ontology: Mol. function=ATPase activity, coupled to transmembrane movement of substances; Cellular component=integral to membrane; Biological process=transport
  Homolog annotation: Hit_ID=Q9SDM5; Match level="QueryCoverage=96%, HitCoverage=61%, E-value=1e-67, Identity=69%"; Hit description=P -glycoprotein
  Pfam annotation: Domain name=ABC_tran; Domain location=1-108; Score =34.2; E_value=1e-08; Accession=PF00005.19; Description=ABC transporter
MEEINHAAKLSEAITFINHLPGRYETQVGERGIQLSGGQKQRIAISRAILKNPSVLLLDEATSALDAESEKSVQEALDRVMVGRTTVVIAHRLSTIRNADTIAVVDGGRIVETGTHEQLMANPCSAYSSLIQLQEAAQIQQKPSLSDSASITRPLSFKYSRELSGRTSTGASFRSDKDSISRYGAGEAHDEA

SEQ ID NO: 84969 - protein, 95 aa, Setaria italica
  misc_feature (68)..(68): Xaa can be any naturally occurring amino acid
  Transcript Sequence Number=SeqID_18995
  Gene Ontology: Biological process=steroid metabolic process
  Homolog annotation: Hit_ID=Q9AV10; Match level="QueryCoverage=90%, HitCoverage=11%, E-value=1e-21, Identity=62%"; Hit description =Oxysterol-binding protein, expressed
MLTIPTSVFSSEYSNTESSDDAGKQEISELSDGDEFHFYDTRQSFSDFATSPDLTEGLNNGNEDHKSXVESLTADNANEYLLSYSKRRTKLPESV

SEQ ID NO: 84970 - protein, 632 aa, Setaria italica
  Transcript Sequence Number=SeqID_18996
  Gene Ontology: Biological process=steroid metabolic process
  Homolog annotation: Hit_ID=Q9AV10; Match level="QueryCoverage=100%, HitCoverage=84%, E-value=0.0, Identity=84%"; Hit description =Oxysterol-binding protein, expressed
  Pfam annotation: Domain name=Oxysterol_BP; Domain location=205-602; Score=271.9; E_value=1.4e-78; Accession=PF01237.10; Description =Oxysterol-binding protein
GFVHLKISSFSESKSDDKRFYIITPTKTLQLRTGCAKDRATWIEALVTARSEYSLNGDLSGDQNDTSFSTEKLRNRLHTEGVGEAIIKDCEQIVHSEFSQYQTQMKQRCEEYLSFIGSLPREVEVVNSVDTTVTEKPQLELFKHDCSSSGKCSEYSNTESSDDAGKQEISELSDGDEFHFYDTRQSFSDFATSPDLTRKGLNNGNEDHKSVESLTADNANEYLLSYSKRRTKLPEPVEKEKGVSLWSMIKDNVGKDLTRVCLPVYFNEPLSSLQKCFEELEYSYLLDRAYECGLRGNGLMRILYVAAFAVSGYASTDSRPCKPFNPLLGETYEADYPEKGIRFFSEKVSHHPMVMACHCEGKGWKFWGDSNLKSKFWGQSIQVDPDGVLTLEFDDGETFQWSKVTTTINNLILGRLYCHHHGTMNISGNRQYSCKLTFKEQSFLDRNPRQVQGVVKDADGTKVATLTGKWDESVHCVISDDASKVKSHGSHHSAGATLLWKKNEPSANPTRYNLSSFAITLNELTPELKEKLPPTDSRLRPDQRHLENGEHEKANGEKLRLETRQRMARKMQESGWKPRWFQRDSEDGTFRYVGGYWEAREQRKWDGCNDIFGNLSSSPKLQSSTLYASSSI

SEQ ID NO: 84971 - protein, 57 aa, Setaria italica
  Transcript Sequence Number=SeqID_18997
IRSNAQAPRLVDENSISNDGTNVYHQYYMLHFIETICRKGGDFYKEVILFMWYIMHL

SEQ ID NO: 84972 - protein, 96 aa, Setaria italica
  Transcript Sequence Number=SeqID_18998
  Gene Ontology: Mol. function=protein serine/threonine kinase activity; Cellular component=plasma membrane; Biological process=two- component signal transduction system (phosphorelay)
  Homolog annotation: Hit_ID=B6SS20; Match level="QueryCoverage=90%, HitCoverage=9%, E-value=2e-39, Identity=90%"; Hit description =Phototropin-1
HNILHKDLTFPSSIPVSLAAKQLIHGLLQRDPSSRLGSSAGANDIKQHPFFEEIYWSLIRCMEPPALDVPLKLTRKEPELKVKPEGDSLTPSIETF

SEQ ID NO: 84973 - protein, 81 aa, Setaria italica
  Transcript Sequence Number=SeqID_18999
  Gene Ontology: Mol. function=protein binding
  Homolog annotation: Hit_ID=A2CIR7; Match level="QueryCoverage=65%, HitCoverage=10%, E-value=6e-23, Identity=96%"; Hit description =Ankyrin-repeat protein
MEDTLKSLSMDYLNLLINGQAFSDVTFNVEGRLVHAHRCILAARSLFFRKFFCGGAAADQAAAAAAPPGALLLDHLSPRSP

SEQ ID NO: 84974 - protein, 54 aa, Setaria italica
  Transcript Sequence Number=SeqID_19000
LMLSIALYIKHVIVPAAYSSCSLLKKHFAPSNDVNTCVVLFQWGLVPIPLLVKH

SEQ ID NO: 84975 - protein, 60 aa, Setaria italica
  Transcript Sequence Number=SeqID_19001
  Homolog annotation: Hit_ID=B4F922; Match level="QueryCoverage=93%, HitCoverage=12%, E-value=4e-11, Identity=64%"; Hit description =Acyltransferase
MAAENGSSSSADETSTVTVTGTRTVAPAKSRCALATFDLPYITFYYNQKLLLYRAAAAGP

SEQ ID NO: 84976 - protein, 160 aa, Setaria italica
  Transcript Sequence Number=SeqID_19002
  Gene Ontology: Mol. function=DNA binding; Cellular component=nucleus; Biological process=regulation of transcription
  Homolog annotation: Hit_ID=Q2AAT5; Match level="QueryCoverage=100%, HitCoverage=56%, E-value=1e-41, Identity=59%"; Hit description=Myb -related protein
  Pfam annotation: Domain name=Myb_DNA-binding; Domain location=1-44; Score=35.2; E_value=2.5e-07; Accession=PF00249.23; Description=Myb -like DNA-binding domain
SFSQQEEDLIVALHEILGNRWSQIASHLPGRTDNEIKNFWNSCLKKKLRQRGIDPSTHKPIASAEAGTALPDAGDHDHKPAVAESDGLATKQPAVFDPFPVADFAFDLGAAGVAALYGAPYDDVGGKASPDDAAGFVADYSSVLDVSENLGYGESSSNSS

SEQ ID NO: 84977 - protein, 327 aa, Setaria italica
  Transcript Sequence Number=SeqID_19003
  Gene Ontology: Mol. function=DNA binding; Cellular component=nucleus; Biological process=regulation of transcription
  Homolog annotation: Hit_ID=B6TL40; Match level="QueryCoverage=100%, HitCoverage=100%, E-value=5e-65, Identity=46%"; Hit description=Myb -related protein Hv33
  Pfam annotation: Domain name=Myb_DNA-binding; Domain location=14-61; Score=49.6; E_value=1.2e-11; Accession=PF00249.23; Description=Myb -like DNA-binding domain
  Pfam annotation: Domain name=Myb_DNA-binding; Domain location=67-112; Score=43.7; E_value=7.2e-10; Accession=PF00249.23; Description=Myb -like DNA-binding domain
  Pfam module annotation: Pfam domain module=Myb_DNA-binding::Myb_DNA -binding; Domain location=14-61::67-112
MGREAAATRPKLRRGLWSPEEDEKLYNHIIRYGVGCWSSVPKLAGLERCGKSCRLRWINYLRPDLKRGSFSQQEEDLIISLHKMLGNRWSQIASQLPGRTDNEIKNFWNSCIKKKLRQRGIDPATHKPLDDDDASAAANNAAEAPRDDCNQLPAATDDHCFAMGGARSDPIAPHSPTVSFDPLSVTNVPAMQGSYGAAHSFRSADNLCDYGGVDVASDAATYSAYTGGGADSSSNSNGTWTCGGNVVGGGEPMPHMDMFGRDAAEAAYHQFDPAKYSPWQQHEAARLHDGVGGAASFPIRSMSRDLPDSCFDLARSALEDEFSVDFL

SEQ ID NO: 84978 - protein, 309 aa, Setaria italica
  Transcript Sequence Number=SeqID_19004
  Gene Ontology: Mol. function=DNA binding; Cellular component=nucleus; Biological process=regulation of transcription
  Homolog annotation: Hit_ID=B6TL40; Match level="QueryCoverage=100%, HitCoverage=100%, E-value=1e-121, Identity=75%"; Hit description=Myb- related protein Hv33
  Pfam annotation: Domain name=Myb_DNA-binding; Domain location=18-65; Score=48.6; E_value=2.4e-11; Accession=PF00249.23; Description=Myb -like DNA-binding domain
  Pfam annotation: Domain name=Myb_DNA-binding; Domain location=71-116; Score=40.2; E_value=8.1e-09; Accession=PF00249.23; Description=Myb -like DNA-binding domain
  Pfam module annotation: Pfam domain module=Myb_DNA-binding::Myb_DNA -binding; Domain location=18-65::71-116
MGRHAGSAAAGVQHKLRKGLWSPEEDEKLYNHIIRYGVGCWSSVPKLAGLQRCGKSCRLRWINYLRPDLKRGSFSQQEEDAIVGLHEILGNRWSQIASHLPGRTDNEIKNFWNSCLKKKLRQRGIDPSTHKPISANAAATAAALDQQPASQEQKPPADADSGFALKRQHQQVFDPFPLTDSFGGGFDAAGAALYGHLGGGKQDAGGFVDYSSVLDVSENLGYGESSSNSSNWNCAPEASNALDGGDAPLHWASESKAVEPFAGYGGGEEQSLEHKFMLPCHGQQEQSLPHFDFDISRGAVVGEFNLEFF

SEQ ID NO: 84979 - protein, 274 aa, Setaria italica
  Transcript Sequence Number=SeqID_19005
  Gene Ontology: Cellular component=extracellular region; Biological process=sexual reproduction
  Homolog annotation: Hit_ID=Q94KS8; Match level="QueryCoverage=100%, HitCoverage=100%, E-value=1e-133, Identity=83%"; Hit description =Beta-expansin 1a
  Pfam annotation: Domain name=DPBB_1; Domain location=85-166; Score =127.7; E_value=3.6e-35; Accession=PF03330.10; Description=Rare lipoprotein A (RlpA)-like double
  Pfam annotation: Domain name=Pollen_allerg_1; Domain location=178 -259; Score=124.9; E_value=2.6e-34; Accession=PF01357.13; Description= Pollen allergen
  Pfam module annotation: Pfam domain module=DPBB_1::Pollen_allerg_1; Domain location=85-166::178-259
MAAGLSFKAVALAALLSVLVAYGARAQQQPSNATESQDRSLLSYSGGWLPAKATWYGAPTGAGPDDNGGACGFKHTNQYPFSSMTSCGNEPIFKDGKGCGSCYQIRCLKSNHPACSGAPQTVVITDMNYYPVAKYHFDLSGTAFGAMANPGLNDKLRHAGIIDMQFRRVPCNFPGLTINFVVQHGSNPMYLAVLVEFEDKDGDVVQVDIMQHNSGYWEPMHESWGSIWRIDPNRPLQGPYSLRITNESGRQLVAKNVIPANYIPDTNYRSYVQY

SEQ ID NO: 84980 - protein, 64 aa, Setaria italica
  Transcript Sequence Number=SeqID_19006
  Gene Ontology: Mol. function=alpha-mannosidase activity; Cellular component=plasma membrane; Biological process=carbohydrate metabolic process
  Homolog annotation: Hit_ID=Q2R3E0; Match level="QueryCoverage=93%, HitCoverage=5%, E-value=6e-26, Identity=91%"; Hit description =Glycosyl hydrolases family 38 protein, expressed
LINFKIEANFEQKYKYYIGQDGNASDPQASGAYIFRPNGTVPIKTDGQVPLTVLRGPILDEVHH

SEQ ID NO: 84981 - protein, 102 aa, Setaria italica
  misc_feature (57)..(57): Xaa can be any naturally occurring amino acid
  misc_feature (92)..(92): Xaa can be any naturally occurring amino acid
  Transcript Sequence Number=SeqID_19007
  Gene Ontology: Mol. function=alpha-mannosidase activity; Cellular component=plasma membrane; Biological process=carbohydrate metabolic process
  Homolog annotation: Hit_ID=Q2R3E0; Match level="QueryCoverage=96%, HitCoverage=9%, E-value=3e-45, Identity=89%"; Hit description =Glycosyl hydrolases family 38 protein, expressed
LINFKIEANFEQKYKYYIGQDGNGSDPQASGAYIFRPNGTVPIKTDGQVPLTVLRGXYLDEVHHQINSWIYQITRVYKGKDYVETEFIVGPXIPIDDGNGKK

SEQ ID NO: 84982 - protein, 26 aa, Setaria italica
  Transcript Sequence Number=SeqID_19008
TQITRVYKGKDYVETEFIVGPIPIDD

SEQ ID NO: 84983 - protein, 202 aa, Setaria italica
  misc_feature (78)..(78): Xaa can be any naturally occurring amino acid
  Transcript Sequence Number=SeqID_19009
  Gene Ontology: Mol. function=alpha-mannosidase activity; Cellular component=plasma membrane; Biological process=carbohydrate metabolic process
  Homolog annotation: Hit_ID=Q2R3E0; Match level="QueryCoverage=99%, HitCoverage=19%, E-value=1e-107, Identity=90%"; Hit description =Glycosyl hydrolases family 38 protein, expressed
  Pfam annotation: Domain name=Glyco_hydro_38; Domain location=1-186; Score=38.9; E_value=2.6e-12; Accession=PF01074.14; Description =Glycosyl hydrolases family 38
WQIDPFGHSAVQAYLLGAEVGFDAFYFFRIDYQDRDTRKGTKELEVVWRGSKSFGSSADIFAGIFPKNYEPPPGGFYXEVNDDSPVVQDDPLLFDYNVEERVNDFVAAALAQANITRTNHIMFTMGTDFKYQYAESWFRNMDKLIHYVNKHGLINALYSTPSIYTDAKYAANEQWPLKTNDFFPYADNPNAYWTGYFTSRPV

SEQ ID NO: 84984 - protein, 1018 aa, Setaria italica
  Transcript Sequence Number=SeqID_19010
  Gene Ontology: Mol. function=alpha-mannosidase activity; Cellular component=plasma membrane; Biological process=carbohydrate metabolic process
  Homolog annotation: Hit_ID=Q2R3E0; Match level="QueryCoverage=98%, HitCoverage=97%, E-value=0.0, Identity=86%"; Hit description =Glycosyl hydrolases family 38 protein, expressed
  Pfam annotation: Domain name=Alpha-mann_mid; Domain location=358-432; Score=103.6; E_value=6.7e-28; Accession=PF09261.3; Description=Alpha mannosidase, middle domain
  Pfam annotation: Domain name=Glyco_hydro_38; Domain location=39-353; Score=472.4; E_value=6.6e-139; Accession=PF01074.14; Description =Glycosyl hydrolases family 38
  Pfam annotation: Domain name=Glyco_hydro_38C; Domain location=490 -1005; Score=475.2; E_value=9.2e-140; Accession=PF07748.5; Description=Glycosyl hydrolases family 38 C-termi
  Pfam module annotation: Pfam domain module=Alpha-mann_mid::Glyco _hydro_38::Glyco_hydro_38C; Domain location=358-432::39-353::490-1005
MGPVRLALLLAAAVALAAVGEAVYIPYNTSAGVVAGKLNVHVVPHTHDDVGWLKTVDQYYVGSNNSIQGACVQNVLDSLIPALLKDENRKFVYVEQAFFQRWWRNQNDMIKDTVKGLISSGRLELINGGMCMHDEATVHYIDMIDQTTLGHKFVKEEFGQIPRIGWQIDPFGHSAVQAYLLGAEVGFDAFYFFRIDYQDRDTRKGTKELEVVWRGSKSFGSSADIFAGIFPKNYEPPPGGFYFEVNDDSPVVQDDPLLFDYNVEERVNDFVAAALAQANITRTNHIMFTMGTDFKYQYAESWFRNKDKLIHYVKFSTHGLINALYSTPSIYTDAKYAANEQWPLKTNDFFPYADNPNAYWTGYFTSRPALKRYVRMMSGYYLAARQLEFFKGKSKSGPTTDYLGDALALAQHHDAVTGTEKQHVANDYAKRLSIGYTQAQELVSTSLACLTESGSKSRCSTPTTKFSQCLLLNVTFCPPSEMDFSEGKSLVVLVYNSLGWKREDVLRVPVFSDSIVVHDSEGKEIESQLLPIASASQNIRDQHVKAYLGTTPGAKPKFWLAFPVSVPPLGFNTYFVSSTKKSASVSSKSTLYSSQGSKDNLQVGQGNLKLQYNAAGALSLYSDRKTLIEANFEQKYKYYIGQDGNGSDPQASGAYIFRPNGTVPIKTDGQVPLTVLRGPILDEVHHQINSWIYQITRVYKGKDYVETEFIVGPIPIDDGNGKEIATEIVTNMATNKTFYTDSSGRDFIKRIRDYRSEWKIEVHQPIAGNYYPVNLGIYVEDGSKELSVLVDRSVGGSSIKDGQIELMLHRRLLHDDGRGVAEALNETVCVDKQCEGLIIEGKYYLKIDPQGEGARWRRTFGQEIYSPLLLAFSEQDGGNWANSHVPKFSAMDPTYSLPDNVALLTLQELEDGTVLLRFAHLYEAGEHKDLSALASVNLKRVFPDKKIGKIIETSLSANQERAAMEKKRLKWKVQGPPADKVVRGGPVDPSKLVVELGPMEIRTFIVSFDRSISGKQLL

SEQ ID NO: 84985 - protein, 140 aa, Setaria italica
  Transcript Sequence Number=SeqID_19011
  Gene Ontology: Mol. function=nucleoside-triphosphatase activity; Cellular component=membrane; Biological process=proteolysis
  Homolog annotation: Hit_ID=A3BXL8; Match level="QueryCoverage=90%, HitCoverage=8%, E-value=1e-60, Identity=91%"; Hit description=PDR20
MFQFCNDIVILLRFRRNKTLIKELSTPPEGSSDLSFPTEYSQTFITQCFACLWKQSMSYWRNPPYTAVKYFYTTVIALLFGTMFWGVGRKRDNQQDLFNAMGSMYASVIFMGVQNSGSVQPVVSVERTVFYRERAAHMYS

SEQ ID NO: 84986 - protein, 53 aa, Setaria italica
  Transcript Sequence Number=SeqID_19012
MEHITHLPSENHEATQMEIYSNLSMEITRMLNSTLHPPYTLLLLATRCMLQVH

SEQ ID NO: 84987 - protein, 61 aa, Setaria italica
  Transcript Sequence Number=SeqID_19013
MAMLYYSYNDMHSSSFCNSALLTTAAYTKLKHDKCKPHFRYHLIACLYSFLARTLLTEFKT

SEQ ID NO: 84988 - protein, 94 aa, Setaria italica
  misc_feature (22)..(22): Xaa can be any naturally occurring amino acid
  Transcript Sequence Number=SeqID_19014
  Gene Ontology: Mol. function=hydrolase activity; Biological process =metabolic process
  Homolog annotation: Hit_ID=B6UC04; Match level="QueryCoverage=96%, HitCoverage=24%, E-value=2e-14, Identity=56%"; Hit description =Gibberellin receptor GID1L2
PAAYDDAWTALAWVLENARHGXEPWLAKHGDASRLFLAGDSAGGNIAHNLAMRAGQQVGSGGGAAGAAIRGVALLDPYFLGRYVSPGAERAWWF

SEQ ID NO: 84989 - protein, 270 aa, Setaria italica
  Transcript Sequence Number=SeqID_19015
  Gene Ontology: Mol. function=hydrolase activity; Cellular component =cytoplasm; Biological process=nuclear-transcribed mRNA catabolic process, nonsense-mediated decay
  Homolog annotation: Hit_ID=B9SS25; Match level="QueryCoverage=97%, HitCoverage=20%, E-value=1e-135, Identity=89%"; Hit description =Nonsense-mediated mRNA decay protein, putative
  Pfam annotation: Domain name=ResIII; Domain location=24-163; Score= -12.2; E_value=0.00057; Accession=PF04851.7; Description=Type III restriction enzyme, res subunit
FGYYEVEHQIIRNTLPRRFGAPGLPELNASQVLAVKSVLQKPVSLIQGPPGTGKTVTSAAIVYHMAKQGQGQVLVCAPSNVAVDQLAEKISSTGLKVVRLCAKSREAVSSPVEHLTLHYQVKHLDTSEKSELHKLQQLKDEQGELSSSDEKKYKSLKRATEREILQSADVICCTCVGAGDPRLSNFRFRQVLIDESTQATEPECLIPLVLGVKQVVLVGDHCQLGPVIMCKKAARAGLAQSLFERLVILGVKPFRLQVQYRMHPCLLLVN

SEQ ID NO: 84990 - protein, 222 aa, Setaria italica
  Transcript Sequence Number=SeqID_19016
  Gene Ontology: Mol. function=hydrolase activity; Cellular component =cytoplasm; Biological process=nuclear-transcribed mRNA catabolic process, nonsense-mediated decay
  Homolog annotation: Hit_ID=B9SS25; Match level="QueryCoverage=98%, HitCoverage=17%, E-value=1e-110, Identity=88%"; Hit description =Nonsense-mediated mRNA decay protein, putative
  Pfam annotation: Domain name=ResIII; Domain location=120-209; Score= -21.3; E_value=0.0033; Accession=PF04851.7; Description=Type III restriction enzyme, res subunit
LKEDNELRLVPGDELRLRYPGDSSHPTWQSVGHVIKLTAQEEVALELRASQGVPTELSVGFSVDFVWKSTSFDRMQGAMKTFAVDETSVSGYIYHHLLGHEVEHQIIRNTLPRRFGAPGLPELNASQVLAVKSVLQKPVSLIQGPPGTGKTVTSAAIVYHMAKQGQGQVLVCAPSNVAVDQLAEKISSTGLKVVRLCAKSREAVSSPVVYSLLTFLILFLRF

SEQ ID NO: 84991 - protein, 289 aa, Setaria italica
  Transcript Sequence Number=SeqID_19017
  Gene Ontology: Mol. function=hydrolase activity; Cellular component =cytoplasm; Biological process=nuclear-transcribed mRNA catabolic process, nonsense-mediated decay
  Homolog annotation: Hit_ID=B9SS25; Match level="QueryCoverage=97%, HitCoverage=22%, E-value=1e-162, Identity=92%"; Hit description =Nonsense-mediated mRNA decay protein, putative
  Pfam annotation: Domain name=UPF1_Zn_bind; Domain location=1-146; Score=371.3; E_value=1.8e-108; Accession=PF09416.2; Description=RNA helicase (UPF2 interacting domain)
HNPACVARCNVPSCRKWFCNSRGNTSGSHIVNHLVRAKHKEVCLHKDSPLGETILECYNCGCRNVFLLGFISAKSENVVVLLCREPCLSVNALKDMNWDLSQWCPLIDDRCFLSWLVKVPSEQEQLRARQISAQQINKVEELWKTNPDASLEDLEKPGVDDEPQSVVLKYEDAYQYQNVFAPLIKLEADYDKMMKESQSKDNVTVRWDIGLNKKRVAYFVFPKEDNELRLVPGDELRLRYPGDSSHPTWQSVGHVIKLTAQEEVALELRASQGVPTELSVGFSVVKLKK

SEQ ID NO: 84992 - protein, 603 aa, Setaria italica
  Transcript Sequence Number=SeqID_19018
  Gene Ontology: Mol. function=hydrolase activity; Cellular component =cytoplasm; Biological process=nuclear-transcribed mRNA catabolic process, nonsense-mediated decay
  Homolog annotation: Hit_ID=B9SS25; Match level="QueryCoverage=95%, HitCoverage=45%, E-value=0.0, Identity=77%"; Hit description =Nonsense-mediated mRNA decay protein, putative
  Pfam annotation: Domain name=DUF2081; Domain location=65-296; Score= -111.7; E_value=0.022; Accession=PF09854.1; Description =Uncharacterized conserved protein (DU
IGISVNYSIVLRLIVDRYYLSWLVVVLVGDHCQLGPVIMCKKAARAGLAQSLFERLVILGVKPFRLQVQYRMHPCLSEFPSNCFYEGTLQNGVTVNERQSSGIDFPWPVPNRPMFFYVQMGQEEISASGTSYLNRTEAANVEKIVTTFLRSGVVPSQIGVITPYEGQRAYIVNYMSRNGSLRQQLYKEIEVASVDSFQGREKDYIILSCVRSNEHQGIGFLNDPRRLNVALTRARYGIVILGNPKVLSKQLLWNSLLTHYKEHECLVEGPLNNLKQSMVQFQKPKKIYNERRLFLGGGQGVMQGANFGAGASPAGDKRSGRGKGQSFVPYGPPNGVHKPGVHPAGYAVPRMPFPPFPGAPHSQPYAIPTRGLHGPIGAVPPVPQPGSRNFGAPRSNTGGPIGGHLAHQQNSQQAMGGMGSNFNYAGLENPSSQPSGGAQMSQTGLMTQMPVQGLSQTFRDGFSIGGMSQDFFGDDFKSQGSHVPYNIADFSTQASQGGGYGVEFTQAPQSGYTGNYMNQNAHPGYSHIGTTNDIVSQDHMAHGSHGMFTQAGYNDPSQDESSQMHYGMASAGPLQSQSMMNPLYSQSYAHYNTQPQSLQPPPQ

SEQ ID NO: 84993 - protein, 105 aa, Setaria italica
  Transcript Sequence Number=SeqID_19019
  Gene Ontology: Mol. function=protein serine/threonine kinase activity; Cellular component=integral to membrane; Biological process=protein amino acid phosphorylation
  Homolog annotation: Hit_ID=C0LGJ1; Match level="QueryCoverage=98%, HitCoverage=9%, E-value=5e-20, Identity=43%"; Hit description =Leucine-rich repeat receptor-like protein kinase (Fragment)
  Pfam annotation: Domain name=LRR_1; Domain location=14-37; Score=1.3; E_value=1.7e+02; Accession=PF00560.25; Description=Leucine Rich Repeat
  Pfam annotation: Domain name=LRR_1; Domain location=39-61; Score =16.5; E_value=0.11; Accession=PF00560.25; Description=Leucine Rich Repeat
  Pfam annotation: Domain name=LRR_1; Domain location=63-85; Score =15.3; E_value=0.26; Accession=PF00560.25; Description=Leucine Rich Repeat
  Pfam module annotation: Pfam domain module=LRR_1::LRR_1::LRR_1; Domain location=14-37::39-61::63-85
SNNFTGELWPGITRFRQFNAAENNLTGSVPPATFPVGCKLESLDLSANKLTGSFPDSIAKCGNLTYLSLWGNGFNGVIPAGLGNLTVIETIILGKNSFDRRIPPE

SEQ ID NO: 84994 - protein, 76 aa, Setaria italica
  Transcript Sequence Number=SeqID_19020
SLHPEEPPQQPVDKHEAQPHSSHYDELAASTADPNFVSTVNDNNMPSDYMDDDLLFPARQARSECPLDLENQMEET

SEQ ID NO: 84995 - protein, 77 aa, Setaria italica
  Transcript Sequence Number=SeqID_19021
CCKIHQDHLRISQHKYASSIGWQLRPQLCIEVLMHCASVNVGIIFVASNLYIHKLSNVVQCHTGSEVNVRIRDLSMA

SEQ ID NO: 84996 - protein, 55 aa, Setaria italica
  Transcript Sequence Number=SeqID_19022
MVMMRGRQQLLLLLFVLCATGLRIASADTNPQDAAALRSLMKKWKNVPASWGKYN

SEQ ID NO: 84997 - protein, 81 aa, Setaria italica
  Transcript Sequence Number=SeqID_19023
IPHNLHHWLITRFQKQAPYKTNPHANLAYKHKIYTTICSQYKPYITKAACIAPHPKVKEKCGLKIRKLSAQRSPGYGSNGS

SEQ ID NO: 84998 - protein, 268 aa, Setaria italica
  misc_feature (16)..(16): Xaa can be any naturally occurring amino acid
  Transcript Sequence Number=SeqID_19024
  Gene Ontology: Mol. function=protein serine/threonine kinase activity; Cellular component=apoplast; Biological process=protein amino acid phosphorylation
  Homolog annotation: Hit_ID=B9RTY0; Match level="QueryCoverage=89%, HitCoverage=39%, E-value=4e-37, Identity=41%"; Hit description =Mitogen activated protein kinase kinase kinase 3, mapkkk3, mekk3, putative
ELPTNTSKIKPLWEGXCDDDDMCEFADKDDYPAVGSSYNPMSEPFDNWESKFDMSLEQNSHQSMEFSGLAKHPESSITENDFTFPVEGSCEDDDVLTESKIKAFLEEKALDLKKLQTPLYEEFYNTANAGSCQEADQTSKGKIPVSPKLPPRRKSPPSKTRGGASPTCDNLNNTSPESCSKQFPKSNVVKSSRILREIASPQLNEFGDKVNLDAQDSPSISFAERQRKWKEELDQELERERVMRLAGCGKTPSPSRGPNVKRERHADH

SEQ ID NO: 84999 - protein, 418 aa, Setaria italica
  Transcript Sequence Number=SeqID_19025
  Gene Ontology: Mol. function=hydrolase activity, hydrolyzing O -glycosyl compounds; Cellular component=anchored to membrane; Biological process=carbohydrate metabolic process
  Homolog annotation: Hit_ID=B6TW83; Match level="QueryCoverage=93%, HitCoverage=79%, E-value=0.0, Identity=91%"; Hit description=Glucan endo-1,3-beta-glucosidase 6
  Pfam annotation: Domain name=Glyco_hydro_17; Domain location=1-277; Score=182.0; E_value=1.6e-51; Accession=PF00332.10; Description =Glycosyl hydrolases family 17
  Pfam annotation: Domain name=X8; Domain location=297-381; Score =139.2; E_value=1.3e-38; Accession=PF07983.5; Description=X8 domain
  Pfam module annotation: Pfam domain module=Glyco_hydro_17::X8; Domain location=1-277::297-381
LQVVEGSVMVGIPNDMLLTMATNMKAAEKWVDTNVSSYLNDGVSVRYVAVGNEPFLETYNGSFLQTTYPAIKNIQSALIKAGLGNQVKVTCPLNADVYASPTSKPSDGDFRTDIHDLMIAIVKLLSDNGGAFTVNIYPFISLYIDPNFPVDYAFFEGASTPIVDGSITYTNMFDANHDTLIWSLKKNGFGNLPVIVGEIGWPTDGDRNANAQMAQRFNQGFMTHIASGRGTPMRPGPVDAYLFSLIDEDEKSIQPGNFERHWGIFTYDGQPKYQLNLGTANSGGLVRARGVKYLEKKWCVLKPSVSLTEPRLADNVAYACSMADCTSLGYKTSCGMLDVRGNISYAFNNYYQKNDQDDVACGFQNLATTTGQDPSTGTCRFGIMIEVDSAFSWRLQRLGSNFLLMLLLVLLQLCLSFL

SEQ ID NO: 85000 - protein, 109 aa, Setaria italica
  Transcript Sequence Number=SeqID_19026
  Gene Ontology: Mol. function=DNA binding; Cellular component=nucleus; Biological process=regulation of transcription
  Homolog annotation: Hit_ID=Q5NKH8; Match level="QueryCoverage=37%, HitCoverage=8%, E-value=1e-09, Identity=73%"; Hit description=MYB20 protein (Fragment)
LPFLSFDFHYFLSESSLCIYPLQTTVRVALKLLTSCTTRTNNALKEHWRGSMKRKLDSYLASGLLEQVPDLHENLSVLQSSQSDSPKDSKVSSDRSQFSSILSTRSKLK

SEQ ID NO: 85001 - protein, 143 aa, Setaria italica
  misc_feature (127)..(127): Xaa can be any naturally occurring amino acid
  Transcript Sequence Number=SeqID_19027
  Gene Ontology: Mol. function=DNA binding; Cellular component=nucleus; Biological process=regulation of transcription
  Homolog annotation: Hit_ID=Q94FL9; Match level="QueryCoverage=51%, HitCoverage=7%, E-value=9e-15, Identity=51%"; Hit description=MYB transcription factor
  Pfam annotation: Domain name=Myb_DNA-binding; Domain location=75-121; Score=52.4; E_value=1.7e-12; Accession=PF00249.23; Description=Myb -like DNA-binding domain
MEQSSDGMPRQRRDFSSTNHLSNSDAVAEGMTDISHETSKHWQDMESENTEVPPQKKNVHGFNECSSLKNLERTKCRWSPEEDELLTQLVHKHGTKNWHNISCAIPDRNAHACLSRWKYVLDPAINXEAWSQQEELRLIRAHQ

SEQ ID NO: 85002 - protein, 62 aa, Setaria italica
  Transcript Sequence Number=SeqID_19028
QRTPPKTGTTTPASDNSSPSDVCQDPCSLEIHEADASDLLDMSYCDGLMIDSPLYLHGSSFI

SEQ ID NO: 85003 - protein, 480 aa, Setaria italica
  Transcript Sequence Number=SeqID_19029
  Gene Ontology: Mol. function=DNA binding; Cellular component=nucleus; Biological process=regulation of transcription
  Homolog annotation: Hit_ID=Q5NKH8; Match level="QueryCoverage=92%, HitCoverage=97%, E-value=4e-39, Identity=50%"; Hit description=MYB20 protein (Fragment)
  Pfam annotation: Domain name=Myb_DNA-binding; Domain location=19-65; Score=26.9; E_value=8.5e-05; Accession=PF00249.23; Description=Myb -like DNA-binding domain
  Pfam annotation: Domain name=Myb_DNA-binding; Domain location=71-116; Score=35.8; E_value=1.7e-07; Accession=PF00249.23; Description=Myb -like DNA-binding domain
  Pfam module annotation: Pfam domain module=Myb_DNA-binding::Myb_DNA -binding; Domain location=19-65::71-116
FYYSCGFSFYSILSAKRKKLIVFFQEDELLTQLVHKHGTKNWHNISCAIPDRNAHACLSRWKYVLDPAINKEAWSQQEELRLIRAHQIYGNKWCKMVKHFPGRTNNALKEHWRGSMKRKLDSYLASGLLEQVPDLHENLSVLQSSQSDSPKDSKVSSDRSQFSSILSTRSKLKQEIRELSENADTSVGESSDFIYAKALDTHSAKVSESIITKPQQCARARKKLDSVSTPVKLKSDLPPETVKCRQEMESGKTEGPPCKKNGYCFKEGTSGRLEEITDLKEDISVPESSQSDIPKDSQGSSERNRPPSSLPPRPKSKTDLSELDENADTSEEESSDCIYPKGLDAHSAKVSEKIMAKSKQRARARKKLDFLSTPVELKVCTAAASCQRPPPKMEQTTPASDNSSPSDVCQGIPQNAASEPVDVVIPTAASNHPNDVHSLATPDPCSLEIHEADASDLLDMSYCDGLMIDSPLYLHGSSFI

SEQ ID NO: 85004 - protein, 94 aa, Setaria italica
  Transcript Sequence Number=SeqID_19030
MAKIGAAILVCIVVLALDVTAGILGIEAQAAQNKVKKVTILFIECEKPSYKAYQLGLAAAVLLVVAHSIANFLGGCACICSQLEFIRASINRKL

SEQ ID NO: 85005 - protein, 130 aa, Setaria italica
  Transcript Sequence Number=SeqID_19031
  Gene Ontology: Mol. function=mismatched DNA binding; Cellular component=intracellular; Biological process=mismatch repair
  Homolog annotation: Hit_ID=Q1XBQ7; Match level="QueryCoverage=100%, HitCoverage=11%, E-value=1e-70, Identity=96%"; Hit description=DNA mismatch repair protein
FDACILVEHAGLNPFGGLRSDSIPKAGCPVMNLRQTLDDLTRCGYSVCIVEEIQGPVQARARKGRFISGHAHPGSPYVYGLAEVDHDVEFPDPMPVVGISHSAKGYCLISVLETMKTYSAEEGLTEEAVV

SEQ ID NO: 85006 - protein, 52 aa, Setaria italica
  Transcript Sequence Number=SeqID_19032
  Gene Ontology: Mol. function=oxidoreductase activity; Biological process=oxidation reduction
  Homolog annotation: Hit_ID=Q8LNJ6; Match level="QueryCoverage=96%, HitCoverage=13%, E-value=7e-19, Identity=90%"; Hit description =Putative gibberellin oxidase
MVTNCVFRSTLHRVVAVGKERYSVAFFLDPNSDTVVECLESCCSEADPPRFP

SEQ ID NO: 85007 - protein, 85 aa, Setaria italica
  Transcript Sequence Number=SeqID_19033
  Gene Ontology: Mol. function=oxidoreductase activity; Biological process=oxidation reduction
  Homolog annotation: Hit_ID=Q109D4; Match level="QueryCoverage=88%, HitCoverage=13%, E-value=1e-24, Identity=72%"; Hit description =Transposon protein, putative, unclassified, expressed
MLLTFPSFFWLSVERFPSWKETMKLYIATALDTGERILSLIALGLDLDAEFFHKIGALDCPSTFLRLLHYPGEVNESDSGNYGAF

SEQ ID NO: 85008 - protein, 187 aa, Setaria italica
  misc_feature (135)..(135): Xaa can be any naturally occurring amino acid
  Transcript Sequence Number=SeqID_19034
  Gene Ontology: Mol. function=oxidoreductase activity; Biological process=oxidation reduction
  Homolog annotation: Hit_ID=Q109D4; Match level="QueryCoverage=92%, HitCoverage=31%, E-value=2e-58, Identity=64%"; Hit description =Transposon protein, putative, unclassified, expressed
MSGSVDLPVVDLASSDLRAAAASVRQACVEHGFFYVTNHGVDRALVEAVLAESKGFFDLPMEEKLKLHRTNHRGYTPPYAEKLDAASEFVGDLKESFYIGPIGDSDLQNDLNQWPSVERFPSWKETMKLYIATVXLDTGERILSLIALGLDLDAEFFHKIGALDCPSTFLRLLHYPGYSTPFFFLYQ

SEQ ID NO: 85009 - protein, 343 aa, Setaria italica
  Transcript Sequence Number=SeqID_19035
  Gene Ontology: Mol. function=oxidoreductase activity; Biological process=oxidation reduction
  Homolog annotation: Hit_ID=Q109D4; Match level="QueryCoverage=92%, HitCoverage=58%, E-value=1e-133, Identity=71%"; Hit description =Transposon protein, putative, unclassified, expressed
  Pfam annotation: Domain name=2OG-FeII_Oxy; Domain location=199-304; Score=101.3; E_value=3.3e-27; Accession=PF03171.12; Description=2OG -Fe(II) oxygenase superfamily
  Subcellular localization annotation: CTP_CleavageSite=52; ConfidenceScore=5.48e-01
MEAQRSPQLQLRHATTAANQQRFRSGSAAAQRSAMSGSVDLPVVDLASSDLRAAAASVRQACVEHGFFYVTNHGVDRALVEAVLAESKGFFDLPMEEKLKLHRTNHRGYTPPYAEKLDAASEFVGDLKESFYIGPIGDSDLQNDLNQWPSEERFPSWKETMKLYIATALDTGERILSLIALGLDLDAEFFHKIGALDCPSTFLRLLHYPGEVNESDSGNYGASAHSDYGAITLLVTDGTPGLQICREKDRDPQLWEDVHHIDGALIVNIGDLLERWTNCVFRSTLHRVVAVGKERYSVAFFLDPNSDTVVECLESCCSEADPPRFPPIKSGDYITGRINSTYK

SEQ ID NO: 85010 - protein, 86 aa, Setaria italica
  Transcript Sequence Number=SeqID_19036
NPTDGGGCACGGHHLVHTVDPSAAVGSDYGFTGGSYSERKHVHYNGKGQYSFHTEQSDGSMVLDESLHGHSDADQLYGYDDTQKNS

SEQ ID NO: 85011 - protein, 216 aa, Setaria italica
  Transcript Sequence Number=SeqID_19037
  Homolog annotation: Hit_ID=Q0WSY2; Match level="QueryCoverage=99%, HitCoverage=22%, E-value=7e-34, Identity=39%"; Hit description =Filament-like plant protein 4
  Pfam annotation: Domain name=DUF869; Domain location=12-216; Score= -75.7; E_value=1.6e-09; Accession=PF05911.3; Description=Plant protein of unknown function (DUF869)
QLSFAHSECVEKDAILAKQAKVAEEAILGWEKAEAEALLLKTQLDDTLDDKTAIEQRICQLDEALNVAMVERDSLIKETAQMISCEQDKVQKLEESLVEKINIIANLDAENDKLSEIVSVKENMISELIESKGLTESNLKDLARKLESAERTNSSLRYEVCMLQKQLEIRSEERKFSLKSADAAHKQHLENVKKITKLESECQRLRSMVRKRLPGH

SEQ ID NO: 85012 - protein, 72 aa, Setaria italica
  Transcript Sequence Number=SeqID_19038
  Gene Ontology: Mol. function=nucleic acid binding; Cellular component= intracellular
  Homolog annotation: Hit_ID=B6UEM9; Match level="QueryCoverage=79%, HitCoverage=7%, E-value=3e-10, Identity=72%"; Hit description=G -patch domain containing protein
SKKILPCRFVTVTLTGQSSLPSADGQVRLEKLLGTEPGDFSVNWESSKGPGRKGLSAPRKRLRQKQLGKYQL

SEQ ID NO: 85013 - protein, 40 aa, Setaria italica
  Transcript Sequence Number=SeqID_19039
  Gene Ontology: Mol. function=nucleic acid binding; Cellular component= intracellular
  Homolog annotation: Hit_ID=B6UEM9; Match level="QueryCoverage=100%, HitCoverage=5%, E-value=1e-15, Identity=95%"; Hit description=G -patch domain containing protein
VDQVDMLCFQPMHTRDCSQVQRLASIYQLKSGCQGSGKKR

SEQ ID NO: 85014 - protein, 175 aa, Setaria italica
  misc_feature (159)..(159): Xaa can be any naturally occurring amino acid
  Transcript Sequence Number=SeqID_19040
  Gene Ontology: Mol. function=nucleic acid binding; Cellular component= intracellular
  Homolog annotation: Hit_ID=B6UEM9; Match level="QueryCoverage=93%, HitCoverage=22%, E-value=1e-62, Identity=75%"; Hit description=G -patch domain containing protein
RDVPSMRVMGLEDMFMVKDVRMANRSRKGSKTGSSSSQLSRSWPNEGRKSKKYHSVPGEKKKHRKELIAKKRQQRMLSRGVDLGQINTKLRKMVVDQVDMLCFQPMHTRDCSQVQRLASIYQLKSGCQGSGKKRFVTVTLTGQSSLPSADGQVRLEKLXLGTEPGDFSVNWESSK

SEQ ID NO: 85015 - protein, 704 aa, Setaria italica
  misc_feature (7)..(7): Xaa can be any naturally occurring amino acid
  misc_feature (368)..(368): Xaa can be any naturally occurring amino acid
  Transcript Sequence Number=SeqID_19041
  Gene Ontology: Mol. function=nucleic acid binding; Cellular component= intracellular
  Homolog annotation: Hit_ID=B6UEM9; Match level="QueryCoverage=97%, HitCoverage=90%, E-value=0.0, Identity=62%"; Hit description=G-patch domain containing protein
  Pfam annotation: Domain name=G-patch; Domain location=566-610; Score =73.9; E_value=5.8e-19; Accession=PF01585.15; Description=G-patch domain
  Pfam annotation: Domain name=G-patch; Domain location=657-701; Score =71.3; E_value=3.5e-18; Accession=PF01585.15; Description=G-patch domain
  Pfam module annotation: Pfam domain module=G-patch::G-patch; Domain location=566-610::657-701
GRSAGRXGRRGGSTADGDSSHAVPFSYPSLRPGSAHSEREAQALEVTIDTAPCADPAASVPVYSYRPEFVGGLGLGFHEDEDADEEGAGEAVHLGLGFRDGGNAAMDLELEELEEEDASFKTPKRKPQQKANRNPGFLSIGGVRIYTEDISSPESEGMSGSDEDSESESGDGERFENDDGESDEEGSEDEEGGSEIDGESLGSDSDEDLSIGDSSSVDDEVVADYMEGIGGSEELLSSKWIAGMNLGDTDPAEQMDTDDDDDDEDGFLKKGKEKLEGYALMTASEQYGMKRPNSAERRKGKGMVCDRDVPSMRVMGLEDMFMVKDVRMANRSRKGSKTGSSSSQLSRSWPNEGRKSKKYHSVPGEKKXHRKELIAKKRQQRMLSRGVDLVVCCFFCLQKLRKMVVDQVDMLCFQPMHTRDCSQVQRLASIYQLKSGCQGSGKKRFVTVTLTGQSSLPSADGQVRLEKLLGTEPGDFSVNWESSKGPGRKGLSAPEKLAKHWESIGKKSSSKKQVSFAERPVSFVSCGTMAESVTETIAVDSSGGHTSPGKAAESNTTELGSFEVHTKGFGSKMMAKMGFIEGTGLGKDGQGIVQPIQAIHRPKSLGLGVEFNSEAEAIKARTEPMKARSEPSKVRPELRRNVRALETSGVGSFERHTKGFGSKMMAKMGFVPGSGLGRDGQGIPTPLTAVRRPKSQGLGAKDKY

SEQ ID NO: 85016 - protein, 62 aa, Setaria italica
  Transcript Sequence Number=SeqID_19042
  Gene Ontology: Mol. function=catalytic activity; Biological process =trehalose biosynthetic process
  Homolog annotation: Hit_ID=Q10KF5; Match level="QueryCoverage=72%, HitCoverage=12%, E-value=1e-14, Identity=84%"; Hit description =Trehalose-phosphatase family protein, expressed
MEPLLSVWLIDQDQEAKSVLCQPAAEFLPVIEEAYAALVGSVEASIPGAKVENNKFCLSVHF

SEQ ID NO: 85017 - protein, 101 aa, Setaria italica
  Transcript Sequence Number=SeqID_19043
  Gene Ontology: Mol. function=catalytic activity; Biological process =trehalose biosynthetic process
  Homolog annotation: Hit_ID=Q1W5S4; Match level="QueryCoverage=100%, HitCoverage=40%, E-value=5e-49, Identity=92%"; Hit description =Sister of ramosa 3 (Fragment)
IVSGRCRDKVFNFVKLAELYYAGSHGMDIKGPTAQSKHAKAKAEAVLCQPASEFLPVIDEVCRALTATTAAIPGARVENNKFCLSVHFRCVQEEKWRALEE

SEQ ID NO: 85018 - protein, 121 aa, Setaria italica
  Transcript Sequence Number=SeqID_19044
  Gene Ontology: Mol. function=catalytic activity; Biological process =trehalose biosynthetic process
  Homolog annotation: Hit_ID=Q1W5R8; Match level="QueryCoverage=100%, HitCoverage=48%, E-value=2e-54, Identity=80%"; Hit description =Ramosa 3-like protein (Fragment)
  Pfam annotation: Domain name=Trehalose_PPase; Domain location=1-121; Score=-28.7; E_value=4.2e-05; Accession=PF02358.8; Description =Trehalose-phosphatase
AIVSGRCRDKVFEFVKLAELYYAGSHGMDIKGPVKGSRHTKAAKAKGVLFQPASQFLPMIEQVHESLVEKTKSIPGAKVENNKFCVSVHFRCVDEKSWSALADTVKSVLKDYPKLKLTQGR

SEQ ID NO: 85019 - protein, 72 aa, Setaria italica
  Transcript Sequence Number=SeqID_19045
MHRKAEHALLPKAFWHPSSDADPVKLWTQMREAVRGVAARFPTAIVSGRCRDKVHTHFSSSLKSPSLSSASH

SEQ ID NO: 85020 - protein, 139 aa, Setaria italica
  Transcript Sequence Number=SeqID_19046
  Gene Ontology: Mol. function=catalytic activity; Biological process =trehalose biosynthetic process
  Homolog annotation: Hit_ID=Q1W5R8; Match level="QueryCoverage=66%, HitCoverage=37%, E-value=3e-30, Identity=66%"; Hit description =Ramosa 3-like protein (Fragment)
  Pfam annotation: Domain name=Trehalose_PPase; Domain location=1-137; Score=-27.7; E_value=3.6e-05; Accession=PF02358.8; Description =Trehalose-phosphatase
TRRHRRRRGSGRCRDKVRNFVGLSELYYAGSHGMDIKGPNKQAKGVLFQPASEFLPMIEEVHERLAETTRCIPGAKVENNKFCVSVHFRCVDEKVRCVRGRKWPSLSHPILPFSAFSWRPHPHCIIISGKWQLRSKIHA

SEQ ID NO: 85021 - protein, 362 aa, Setaria italica
  misc_feature (37)..(37): Xaa can be any naturally occurring amino acid
  Transcript Sequence Number=SeqID_19047
  Gene Ontology: Mol. function=catalytic activity; Biological process =trehalose biosynthetic process
  Homolog annotation: Hit_ID=C3SA94; Match level="QueryCoverage=98%, HitCoverage=99%, E-value=1e-142, Identity=72%"; Hit description =Trehalose-phosphatase family protein
  Pfam annotation: Domain name=Trehalose_PPase; Domain location=110 -347; Score=313.9; E_value=3.4e-91; Accession=PF02358.8; Description =Trehalose-phosphatase
VAISDHAKHGVVLGPEDAVVAAAARHFSFPPPRTGGXSCRKLAAQVDLGAAVMGSWLDSMKASSPRHRLMAPLAGAADAEHDDWMERHPSALERFEALAAAAKGKQVAVFLDYDGTLSPIVEDPDRAVMTDEMREAVRGVAARFPTAIVSGRCRDKVFGFVGLEELYYAGSHGMDIRGPTADPNNHGKDQEAKSVLCQPAAEFLPVIEEAYAALVGSVEASIPGAKVENNKFCLSVHFRCVEEAAWGALFERVRAVLRDYPGLRLTQGRKVLEVRPMIKWDKGKALEFLLDALGYAERSDVFPVYVGDDRTDEDAFKVLRSRGQGAGILVSRFPKETAASFSLRDPAEVRDFLRRLVDANAT

SEQ ID NO: 85022 - protein, 188 aa, Setaria italica
  Transcript Sequence Number=SeqID_19048
RPHRRGRFQGAEEEGSRPRHPRLQVSQGDERLLLPAGPGRGHGLPAPAGGVEAQVIAAAAAADNDPAAGVAISAAAGRSAAGRLVNRWTDRIGVQSCEHTPPPPNSASPPSLSLTILSPCCGLRNGLVVVAALHACYVLRFPGRGPPVLRPRHRGKRGHTHNNTNSLRRLCMLPSLENAGACCGGATV

SEQ ID NO: 85023 - protein, 96 aa, Setaria italica
  Transcript Sequence Number=SeqID_19049
  Gene Ontology: Mol. function=catalytic activity; Biological process =trehalose biosynthetic process
  Homolog annotation: Hit_ID=Q1W5R8; Match level="QueryCoverage=64%, HitCoverage=24%, E-value=2e-26, Identity=88%"; Hit description =Ramosa 3-like protein (Fragment)
FPSFVVRLRSFVRTCRPYSDCTNVLPVYIGDDRTDEDAFKVLRRRGQGVGILVSKHPKETSANYSLQEPAEVMEFLLRLVEWKRLSRSRARLMSLQ

SEQ ID NO: 85024 - protein, 266 aa, Setaria italica
  Transcript Sequence Number=SeqID_19050
  Gene Ontology: Mol. function=DNA binding; Cellular component=nucleus
  Homolog annotation: Hit_ID=B4FRV0; Match level="QueryCoverage=100%, HitCoverage=70%, E-value=4e-86, Identity=70%"; Hit description=DNA -binding protein
  Pfam annotation: Domain name=DUF296; Domain location=61-181; Score =226.4; E_value=7e-65; Accession=PF03479.7; Description=Domain of unknown function (DUF296)
TPASAVGAAMKRGRGRPLDFAAAAAAGKQHQHHQLHHHHQPFGFHFDSIGDMVACSAGANFTPHIITVAPGEDVTMKVISFSQQGPRAICILSANGVISNVTLRQPDSSGGTLTYEGRFELLSLSGSFMPTENSGTRSRSGGMSVSLASPDGRVVGGGVAGLLVAASPVQIVVGSFLPSYQLEQKNKKPRVDPAPTLPQTPPAIPISSVDTHSGEQGQHSSAAHQRTVNVVTSAYGADQSWASPAQPTPEASRTPSGDQKTTASGS

SEQ ID NO: 85025 - protein, 291 aa, Setaria italica
  misc_feature (10)..(10): Xaa can be any naturally occurring amino acid
  Transcript Sequence Number=SeqID_19051
  Gene Ontology: Mol. function=catalytic activity; Biological process =trehalose biosynthetic process
  Homolog annotation: Hit_ID=Q1W5S5; Match level="QueryCoverage=82%, HitCoverage=100%, E-value=1e-128, Identity=92%"; Hit description =Ramosa 3 (Fragment)
  Pfam annotation: Domain name=Trehalose_PPase; Domain location=49-276; Score=344.5; E_value=2e-100; Accession=PF02358.8; Description =Trehalose-phosphatase
MRASSPTRSXARAAADVDEFTAWMMKHPSALGKFEQIAGSSKGKKIVMFLDYDGTLSPIVADPDAAYMSDAMRSAVRDVAKYFPTAIVSGRCRDKVRNFVGLSELYYAGSHGMDIKGPSSNPESVLCQPASEFLPVIDEVYKLLVEKTKSTPGAKVENNKFCLSVHFRCVDEKRWNALAEQVKAVIKDYPKLKLTQGRKVLEVRPSIMWDKGKALEFLLESLGFAERSDVFPVYVGDDRTDEDAFKVLRSRGQGAGILVSRFPKETAASFSLRDPAEVRDFLRRLVDANAT

SEQ ID NO: 85026 - protein, 248 aa, Setaria italica
  Transcript Sequence Number=SeqID_19052
  Gene Ontology: Mol. function=catalytic activity; Biological process =trehalose biosynthetic process
  Homolog annotation: Hit_ID=Q1W5R8; Match level="QueryCoverage=91%, HitCoverage=90%, E-value=1e-111, Identity=85%"; Hit description =Ramosa 3-like protein (Fragment)
  Pfam annotation: Domain name=Trehalose_PPase; Domain location=1-226; Score=247.9; E_value=2.4e-71; Accession=PF02358.8; Description =Trehalose-phosphatase
LYRRRPRPRADQMRMAVRSVAKHFPTAIVSGRCRDKVFEFVKLAELYYAGSHGMDIKGPAKASSRHAKAKQAKGVLFQPASEFLPMIEEVHERLAETTRCIPGAKVENNKFCVSVHFRCVDEKMWGEVSEAVKGVLREYPKLRLTLGRMVLEVRPTIKWDKGKALEFLLESLGFADCTDVLPVYIGDDRTDEDAFKVLRRRGQGVGILVSKHPKDTSASYSLQEPAEVMEFLLRLVEWERLSKARPKW

SEQ ID NO: 85027 - protein, 219 aa, Setaria italica
  Transcript Sequence Number=SeqID_19053
  Gene Ontology: Mol. function=adenylosuccinate synthase activity; Cellular component=chloroplast; Biological process=purine nucleotide biosynthetic process
  Homolog annotation: Hit_ID=Q851S8; Match level="QueryCoverage=100%, HitCoverage=44%, E-value=1e-114, Identity=89%"; Hit description =Adenylosuccinate synthetase
  Pfam annotation: Domain name=Adenylsucc_synt; Domain location=6-217; Score=98.3; E_value=9.7e-34; Accession=PF00709.13; Description =Adenylosuccinate synthetase
ESLSQVAAVLGTQWGDEGKGKLVDILAQRFDVVARCQGGANAGHTIYNSEGKKFSLHLVPSGILNENTQCVIGNGAVVHLPGFFKEIDGLESNGISCEGRLLVSDRAHLLFDLHQIVDGLREAELGNSLIGTTRRGIGPCYSSKVIRNGLRVSDLRHMDTFGAKLNTLLRDAAMRFKDFEYDNKILKEEVEKYKKFAERLEPFITDTVHFMNESILQKK

SEQ ID NO: 85028 - protein, 44 aa, Setaria italica
  Transcript Sequence Number=SeqID_19054
NKEDLATATSDQELDAGNSVGEGGTAKAVPAQGERSTGGSGMHP

SEQ ID NO: 85029 - protein, 280 aa, Setaria italica
  Transcript Sequence Number=SeqID_19055
MHQQTLHGKEHRQSIRLKTQDHQLRDETIEYNDVYEVSEHRSGTSCFQDQTSLKGWPSETKSKQFDIVQEKFIKPKCFAMEEKLLHTKELQEALEVPHSNKDLFLQNPEEHNSSFSKQPNGLHTNQAPPQTKRITVLKPIKSVETDGIKQSRTEQVSKQNVLSMRKFHQIPSSKEEIPSQPSRIVLLRPTPGKPGISKAKLISRVNSFQLINRNGLNGSVDYNHATVGSSGLVHGIVQRWQDGCHQRDDSLLSSAYSNGYGGDESSFSDSEVDYSSGSEI

SEQ ID NO: 85030 - protein, 336 aa, Setaria italica
  Transcript Sequence Number=SeqID_19056
  Homolog annotation: Hit_ID=Q53NA2; Match level="QueryCoverage=98%, HitCoverage=64%, E-value=3e-42, Identity=33%"; Hit description =D8Ertd354e protein, putative
  Pfam annotation: Domain name=DUF2261; Domain location=1-304; Score= -112.7; E_value=1.7e-08; Accession=PF10019.1; Description =Uncharacterized conserved protein (DU
HLAYKRVPDKLEATKKAAFRALKLFCLGLVLQGGFFHGVHSLSFGVDLAKIRLMGILQRIAIAYLLAAICEIWLKGDDDVDSGLDLLRRYRYQLFVGLVLSFTYTVLLYGIYVPDWDYQISGPGSIEKSFSVKCGVRGDTGPACNAVGMVDRTILGIDHLYRRPVYARTKECSINYPENGPLPPDAPSWCQAPFDPEGLLSSVMAIVTCLIGLQFGHIIIHFEKHRGRITNWLIPSFSMLAVAFLMDFVGMRMNKPLYTISYTLATAGAAGLLFAGIYTLVDVYGFRRPTITMEWMGKHALMIYVLVACNILPMFIRGFYWRDPNNSLLKFIGIGA

SEQ ID NO: 85031 - protein, 172 aa, Setaria italica
  Transcript Sequence Number=SeqID_19057
  Gene Ontology: Mol. function=hydrolase activity, acting on ester bonds; Biological process=lipid metabolic process
  Homolog annotation: Hit_ID=B9RLX9; Match level="QueryCoverage=87%, HitCoverage=41%, E-value=7e-60, Identity=72%"; Hit description=Zinc finger protein, putative
MARERKPLAVALAVALLLVGLCRGDVVQFIFGDSLSDVGNNNYLTKSLARAATPWYGIDFGRGMPNGRFCNGRTVADIVGDKMGLPRPPAFLDPSLDADTIFKNGVNYASGGGGILNETSSLFIQRFSLYKQIELFQGTQAFMREKIGGAAADKFFGEGQYVVAMGANDFIN

SEQ ID NO: 85032 - protein, 167 aa, Setaria italica
  Transcript Sequence Number=SeqID_19058
  Gene Ontology: Mol. function=dihydrolipoyllysine-residue acetyltransferase activity; Cellular component=pyruvate dehydrogenase complex; Biological process=pyruvate metabolic process
  Homolog annotation: Hit_ID=Q0WQF7; Match level="QueryCoverage=99%, HitCoverage=26%, E-value=1e-69, Identity=75%"; Hit description =Dihydrolipoyllysine-residue acetyltransferase component 1 of pyruvate dehydrogenase complex, mitochondrial
  Pfam annotation: Domain name=2-oxoacid_dh; Domain location=3-167; Score=152.6; E_value=1.2e-42; Accession=PF00198.15; Description=2 -oxoacid dehydrogenases acyltransferase (catalytic domain)
NCLAEVPEANAYWNSEKEEAQKHDSVDISIAVATEKGLMTPIIRNADQKTISAISSEVKQLAEKARAGKLAPNEFQGGTFSISNLGMYPVDHFCAIINPPQSGILAVGRGNKVVEPVVDSDGNEKAAAVTKMSLTLSADHRVFDGQVGGKFFTELASNFSDIRRLLL

SEQ ID NO: 85033 - protein, 468 aa, Setaria italica
  Transcript Sequence Number=SeqID_19059
  Gene Ontology: Mol. function=dihydrolipoyllysine-residue acetyltransferase activity; Cellular component=pyruvate dehydrogenase complex; Biological process=pyruvate metabolic process
  Homolog annotation: Hit_ID=B9SL87; Match level="QueryCoverage=91%, HitCoverage=86%, E-value=1e-161, Identity=69%"; Hit description =Dihydrolipoamide acetyltransferase component of pyruvate dehydrogenase, putative
  Pfam annotation: Domain name=2-oxoacid_dh; Domain location=251-468; Score=324.7; E_value=1.9e-94; Accession=PF00198.15; Description=2 -oxoacid dehydrogenases acyltransferase (catalytic domain)
  Pfam annotation: Domain name=Biotin_lipoyl; Domain location=57-131; Score=83.4; E_value=7.9e-22; Accession=PF00364.14; Description =Biotin-requiring enzyme
  Pfam annotation: Domain name=E3_binding; Domain location=176-212; Score=43.3; E_value=9.8e-10; Accession=PF02817.9; Description=e3 binding domain
  Pfam module annotation: Pfam domain module=2-oxoacid_dh::Biotin _lipoyl::E3_binding; Domain location=251-468::57-131::176-212
MANIRALLVGLSRARGSLAEAGRCASLRPSLLASMVEHYKVPLPTRWFSSTGLPPHLVVGMPALSPTMNQGNIAKWRKQEGDKIEVGDVICEIETDKATLEFESLEEGYLAKILAPEGSKDVQVGQPIAVTVEELDDIKSIPADTSFGGEQKEEQSTESAPQTDVTSVSEQSSVVSRISPAAKLLIKEHGLDMSSLRASGPRGTLLKGDVLAALKSGAVSSSAKEKKAPAAPSSQPTHDSQAQPATTSQKADTYEDILNSQIRKVIAKRLIESKQTTPHLYLSKDVVLDPLLAFRSELKEQHGIKVSVNDIIIKAVAIALRNVPEANAYWNSEKEEAQKHDSVDISIAVATEKGLMTPIIRNADQKTISAISSEVKQLAEKARAGKLAPNEFQGGTFSISNLGMYPVDHFCAIINPPQSGILAVGRGNKVVEPVVDSDGNEKAAAVTKMSLTLSADHRVFDGQVGGKF

SEQ ID NO: 85034 - protein, 42 aa, Setaria italica
  Transcript Sequence Number=SeqID_19060
PRTKRAQSSCLTFVPRKLFSSILIVFPPFYLQSLPVHTLSLS

SEQ ID NO: 85035 - protein, 179 aa, Setaria italica
  Transcript Sequence Number=SeqID_19061
  Gene Ontology: Mol. function=RNA binding; Cellular component =mitochondrion
  Homolog annotation: Hit_ID=Q8LNU1; Match level="QueryCoverage=100%, HitCoverage=68%, E-value=3e-50, Identity=33%"; Hit description =Putative chloroplast RNA processing protein
  Pfam annotation: Domain name=PPR; Domain location=104-138; Score =50.8; E_value=5.3e-12; Accession=PF01535.12; Description=PPR repeat
  Pfam annotation: Domain name=PPR; Domain location=139-173; Score =41.3; E_value=3.8e-09; Accession=PF01535.12; Description=PPR repeat
  Pfam annotation: Domain name=PPR; Domain location=31-66; Score=16.8; E_value=0.091; Accession=PF01535.12; Description=PPR repeat
  Pfam annotation: Domain name=PPR; Domain location=67-101; Score=23.0; E_value=0.0013; Accession=PF01535.12; Description=PPR repeat
  Pfam module annotation: Pfam domain module=PPR::PPR::PPR::PPR; Domain location=104-138::139-173::31-66::67-101
LMDCCCRARRPDLAFAFFGRLLQTGLGIQLITFTSLLKGLCDAKRTDEALDVLLCRMPELGCVPNVISYSVLLKSFCSEKKSQRAVELLQIMAKEGGVCSPNVVSYNTVIDGLFKEGEVAKACDLFHEMVQQGISPDVMTYSSIIRALGKARAMDKAEMFFRQMVDKGVQPDIFIYTNL

SEQ ID NO: 85036 - protein, 482 aa, Setaria italica
  Transcript Sequence Number=SeqID_19062
MEESSSPFRDAAVTQTPAVETAPVDAPTSAAGRPVDTPPRLTKPKMMEDRAVATLPKPSTELRRPGGRRPLVRPTLERTEEPQADTDTSAVDVSMVGQDKGGSSLEREASGSLPVSQPSSRKRLISSAQTIDSAAQGEANDANPPSKKPKEEEASQGTSELKSGQPPVGDVSTHVGVLPSTDDQDGQQSTEEMDADQASTPMEEVEATKDDDMGDKDDSGAHVDASLDTKGQDADVSIEINAVPVEDVLAKSDALVESFDDDQKIEDLKEDAQLTTATDVDDEMEEGELPEEPEQPLESALGETNREPTSDIGEQAGNVFRAASPGMLTEKSDVDVSEVEGDTTAEHAAVEPDQSPVAQSGTADSPSRAADASPAREPSPNPVQAGAFSRPQNTSTTTEAREPSSNPAQAGASSEPRNTSTVTEATETRSRTINLTERARQNRQTRFQQRAQQPATARGRGQLTQRKDAAGRGSRGRGGRQT

SEQ ID NO: 85037 - protein, 182 aa, Setaria italica
  Transcript Sequence Number=SeqID_19063
  Gene Ontology: Mol. function=binding
  Homolog annotation: Hit_ID=Q69SU8; Match level="QueryCoverage=57%, HitCoverage=42%, E-value=5e-37, Identity=71%"; Hit description =Putative tetratricopeptide repeat (TPR)-containing protein
  Pfam annotation: Domain name=TPR_1; Domain location=107-140; Score =16.0; E_value=0.07; Accession=PF00515.20; Description=Tetratricopepti de repeat
  Pfam annotation: Domain name=TPR_1; Domain location=141-174; Score =4.2; E_value=1.8; Accession=PF00515.20; Description=Tetratricopeptide repeat
  Pfam annotation: Domain name=TPR_2; Domain location=107-140; Score =26.2; E_value=0.00013; Accession=PF07719.9; Description =Tetratricopeptide repeat
  Pfam annotation: Domain name=TPR_2; Domain location=141-174; Score =5.6; E_value=6.8; Accession=PF07719.9; Description=Tetratricopeptide repeat
  Pfam module annotation: Pfam domain module=TPR_1::TPR_1::TPR_2::TPR _2; Domain location=107-140::141-174::107-140::141-174
FPRWSFAFAESRSPQLLILTRPNRPGGTCCFERKNPTINSGDLRSYSNPSKMKIAWGKNAKTKRQPVVVSTKPGLPFGVESDTEEAEKDETAGANTNCPGAKPLDTAESLQHQGDKLAEEGKYHEALSRWEAALTLAPDNAVLYEQKAQVLLEVGDAWHALTAGTRATELDPAMARGWVTLG

SEQ ID NO: 85038 - protein, 104 aa, Setaria italica
  Transcript Sequence Number=SeqID_19064
  Gene Ontology: Mol. function=protein serine/threonine kinase activity; Biological process=protein amino acid phosphorylation
  Homolog annotation: Hit_ID=B6SWL2; Match level="QueryCoverage=100%, HitCoverage=13%, E-value=2e-39, Identity=73%"; Hit description =Receptor-like kinase
  Pfam annotation: Domain name=S_locus_glycop; Domain location=1-94; Score=5.5; E_value=1.7e-05; Accession=PF00954.12; Description=S -locus glycoprotein family
FSVQMVDDPGEVTYALNATAGALSARVVLDEVGKVRVLVWFPTSKVWRPYPWLPRDACDEYASCGAFGLCRVDAAPTPSCSCVQEFSPVNQSQLSSGCRRDVQL

SEQ ID NO: 85039 - protein, 289 aa, Setaria italica
  misc_feature (83)..(83): Xaa can be any naturally occurring amino acid
  Transcript Sequence Number=SeqID_19065
  Gene Ontology: Mol. function=malonyl-CoA decarboxylase activity; Cellular component=mitochondrion; Biological process=fatty acid biosynthetic process
  Homolog annotation: Hit_ID=B9RXF9; Match level="QueryCoverage=97%, HitCoverage=52%, E-value=1e-107, Identity=65%"; Hit description =Malonyl-CoA decarboxylase, putative
  Pfam annotation: Domain name=MCD; Domain location=1-257; Score=228.6; E_value=1.6e-65; Accession=PF05292.3; Description=Malonyl-CoA decarboxylase (MCD)
VHPIRNLIDLKRRLGVGRRCFGYFHPAIPGEPLIFIEVALHKDMAASIQEVLWDDPPTPESEASCALFYSISSTQPGLSGINXGKFLLKRVIDMLRRDMPSVQIFATLSPIPGFMQWLRAKLASQIKLAQTESQEGNSFEGASSTFRESILLPEEEKMIHDAIEQAHGKQGIELLQDILKTSQWVKSEKLSAALKSPLMRLCARYLAREKIRGKALDAVANFHLQNGAMIERINWMADQSEKGIQQSGGIMVNYLYRLENIEEYALSYSGTGLAHSSPSLSQYLESKDP

SEQ ID NO: 85040 - protein, 86 aa, Setaria italica
  Transcript Sequence Number=SeqID_19066
  Gene Ontology: Mol. function=serine-type endopeptidase activity; Biological process=negative regulation of catalytic activity
  Homolog annotation: Hit_ID=A9QY39; Match level="QueryCoverage=94%, HitCoverage=10%, E-value=5e-20, Identity=59%"; Hit description =Subtilase
GDDILAGIDAAVGDGVDVLSISIAGGGPEVPYYENPIAIGTFGAVENGILVSIAAGNHGPGASTLYNDAPWMLSVAASTVDRLIGR

SEQ ID NO: 85041 - protein, 93 aa, Setaria italica
  Transcript Sequence Number=SeqID_19067
  Homolog annotation: Hit_ID=B9S1J1; Match level="QueryCoverage=98%, HitCoverage=33%, E-value=7e-14, Identity=43%"; Hit description =Transmembrane protein 45a, putative
FLDMCLELGGGIFAGRGGGGGVEPASLIYFEHGGMLLTFFLFGALALLSQKTRYLPLTDGELCLLAATAFTSEFLLFSYHSATHTGLEGYYHH

SEQ ID NO: 85042 - protein, 101 aa, Setaria italica
  Transcript Sequence Number=SeqID_19068
  Gene Ontology: Cellular component=integral to membrane
  Homolog annotation: Hit_ID=Q8LD36; Match level="QueryCoverage=93%, HitCoverage=37%, E-value=1e-23, Identity=57%"; Hit description =Contains similarity to nodulin MtN3 protein
  Pfam annotation: Domain name=MtN3_slv; Domain location=1-51; Score= -14.6; E_value=0.064; Accession=PF03083.8; Description=MtN3saliva family
LATLLNCMLWVFYGLPIVHPNSILVVTINGIGLVIEAAYLTIFFLYSDNKKRMRAFLVLAVEIVFMVIVVLSVLLAAHTHEKRSMIVGILCVIFRLRLVIS

SEQ ID NO: 85043 - protein, 113 aa, Setaria italica
  Transcript Sequence Number=SeqID_19069
  Gene Ontology: Mol. function=phosphatase activity; Biological process= metabolic process
  Homolog annotation: Hit_ID=B6SZW9; Match level="QueryCoverage=81%, HitCoverage=59%, E-value=5e-41, Identity=89%"; Hit description =Phosphoethanolamine/phosphocholine phosphatase
  Pfam annotation: Domain name=Put_Phosphatase; Domain location=9-112; Score=-45.0; E_value=7.6e-07; Accession=PF06888.4; Description =Putative Phosphatase
MASAPAPGVVVVFDFDRTIIDWDSDDWVVTKLGAADAFQRLRPTMRWNPLMDRMMEGLHARGKTVEDIRDCLRSAPLDAHVISAIKTAASLGYAALPPHAAMPMSSRLDCSIC

SEQ ID NO: 85044 - protein, 277 aa, Setaria italica
  Transcript Sequence Number=SeqID_19070
  Gene Ontology: Mol. function=phosphatase activity; Biological process= metabolic process
  Homolog annotation: Hit_ID=B9RKA9; Match level="QueryCoverage=85%, HitCoverage=93%, E-value=2e-85, Identity=60%"; Hit description =Pyridoxal phosphate phosphatase PHOSPHO2, putative
  Pfam annotation: Domain name=Put_Phosphatase; Domain location=9-239; Score=425.9; E_value=6.3e-125; Accession=PF06888.4; Description =Putative Phosphatase
MASAPAPGVVVVFDFDRTIIDWDSDDWVVTKLGAADAFQRLRPTMCWNPLMDRMMEELHARGKTVEDIRDCLRSAPLDAHVISAIKTAASLGCDLKVVSDANTFFIETVLAHHGVLGCFSEISTNPARVDADGRLRISPFHDSASAPHGCSLCPDNMCKGKIIEKIQAIASTKDQHFIYIGDGKGDYCPSLKLGEGDYVMPKENYPLWNLICSNKHLLKAEVHPWNSGEELEKILLELVNRMITPPAQVSPFDCSKCEMSKPTSTEVGHHQALRVPH

SEQ ID NO: 85045 - protein, 215 aa, Setaria italica
  misc_feature (58)..(58): Xaa can be any naturally occurring amino acid
  Transcript Sequence Number=SeqID_19071
  Gene Ontology: Mol. function=calcium-dependent phospholipid binding; Biological process=vesicle-mediated transport
  Homolog annotation: Hit_ID=B9RA61; Match level="QueryCoverage=91%, HitCoverage=34%, E-value=3e-78, Identity=73%"; Hit description =Copine, putative
  Pfam annotation: Domain name=Copine; Domain location=2-128; Score =190.8; E_value=3.7e-54; Accession=PF07002.8; Description=Copine
WVGEVLQFYDNDRRFPAWGFGARTQGHVSHCFNLNTATNDSEVVGVEGIMSAYTSSLXYAVSLAGPTMFGPVINRAADIASQSLQYSNNKYFVLLIITDGVLTDIQETKDCIVRASDLPLSILIVGVGNADFQQMEILDADNGKRLESSTGRIATRDIVQFVPMREVQGGQISVVQSLLEELPGQFLQYMRTRGIKPQQQAPPGHASAPVYPPQQ

SEQ ID NO: 85046 - protein, 214 aa, Setaria italica
  misc_feature (124)..(124): Xaa can be any naturally occurring amino acid
  Transcript Sequence Number=SeqID_19072
  Gene Ontology: Mol. function=protein serine/threonine kinase activity; Cellular component=cytoplasm; Biological process=vesicle -mediated transport
  Homolog annotation: Hit_ID=O04042; Match level="QueryCoverage=95%, HitCoverage=32%, E-value=7e-76, Identity=66%"; Hit description =F7G19.25 protein
  Pfam annotation: Domain name=Copine; Domain location=104-204; Score =103.5; E_value=7.1e-28; Accession=PF07002.8; Description=Copine
QQYGSKDNPLLVECFDFESSGNHELIGAFQTTITQLENLYASKSGANFYSHKGQRKMKGQLFVDQLQEKVQHTFLDYISSGFELNFMVAVDFTASNGDPRVPQSLHYIDPSGRPNSYQQAILGXGEVLQFYDNDRRFPAWGFGARTQGHVSHCFNLNTATNDSEVVGVEGIMSAYTSSLYAVSLAGPTMFGPVINRAADIASQSPFLINFLKLN

SEQ ID NO: 85047 - protein, 302 aa, Setaria italica
  Transcript Sequence Number=SeqID_19073
  Gene Ontology: Mol. function=protein tyrosine kinase activity; Cellular component=integral to membrane; Biological process =regulation of transcription, DNA-dependent
  Homolog annotation: Hit_ID=Q6R2K3; Match level="QueryCoverage=71%, HitCoverage=28%, E-value=4e-66, Identity=60%"; Hit description =Protein STRUBBELIG-RECEPTOR FAMILY 3
  Pfam annotation: Domain name=LRRNT_2; Domain location=28-68; Score =24.0; E_value=0.00062; Accession=PF08263.4; Description=Leucine rich repeat N-terminal domain
  Pfam annotation: Domain name=LRR_1; Domain location=116-138; Score =15.2; E_value=0.27; Accession=PF00560.25; Description=Leucine Rich Repeat
  Pfam annotation: Domain name=LRR_1; Domain location=140-162; Score =8.1; E_value=8.6; Accession=PF00560.25; Description=Leucine Rich Repeat
  Pfam annotation: Domain name=LRR_1; Domain location=164-186; Score =15.9; E_value=0.16; Accession=PF00560.25; Description=Leucine Rich Repeat
  Pfam annotation: Domain name=LRR_1; Domain location=188-209; Score =12.5; E_value=1.2; Accession=PF00560.25; Description=Leucine Rich Repeat
  Pfam annotation: Domain name=LRR_1; Domain location=210-232; Score =7.4; E_value=11; Accession=PF00560.25; Description=Leucine Rich Repeat
  Pfam annotation: Domain name=LRR_1; Domain location=94-113; Score =11.0; E_value=2.4; Accession=PF00560.25; Description=Leucine Rich Repeat
  Pfam module annotation: Pfam domain module=LRRNT_2::LRR_1::LRR_1::LRR_ 1::LRR_1::LRR_1::LRR_1; Domain location=28-68::116-138::140-162::164 -186::188-209::210-232::94-113
RFRPGVPVLVLLLIAAAALPRRALAVTDAADVSAINGLYVALESPKLPGWSASGGDPCGESWQGVTCTGSSITSIVFNAANLGGQLGSLGKFTSITEINLSNNNIGGTIPEDLPATLQNFFLSDNQLTGSIPMSLSNLRSLTAMSLNGNHLDGKLPDAFDSLTGLVNLDISSNNFSGPLPPSLGSLTSLTTLHMQDNQLTGTLNVLQDLPLKDLNVENNMFSGPIPQNLLNIPNFKNDGNPFNTSTTPSTSPSSTPTGSTPTSTPTQTPSSSSGAPPPSSTASNSSGSTARDSSSPSSKKHK

SEQ ID NO: 85048 - protein, 291 aa, Setaria italica
  Transcript Sequence Number=SeqID_19074
  Gene Ontology: Mol. function=protein tyrosine kinase activity; Cellular component=integral to membrane; Biological process =regulation of transcription, DNA-dependent
  Subcellular localization annotation: CTP_CleavageSite=68; ConfidenceScore=5.65e-01
LQDKNFRRKLGPENILFSTFKSLRGRSIFLSSNTSTTPSTSPSSTPTGSTPTSTPTQTPSSSSGAPPPSSTASNSSGSTARDSSSPSSKKHKSSTLRTVGYVLLAIVLFIVIVLLVIFCLSKYQERQERREYSTSQLGRVRQRVEEPKIKQASVQSTNDAKKGSAENPDRKKPREINLTVPGPAENPDRKKPREINLTVPGSAENSDRKKPREINLTVPAALEKPPEKRKEHVINLERTESEIFATAPPPPPPPPPPPPPPLPPPLPPTPSPPSPPPVEKVTVNPIVRPEK

SEQ ID NO: 85049 - protein, 187 aa, Setaria italica
  misc_feature (46)..(46): Xaa can be any naturally occurring amino acid
  misc_feature (141)..(141): Xaa can be any naturally occurring amino acid
  Transcript Sequence Number=SeqID_19075
  Gene Ontology: Mol. function=DNA binding; Biological process =regulation of transcription
  Homolog annotation: Hit_ID=B9RZZ5; Match level="QueryCoverage=53%, HitCoverage=16%, E-value=5e-12, Identity=38%"; Hit description =Telomeric repeat binding protein, putative
  Pfam annotation: Domain name=Myb_DNA-binding; Domain location=133 -183; Score=28.9; E_value=2.1e-05; Accession=PF00249.23; Description =Myb-like DNA-binding domain
NLWLLHAVGESTEREILAKLMQDDNANNANEADVAQRNHETDPSRXSSEAGCAQEGTAEHQNALIGGAQGVQLPEKSVPASKKRSLMERHPNASTYEWDGLDDSNDDRPLGKRELPPFERKPHPSPTCAHKVRKKWIEIEXKTLLEGVEKYGKGNWKDIKMAYPVIFEERSTIDLKDKFRNMERLSA

SEQ ID NO: 85050 - protein, 86 aa, Setaria italica
  Transcript Sequence Number=SeqID_19076
  Gene Ontology: Mol. function=transferase activity, transferring glycosyl groups; Biological process=metabolic process
  Homolog annotation: Hit_ID=B6TY52; Match level="QueryCoverage=100%, HitCoverage=18%, E-value=3e-24, Identity=80%"; Hit description =Cytokinin-O-glucosyltransferase 2
EALAGHFWRADDEDCLSFLDAQLRGSVVYVAFGSLAVMSPAQLQELAVALDASGRPFLWVFRPGLAGKLPTAFTDLVARHAGRGNL

SEQ ID NO: 85051 - protein, 83 aa, Setaria italica
  Transcript Sequence Number=SeqID_19077
  Gene Ontology: Mol. function=protein serine/threonine kinase activity; Biological process=protein amino acid phosphorylation
  Homolog annotation: Hit_ID=Q5VQE9; Match level="QueryCoverage=83%, HitCoverage=13%, E-value=8e-17, Identity=66%"; Hit description=S -receptor kinase-like
MKSEAACTAPVQLLIEDLPRKFSYDEIRAVTGDFGDVVGRGGSAEVFRGVLDDGTAVAVKRMTSYKPVGEEDFLREISIVANV

SEQ ID NO: 85052 - protein, 126 aa, Setaria italica
  Transcript Sequence Number=SeqID_19078
  Gene Ontology: Mol. function=sequence-specific DNA binding; Cellular component=nucleus; Biological process=regulation of transcription, DNA-dependent
  Homolog annotation: Hit_ID=B6SVB9; Match level="QueryCoverage=98%, HitCoverage=22%, E-value=3e-31, Identity=63%"; Hit description =WRKY70-superfamily of TFs having WRKY and zinc finger domains
  Subcellular localization annotation: CTP_CleavageSite=54; ConfidenceScore=5.44e-01
PLSHPPASPSAFLNAFSGFLDSPILLTPSLFPSPTTGAIPSEPFNWMGTAENLQASVKDEQRQYTDFTFQTAAPVPETVTAALPAASFPQSSSMLMAPLGGLGDSYNGELQQQQPWSYQEPTTQFE

SEQ ID NO: 85053 - protein, 73 aa, Setaria italica
  Transcript Sequence Number=SeqID_19079
QIFRGSSAQGVRYNFLKQNDQPKYRHLHHAEVHVNAGEKLNHMLNQWEEILTLYQYLLRSSFPKFQNCATKKP

SEQ ID NO: 85054 - protein, 238 aa, Setaria italica
  Transcript Sequence Number=SeqID_19080
  Gene Ontology: Mol. function=peptidyl-prolyl cis-trans isomerase activity; Cellular component=chloroplast thylakoid lumen; Biological process=protein folding
  Homolog annotation: Hit_ID=O22870; Match level="QueryCoverage=59%, HitCoverage=63%, E-value=4e-60, Identity=79%"; Hit description =Probable FKBP-type peptidyl-prolyl cis-trans isomerase 2, chloroplastic
  Pfam annotation: Domain name=FKBP_C; Domain location=133-230; Score =125.0; E_value=2.4e-34; Accession=PF00254.20; Description=FKBP-type peptidyl-prolyl cis-trans isomer
  Subcellular localization annotation: CTP_CleavageSite=92; ConfidenceScore=5.71e-01
MAAAATSSSASASPLLLPSGPRQASSSRAWLHGGGASRSRAPCCCKAAGGGSAAKCGAADDLTTSGGSSTRRGMLGVALGASALGLAAFDAVAAGLPPEEKPKLCDAACESELENVPMVTTESGLQYKDIKVGEGPSPPIGFQVAANYVAMVPNGQIFDSSLEKGQPYIFRVGSGQVIQGLDEGILSMKVGGLRRLYIPGPLAFPKGLTSAPGRPRVPPSSPVVFDVNLLYIPGLDDE

SEQ ID NO: 85055 - protein, 121 aa, Setaria italica
  Transcript Sequence Number=SeqID_19081
  Gene Ontology: Mol. function=zinc ion binding
  Homolog annotation: Hit_ID=Q1SKU8; Match level="QueryCoverage=99%, HitCoverage=17%, E-value=5e-50, Identity=69%"; Hit description=FAR1; Zinc finger, SWIM-type
  Pfam annotation: Domain name=MULE; Domain location=47-121; Score=8.5; E_value=0.012; Accession=PF10551.1; Description=MULE transposase domain
LLRMCKDFKEKDPSLMFEFTKDVNNRLQNIAWTYSASVQAYEMFGDAVVFDTTHRLSALDMALGIWVGLNNYGMPCFFACVLLREVNQESFAWALQVFLNFMNRKAPQMILTDQNMCLKEV

SEQ ID NO: 85056 - protein, 239 aa, Setaria italica
  Transcript Sequence Number=SeqID_19082
  Gene Ontology: Mol. function=RNA binding; Cellular component =ribonucleoprotein complex; Biological process=RNA processing
  Homolog annotation: Hit_ID=B9R8D8; Match level="QueryCoverage=70%, HitCoverage=36%, E-value=6e-31, Identity=41%"; Hit description=Lupus la ribonucleoprotein, putative
  Pfam annotation: Domain name=La; Domain location=92-149; Score=100.9; E_value=4.5e-27; Accession=PF05383.9; Description=La domain
  Subcellular localization annotation: CTP_CleavageSite=23; ConfidenceScore=5.15e-01
GPVHQHRGHQPTYVRAPPALAVVAGAPPPPPPFVSPTTQTPPYGAPMGFPDIVPHVYYFPVSPSTEGIQGLPFVPHPASPQAMLVDPLRKELLVQIDYYFSDDNLCKDTFLRQHMDDQGWVPLSLIAGFRKVKDLTNNIQFILETVMLSTVVEVQGDKLRKRGTWGNWLLPKPNHYAGSSSGLLSPVTSSIDSLVSQFHSVGLEGATYHGNMQGMPGEALLTRSVTSVSLGGYHAPTLG

SEQ ID NO: 85057 - protein, 463 aa, Setaria italica
  misc_feature (326)..(326): Xaa can be any naturally occurring amino acid
  Transcript Sequence Number=SeqID_19083
  Gene Ontology: Mol. function=RNA binding; Cellular component =ribonucleoprotein complex; Biological process=RNA processing
  Homolog annotation: Hit_ID=B9R8D8; Match level="QueryCoverage=36%, HitCoverage=36%, E-value=7e-23, Identity=36%"; Hit description=Lupus la ribonucleoprotein, putative
  Pfam annotation: Domain name=La; Domain location=291-348; Score=43.0; E_value=1.2e-09; Accession=PF05383.9; Description=La domain
  Subcellular localization annotation: CTP_CleavageSite=32; ConfidenceScore=5.04e-01
GAGTPPSDSPVGAKKAGAAAAAWKRPGAATVPAAVAVENPIMDVESWPALPGLASPPPPAAGLAAKASPKAASPASTVAVISPVSLGNSGAPDANPGNEAPVRNPVAQRALVMPAADGLEKNAPAPEPSPVYVPNAQSNGGDFHHQSGRFGSHAHGRGGGYGGGNRRGNGNGGGGGRRGNEHHGGFDGPRRGGGRRDGHGPVHQHRGHQPTYVRAPPALAVVAGAPPPPPPFVSPTTQTPPYGAPMGFPDIVPHVYYFPVSPSTEGIQGLPFVPHPASPQAMLVDPLRKELLVQIDYYFSDDNLCKDTFLRQHIFFFNKETVSLIXLFRKVKDLTNNIQFILETVMLSTVVEVQGDKLRKRGTWGNWLLPKPNHYAGSSSGLLSPVTSSIDSLVSQFHSVGLEGATYHGNMQGMPGEALLTRSVTSVSLGGYHAPTLGGLHNNGSGQLFGPKAARNLLRSDTF

SEQ ID NO: 85058 - protein, 103 aa, Setaria italica
  Transcript Sequence Number=SeqID_19084
  Gene Ontology: Mol. function=glutathione dehydrogenase (ascorbate) activity; Cellular component=chloroplast envelope; Biological process=oxidation reduction
  Homolog annotation: Hit_ID=B6U098; Match level="QueryCoverage=100%, HitCoverage=39%, E-value=5e-50, Identity=92%"; Hit description =Dehydroascorbate reductase
LKSKDPSDGTEQALLDELTSFDSYLKDNGPFINGGTISAADLSLGPKLYHMEIALGHYKNWSVPDSLSHVKQYMKSIFSMDSFVKTRALPEDVIAGWRPKVMG

SEQ ID NO: 85059 - protein, 125 aa, Setaria italica
  misc_feature (53)..(53): Xaa can be any naturally occurring amino acid
  Transcript Sequence Number=SeqID_19085
  Gene Ontology: Mol. function=glutathione dehydrogenase (ascorbate) activity; Cellular component=chloroplast envelope; Biological process=oxidation reduction
  Homolog annotation: Hit_ID=B6U098; Match level="QueryCoverage=96%, HitCoverage=45%, E-value=1e-57, Identity=91%"; Hit description =Dehydroascorbate reductase
DKLQLDKASVGSKIFSTFIGFLKSKDPSDGTEQALLDELTSFDSYLKDNGPFXINGGTISAADLSLGPKLYHMEIALGHYKNWSVPDSLSHVKQYMKSIFSMDSFVKTRALPEDVIAGWRPKVMG

SEQ ID NO: 85060 - protein, 222 aa, Setaria italica
  Transcript Sequence Number=SeqID_19086
  Gene Ontology: Mol. function=glutathione dehydrogenase (ascorbate) activity; Cellular component=chloroplast envelope; Biological process=oxidation reduction
  Homolog annotation: Hit_ID=B6U098; Match level="QueryCoverage=100%, HitCoverage=84%, E-value=1e-118, Identity=92%"; Hit description =Dehydroascorbate reductase
  Pfam annotation: Domain name=GST_N; Domain location=23-92; Score =28.5; E_value=2.7e-05; Accession=PF02798.12; Description=Glutathione S-transferase, N-terminal domain
RRAFAARASAQPLEVCAKESITVPGRLGDCPFTQRVLLTIEEKHLPYDLKLVDLANKPDWLFEMNPEGKVPIVKLEDKWIADSDVITQALEEKYPEPPLATPLDKASVGSKIFSTFIGFLKSKDPSDGTEQALLDELTSFDSYLKDNGPFINGGTISAADLSLGPKLYHMEIALGHYKNWSVPDSLSHVKQYMKSIFSMDSFVKTRALPEDVIAGWRPKVMG

SEQ ID NO: 85061 - protein, 149 aa, Setaria italica
  Transcript Sequence Number=SeqID_19087
  Gene Ontology: Mol. function=RNA methyltransferase activity; Biological process=RNA processing
  Homolog annotation: Hit_ID=Q10T58; Match level="QueryCoverage=100%, HitCoverage=8%, E-value=2e-64, Identity=79%"; Hit description=RNA methyltransferase, TrmH family protein, expressed
SSVHRRKVRVWQMICVLSHYVEDDIVGEVILSTHTCLYRNNLPAVRQYLETFAILLYLKFPTLAKEQLIPIFHDKGMRQQALSSYVFIVANVILHSRQLSVQRNHLNQLLPPILPFLTSHHHSLRCFTQLLVHSVLSRLWPTLYLETSE

SEQ ID NO: 85062 - protein, 89 aa, Setaria italica
  Transcript Sequence Number=SeqID_19088
  Subcellular localization annotation: CTP_CleavageSite=65; ConfidenceScore=5.19e-01
TQQERRSGSLPIPVFRRPVPPNTPPGLLPPEHATSDPPPRSRARATPRPPPPATPLLPPPVHRTAASSGDPSGLVGKNQHALQRSVAED

SEQ ID NO: 85063 - protein, 392 aa, Setaria italica
  Transcript Sequence Number=SeqID_19089
  Pfam annotation: Domain name=DUF573; Domain location=57-148; Score =12.0; E_value=1.3e-05; Accession=PF04504.6; Description=Protein of unknown function, DUF573
PRRTNYQASKVKKVKAEEEKAASEDTPSVKGKKGGGKLEKPGVLDSSPSSSKPEKLPRAQRLWTKNDEMKVLEALAGHVKSDGTLPKTDFLLATVGDRLDRKNCTYSDIYEKVRQLKGRYEKAVSTGIVPSKEDELQIYKLSEAVWGEKAKEALAAARSQNDGAVTKSKKGQSNKQKVDGNSKGGTPKEAAASTASQNGDSQKGSKKGQAIKEKTDRDVKSRLSKEATATGTPSKSKKWDNQNEELDKDAKSGDLGKSKREKTDKGKKDIDRDSLKSKEAAAANQNGGTLTKNKEGETHDDEVERDANVEVTRRGFDELQGLYSNLAAYVEEIEAQNPCGETLKRAFEFIGDEKAQSLEYKVKRQRVSEAKAQLRRADVKKDVLNTLMSLVD

SEQ ID NO: 85064 - protein, 126 aa, Setaria italica
  Transcript Sequence Number=SeqID_19090
  Subcellular localization annotation: CTP_CleavageSite=43; ConfidenceScore=5.37e-01
PTPPPPPPPLETSLSPSIAGLSNSPSTLPPWLSESESPPPAAVSQLIWSVSKPERFPSKTTPGLIWKRPGASALCLRRPLDVGDTRAPPPSIPDPTIPVIPHAVRPNKRPAIPSGAPQEDEGSAIR

SEQ ID NO: 85065 - protein, 159 aa, Setaria italica
  Transcript Sequence Number=SeqID_19091
  Gene Ontology: Mol. function=histone-lysine N-methyltransferase activity; Cellular component=nucleus
  Homolog annotation: Hit_ID=Q8L819; Match level="QueryCoverage=100%, HitCoverage=30%, E-value=2e-73, Identity=84%"; Hit description=SET domain-containing protein SET102
APQNSVPEAANHQNQIESQNNSNHSALVPVKSIPKRRGRKPKRVLLKQLDIPDICDRLASSVAREEILYCEEVKNQAASDIDALYDEIRPAIEEHERDSQDSVSTSLAEQWIEASCCKYKADFDLYAAIIKNIASTPLRSKEDVAPREQNGVKYLENGS

SEQ ID NO: 85066 - protein, 508 aa, Setaria italica
  misc_feature (107)..(107): Xaa can be any naturally occurring amino acid
  Transcript Sequence Number=SeqID_19092
  Gene Ontology: Mol. function=protein serine/threonine kinase activity; Cellular component=intrinsic to membrane; Biological process=protein amino acid phosphorylation
  Homolog annotation: Hit_ID=B9RJB4; Match level="QueryCoverage=72%, HitCoverage=66%, E-value=1e-110, Identity=56%"; Hit description =Mitogen-activated protein kinase kinase kinase, putative
  Pfam annotation: Domain name=Pkinase; Domain location=237-490; Score =274.0; E_value=3.4e-79; Accession=PF00069.17; Description=Protein kinase domain
  Pfam annotation: Domain name=Pkinase_Tyr; Domain location=237-488; Score=137.3; E_value=4.7e-38; Accession=PF07714.9; Description =Protein tyrosine kinase
  Pfam module annotation: Pfam domain module=Pkinase::Pkinase_Tyr; Domain location=237-490::237-488
RKSRSNSDLLPRPRLDSSLPADELSPIARAVSAPNVQPVLSVPAPIPEESLHSSSASTATESAEEPIVAAPKESPKAAPAVAAVPPVGGLPFPSPRKGGGEVGIRGXARPPLLSPPPPITALAPPPVRRPVVAVDMTGSAWDIVQSFAPSEERSELGGAHERAHTRQVSDTEEDGVEDGVAAVEGELKELRIGETFEGFTGTSSLSTTNDDDASSTTTEAMFIISPNGKFKRKIKSWMRGALLGSGSFGMVYEGISDEGAFFAVKEVSLLDQGSNAQQSILALEQEIALLSQFEHENIVQYYGTDKEESKLYIFIELVTQGSLSSLYQKYKLRESQVSAYTRQILNGLLYLHERNVVHRDIKCANILVHANGSVKLADFGLAKEMSKINMLRSCKGSVYWMAPEVINPKKMYGPSADIWSLGCTVLEMLTRQIPFPNVEWTNAFFMIGRGERPPIPNYLSKEAQDFIGQCVRVDPENRPSALQLLEHPFVNRPLRASFDSSSPPAIRL

SEQ ID NO: 85067 - protein, 102 aa, Setaria italica
  Transcript Sequence Number=SeqID_19093
  Homolog annotation: Hit_ID=B6TMK9; Match level="QueryCoverage=86%, HitCoverage=26%, E-value=9e-33, Identity=77%"; Hit description =Phosphopantothenate--cysteine ligase
NKNYKNNTYNYKKRQENRTTRNKYKMNVVVANLLATYKEEVVIVSNGERSTIRRCSKDEDLEEHIIKLLEKSHSKYIYSSTDGCNKNNDYETLIPLGIENLA

SEQ ID NO: 85068 - protein, 262 aa, Setaria italica
  misc_feature (16)..(16): Xaa can be any naturally occurring amino acid
  Transcript Sequence Number=SeqID_19094
  Gene Ontology: Mol. function=oxidoreductase activity
  Homolog annotation: Hit_ID=B0BLJ7; Match level="QueryCoverage=75%, HitCoverage=37%, E-value=6e-86, Identity=77%"; Hit description =CM0545.530.nc protein (Fragment)
RTTYMFTYVDPKIRGXPKLEELLEVFWNLMPAYQDVVLENLDIRRVIFGIFPTYRDSPLPAAFDRILQVGDASGIQSPVSFGGFGSLTRHLGRLSNGIYEAVEGDFLDAHSLRLLNPYMPNLSASWLFQRAMSVQPDINVSPTFINELLFANFQSMQKLGDSVLRPFLQDVIQFGPLVKTLGLVMLTRPQLLPSIFKQVGLGVILDWSGHFLMLGFYTFLSTFIDPVTRSWVESLPPRDKYQWKQYLEAWRYGAGLDYRQGE

SEQ ID NO: 85069 - protein, 245 aa, Setaria italica
  Transcript Sequence Number=SeqID_19095
  Gene Ontology: Mol. function=phosphopantothenate--cysteine ligase activity; Cellular component=membrane
  Homolog annotation: Hit_ID=B6TMK9; Match level="QueryCoverage=96%, HitCoverage=71%, E-value=1e-117, Identity=85%"; Hit description =Phosphopantothenate--cysteine ligase
  Pfam annotation: Domain name=DFP; Domain location=24-200; Score =127.0; E_value=6.3e-35; Accession=PF04127.7; Description=DNA pantothenate metabolism flavoprotein
CCYAYACSGSCQPFCRFLPDDSFLNFFDVTTESKVRVVESHTTVVKKAIGEYSKAIEGGSLLKLPFTTIFEYLQLLKMVATSMSSVGLQGMFYLAAAVSDFYVPWDSMAKHKIQSAGGPLDMKLSQVPKMLSVLRNQWAPLAFCISFKLETDSDILIQKAEMALNKYKMNVVVANLLATYKEEVVIVSNGERSTIRRCSKDEDLEEHIIKLLEKSHSKYIYSSTDGCNKNNDYETLIPLGIENLA

SEQ ID NO: 85070 - protein, 517 aa, Setaria italica
  misc_feature (115)..(115): Xaa can be any naturally occurring amino acid
  misc_feature (351)..(351): Xaa can be any naturally occurring amino acid
  Transcript Sequence Number=SeqID_19096
  Gene Ontology: Cellular component=nuclear pore; Biological process =nucleocytoplasmic transport
  Homolog annotation: Hit_ID=Q2UY13; Match level="QueryCoverage=94%, HitCoverage=38%, E-value=1e-132, Identity=50%"; Hit description =Nucleoporin
  Pfam annotation: Domain name=Nup133_N; Domain location=78-516; Score =81.7; E_value=2.7e-21; Accession=PF08801.3; Description=Nup133 N terminal like
  Subcellular localization annotation: CTP_CleavageSite=52; ConfidenceScore=5.60e-01
SSTAGTGRRRPLPPPPAAPTHSPSPRGFAIPDRPATGTPAPWTSSSLLARISASKRTEKAGDSDQIQPVHVAEFPQVVRNAQAGLLQKNFSGKNMFAGGIDKETSLAWMICGNEXFIWNYSASVAKDCLVLDVPSSLIGYKDVKPLPGIQWTVCIMRWHSSGASTRNSGEILYRKSSTGVILCNKRTQAVAYWPDIYAEFNRSLVLSSPFDELSASDGASDRFRFNSIIAAAVPGGTHECIAIASEPTGALWLFKCSPEGIRQEKVLRDTLGDGGADHSQKSNGGRSLAWLPSNVSSEGSDRKFFLLTNNEVQCWSVSLLHDINIKKLGSQEIVGTDGDASIKKDIAGQKXNIWLLDMQIDEHGKEFSILVATFCKDRVSGSNYTQYSLLTMLYKPNQKFSSEDNVVKVERFLEKKAPSQVIIPKARVEDEEFLFSMRLRTGGKPSGSVIILSGDGTATVAIYWRGSTRLYQFDLPWDSGKVLDASVIPSPEDGDEGAWVVLTEKAGVWAIPEKAVL

SEQ ID NO: 85071 - protein, 220 aa, Setaria italica
  misc_feature (17)..(17): Xaa can be any naturally occurring amino acid
  Transcript Sequence Number=SeqID_19097
  Gene Ontology: Cellular component=plasma membrane
  Homolog annotation: Hit_ID=Q9LM19; Match level="QueryCoverage=79%, HitCoverage=56%, E-value=7e-12, Identity=30%"; Hit description =F16L1.4 protein
VTCVGQIKARPAKPKAXGGGGGSGDGKKSKKATWLQALGIKKDAMALLDALHGAFRFNVAGCFGSFPGAVGVGYTSGEDDDDEEGEERAEKETEHGEALARWFMVLEEGKKVSAKKLQGQEPQQNQGEEDKEQDVVPPANALMLMRCRSAPAKGLARRLEAEDSEDVKIAKKTPEEENEKESLVLMTYSPDFFKVSLDIAKETWIVGGDDAVLRCRSWKR

SEQ ID NO: 85072 - protein, 147 aa, Setaria italica
  Transcript Sequence Number=SeqID_19098
NNMSLLILIYNHFHITQSAAPLAIIDRQFFLLSILSQVSLICCRSSDASGWLTGFIFPSRHNCWLYIGRQAKEARTASGSGMPGLAGTCCEEAACQAQSAAAGKRHVGAECDRAGATGCAVDGPTSAPRGPAEIRHGACRAAAAEQN

SEQ ID NO: 85073 - protein, 224 aa, Setaria italica
  misc_feature (204)..(204): Xaa can be any naturally occurring amino acid
  Transcript Sequence Number=SeqID_19099
  Gene Ontology: Mol. function=DNA binding; Cellular component=nucleus
  Homolog annotation: Hit_ID=Q655Y7; Match level="QueryCoverage=85%, HitCoverage=43%, E-value=5e-87, Identity=82%"; Hit description =Hydroxyproline-rich glycoprotein-like
GGRGGRGRGFRGRGRGRGRTRDDRRSVDLDDRQAIYLGDNADGEKLEKKLGEDKMKILEQAFMEAADNALPHPMENAYQEACHTNNMIEFEPQYHVNFANPDIDEKPQMSLEEMLQKVKPFIVAYEGIQNQEEWEEAVKDVMARAPHMKELIDMYSGPDVVTAKQQEEELQRVANTLPENIPSSVKRFTDKTLLSLKNNPGWGXFDKKCQFMDKFTRIVSEQYK

SEQ ID NO: 85074 - protein, 216 aa, Setaria italica
  Transcript Sequence Number=SeqID_19100
  Gene Ontology: Mol. function=carbonate dehydratase activity; Cellular component=plasma membrane; Biological process=carbon utilization
  Homolog annotation: Hit_ID=B6TGY7; Match level="QueryCoverage=98%, HitCoverage=68%, E-value=1e-98, Identity=82%"; Hit description =Carbonic anhydrase
  Pfam annotation: Domain name=Pro_CA; Domain location=118-214; Score =80.3; E_value=7e-21; Accession=PF00484.11; Description=Carbonic anhydrase
  Subcellular localization annotation: CTP_CleavageSite=50; ConfidenceScore=5.14e-01
MANGLLLRGASPCLRPAAPATAGSSADPVRGHGAVAIGDSGPRGVALRVRGSSRRDFSFITMASRDHSGLTRQLLDFQHDTVDAVGAEHDPFMELKARFMDFKQRNYVENFSNYQSLAEQQTPKFMVVACADSRVCPTGILGFQPGEAFTVRNIANLVPPYEHGGSETSAALEFAVNTLQVENVLVVGHSRCGGIQALMSMKDDSTSGSFNKKIGF

SEQ ID NO: 85075 - protein, 220 aa, Setaria italica
  Transcript Sequence Number=SeqID_19101
  Gene Ontology: Mol. function=carbonate dehydratase activity; Cellular component=plasma membrane; Biological process=carbon utilization
  Homolog annotation: Hit_ID=B7ZYT1; Match level="QueryCoverage=94%, HitCoverage=83%, E-value=1e-116, Identity=93%"; Hit description =Carbonic anhydrase
  Pfam annotation: Domain name=Pro_CA; Domain location=30-198; Score =206.5; E_value=7.3e-59; Accession=PF00484.11; Description=Carbonic anhydrase
MYQFLLLLLFFADFKQRNYVENFSNYQSLAEQQTPKFMVVACADSRVCPTGILGFQPGEAFTVRNIANLVPPYEHGGSETSAALEFAVNTLQVENVLVVGHSRCGGIQALMSMKDDSTSGSFIKNWVSISKSARLSTKAAAGNLSFEMQCKHCEKESINSSLLNLLTYPWIKKRVNEGTLNLHGGYYNFIDCTFEKWTLVYREGLEGGSKYAIKNRSTWS

SEQ ID NO: 85076 - protein, 232 aa, Setaria italica
  Transcript Sequence Number=SeqID_19102
  Gene Ontology: Mol. function=hydrolase activity
  Homolog annotation: Hit_ID=B4FK75; Match level="QueryCoverage=99%, HitCoverage=67%, E-value=1e-110, Identity=81%"; Hit description =Monoglyceride lipase
MSSSNGGRDDGGEDDVLDHEYQEEYVRNSRGMSLFACRWLPGKRRNKQQGPKALVFLCHGYAVECGVTMRGTGERLARAGYAVYGLDYEGHGRSDGLQGYVPDFKALVQDCDDHFTSVVRSHGATVRHRFLLGESMGGAVALLLHRARPDFWTGAVLVAPMCKIADDMRPHPVVVNILRAMTSIIPTWKIVPTNDVIDAAYRTQEKRDEIRGNPYCYKDKPRLKTAFELLKV

SEQ ID NO: 85077 - protein, 166 aa, Setaria italica
  Transcript Sequence Number=SeqID_19103
  Gene Ontology: Mol. function=hydrolase activity
  Homolog annotation: Hit_ID=B4FK75; Match level="QueryCoverage=95%, HitCoverage=46%, E-value=7e-72, Identity=81%"; Hit description =Monoglyceride lipase
LFLLGSYCTSIIPTWKIVPTNDVIDVAYRTQEKRDEIRGNPYCYKDKPRLKTAFELLKVSLDVEANLLHQVSLPFLIVHGGADKVTDPSVSELLYRSAASQDKTLKLYPGMWHALTSGESPNNIRTVFQDIIAWLDHRSYRTTSSMEEVELKARHDDQHHQQHGNK

SEQ ID NO: 85078 - protein, 145 aa, Setaria italica
  Transcript Sequence Number=SeqID_19104
VGRTPSSWYPPPLLAASRAGDPPESSRLRMGDDIAWSEINGVYDRDDSLKENTNPKCLLKNHPHHNNGSSQRFSGNLKPTAAPIIGLSGKLGGARRQHHYPPAIFPKKAKTGGGGRAHKAAVPEPGSPKVSCIGKVLSDRERARL

SEQ ID NO: 85079 - protein, 100 aa, Setaria italica
  Transcript Sequence Number=SeqID_19105
  Gene Ontology: Cellular component=ribosome
  Homolog annotation: Hit_ID=Q6K955; Match level="QueryCoverage=71%, HitCoverage=18%, E-value=6e-32, Identity=92%"; Hit description=60S ribosomal protein-like
  Pfam annotation: Domain name=MRP-L27; Domain location=17-100; Score =52.2; E_value=2e-12; Accession=PF09809.1; Description=Mitochondrial ribosomal protein L27
MPLGLVLGSLGRAMRRKRLSSLDILSSKRAPRDYYKGKNCKPTGFHTRKGGYVIVDEKLPRFVVPDLTDFKLKPYVSQSARDLTASTASSTSAETTENKS

SEQ ID NO: 85080 - protein, 181 aa, Setaria italica
  misc_feature (16)..(16): Xaa can be any naturally occurring amino acid
  misc_feature (132)..(132): Xaa can be any naturally occurring amino acid
  misc_feature (162)..(162): Xaa can be any naturally occurring amino acid
  Transcript Sequence Number=SeqID_19106
DLLPTLVLPRGRDAGXFSVSSWRLVRLGGARYYKHKGLLQSGFSPKERYLLRWMISVGKGQVRNGNRSNTVTSSTRSSTNPQTPPVVTGEVKSAVTQVTPQIKSAKLENTGKQPEMESMSNSGINFGKGLPXFTMKKPFAEVVAGTTAKDSEFPALQQMRPXKPGGRKDERQMNIADQTNG

SEQ ID NO: 85081 - protein, 288 aa, Setaria italica
  Transcript Sequence Number=SeqID_19107
  Gene Ontology: Mol. function=hydrolase activity, acting on acid anhydrides, catalyzing transmembrane movement of substances; Cellular component=integral to membrane; Biological process=copper ion transport
  Homolog annotation: Hit_ID=Q6ZDR8; Match level="QueryCoverage=99%, HitCoverage=29%, E-value=1e-113, Identity=73%"; Hit description =Putative potential copper-transporting ATPase
  Pfam annotation: Domain name=Hydrolase; Domain location=1-157; Score =47.5; E_value=5.3e-11; Accession=PF00702.18; Description=haloacid dehalogenase-like hydrolase
FMEEPGSGAVATIGEKQVSVGTLDWIRRHGVVRNPFPEAEHFGQSVAYVAVDGALAGLICFEDKLREDSRQVISTLSEQGISVYMLSGDKESAAMNVASIVGIQADKVLAEVKPHEKKKFISELQKAHRLVAMVGDGINDTAALASADVGIAMGGGVGAASDVSSVVLMGNRLSQLVDALELSKETMKTVKQNLWWAFLYNIVGLPIAAGALLPVTGTILTPSIAGALMGFSSVGVMANSLLLRVRLSSRQKPSSQAETRKETRKATSDALAGTGDEAVKSYSSKWST

SEQ ID NO: 85082 - protein, 240 aa, Setaria italica
  Transcript Sequence Number=SeqID_19108
  Gene Ontology: Biological process=nuclear mRNA splicing, via spliceosome
  Homolog annotation: Hit_ID=B6TZU2; Match level="QueryCoverage=91%, HitCoverage=59%, E-value=5e-94, Identity=77%"; Hit description =Survival motor neuron containing protein
  Pfam annotation: Domain name=SIP1; Domain location=17-233; Score =150.4; E_value=5.5e-42; Accession=PF04938.4; Description=Survival motor neuron (SMN) interacting protein 1 (SIP1)
EDVEYESDSDDDYDGILKPAFAVDTYPDFESGEPLDGFEYLRRVRWEAKQIPRVKVAKVDLNGARKEQTPYMPEIPDIPKCSPDLGASKQWEDAFITHFSETRLVFSEHDSSDEPSISGGPKISSKPGSSTESQTEPTLTMLHNMDSVARAATLRNYIDMIQSMDSLSRNNGLWLFALCVAVDTPLDAETCASLRSLLRKCATILATKSEMDDEVVMLNILMAISGRYFGQYEIDVTRRL

SEQ ID NO: 85083 - protein, 76 aa, Setaria italica
  Transcript Sequence Number=SeqID_19109
  Subcellular localization annotation: CTP_CleavageSite=45; ConfidenceScore=5.02e-01
MAAAAALALASPLRRLLRAPHPRGAISAPYYGITRGRCSSAIAVAAAAARNSAMKGSVDRNAAEEVRNILDMAERA

SEQ ID NO: 85084 - protein, 252 aa, Setaria italica
  misc_feature (118)..(118): Xaa can be any naturally occurring amino acid
  misc_feature (127)..(127): Xaa can be any naturally occurring amino acid
  Transcript Sequence Number=SeqID_19110
  Gene Ontology: Mol. function=protein binding
  Homolog annotation: Hit_ID=Q94DS2; Match level="QueryCoverage=100%, HitCoverage=46%, E-value=8e-90, Identity=69%"; Hit description =P0460E08.26 protein
VNGAIGATGFPSPSTSRKRKHIDPSLDHSNKEHVAQRNSHLPQKNAVPDGSIPISQSAHPPTLGPFKVSYRPLLADIVQTEDIKDLCKLLVVVSGEAAKAYAGRKTQEERVPEKEDEXGGQKEDERXGSLGSTNHDREGNNQDPDHKASIDDHSSRGTHTGKAVLEESRPNCTDDHKSNRPMSPGTLALMCDEQDTMFTTSQNAIAQQTVAVNQNQSELYAEQERVVLTEFRDCLRKLVTFGRMKEERYSMA

SEQ ID NO: 85085 - protein, 92 aa, Setaria italica
  Transcript Sequence Number=SeqID_19111
VMLRRSLGRRLQLEILLLRYPIGCSLLSLLFIYFSLSYFLMACFCIFFVVLASSSIFALLENTELDRTGGISFQAGSLRTMTFSSLHYSFII

SEQ ID NO: 85086 - protein, 115 aa, Setaria italica
  Transcript Sequence Number=SeqID_19112
RRVGWGKGGGVVEAVPERFVDFDVVFVCYFPGMGISAAALLKSLTKRCSKGARVVMFLDQGRQNFEQHRREHPDVVTSDLPSKSSLEKAASGNKYAITDFVDEPTLYLAVLQYQG

SEQ ID NO: 85087 - protein, 93 aa, Setaria italica
  Transcript Sequence Number=SeqID_19113
LTNLPNLRLPKPSDQRNNYLCSRTSCINQACKYAVSPSRMNECKHIFPVKIKPAKALKSQLEHNALASTPQKVMNSSQGSTLHHLQIPIISKA

SEQ ID NO: 85088 - protein, 305 aa, Setaria italica
  misc_feature (250)..(250): Xaa can be any naturally occurring amino acid
  Transcript Sequence Number=SeqID_19114
  Gene Ontology: Mol. function=binding; Cellular component=plasma membrane
  Homolog annotation: Hit_ID=B9RB32; Match level="QueryCoverage=85%, HitCoverage=33%, E-value=1e-107, Identity=71%"; Hit description =Kinesin light chain, putative
  Pfam annotation: Domain name=TPR_1; Domain location=135-168; Score =9.8; E_value=0.39; Accession=PF00515.20; Description=Tetratricopeptid e repeat
  Pfam annotation: Domain name=TPR_1; Domain location=219-252; Score =3.4; E_value=2.3; Accession=PF00515.20; Description=Tetratricopeptide repeat
  Pfam annotation: Domain name=TPR_1; Domain location=51-84; Score =20.2; E_value=0.0086; Accession=PF00515.20; Description =Tetratricopeptide repeat
  Pfam annotation: Domain name=TPR_1; Domain location=94-127; Score =11.7; E_value=0.23; Accession=PF00515.20; Description=Tetratricopepti de repeat
  Pfam annotation: Domain name=TPR_2; Domain location=135-168; Score =5.2; E_value=7.6; Accession=PF07719.9; Description=Tetratricopeptide repeat
  Pfam annotation: Domain name=TPR_2; Domain location=177-210; Score =4.0; E_value=11; Accession=PF07719.9; Description=Tetratricopeptide repeat
  Pfam annotation: Domain name=TPR_2; Domain location=219-252; Score =4.0; E_value=11; Accession=PF07719.9; Description=Tetratricopeptide repeat
  Pfam annotation: Domain name=TPR_2; Domain location=51-84; Score =14.7; E_value=0.39; Accession=PF07719.9; Description=Tetratricopeptid e repeat
  Pfam annotation: Domain name=TPR_2; Domain location=94-127; Score =16.9; E_value=0.083; Accession=PF07719.9; Description=Tetratricopepti de repeat
  Pfam module annotation: Pfam domain module=TPR_1::TPR_1::TPR_1::TPR _1::TPR_2::TPR_2::TPR_2::TPR_2::TPR_2; Domain location=135-168::219 -252::51-84::94-127::135-168::177-210::219-252::51-84::94-127
MIGIWRWCKVEPWEEFMTFWGVDVNGARGESCNCENATLEMVQGENHAIVASVFVRLADLYNKTGKLRESKSYCENALKIYQKPIPGASLEKIATGFTDVSAIYETLNEHEQALKLLQKALKMYNNSACQQSTIAGIEAQMGVLHYILGDYGQAYDPFKSAIAKLRTCGEKKSAFFAIALNQMGLACVQRYSINEGAELFEEARTVLEQEYRPYHPNTLGVYSNLAGTYDAMGHLDDAIEILEYVVGMRXEEKLGTANPDVDDEKRRLGELLKEAGRVRSRKAKSLENLLETNPYTVTKRNTVAA

SEQ ID NO: 85089 - protein, 711 aa, Setaria italica
  Transcript Sequence Number=SeqID_19115
  Gene Ontology: Mol. function=binding; Cellular component=plasma membrane
  Homolog annotation: Hit_ID=Q1EP15; Match level="QueryCoverage=100%, HitCoverage=99%, E-value=0.0, Identity=65%"; Hit description =Glycoside hydrolase family 17 protein
  Pfam annotation: Domain name=TPR_1; Domain location=249-282; Score =3.5; E_value=2.2; Accession=PF00515.20; Description=Tetratricopeptide repeat
  Pfam annotation: Domain name=TPR_1; Domain location=292-325; Score =4.1; E_value=1.9; Accession=PF00515.20; Description=Tetratricopeptide repeat
  Pfam annotation: Domain name=TPR_1; Domain location=334-367; Score =11.3; E_value=0.26; Accession=PF00515.20; Description=Tetratricopepti de repeat
  Pfam annotation: Domain name=TPR_1; Domain location=416-449; Score =26.0; E_value=0.00015; Accession=PF00515.20; Description =Tetratricopeptide repeat
  Pfam annotation: Domain name=TPR_1; Domain location=458-491; Score =20.2; E_value=0.0086; Accession=PF00515.20; Description =Tetratricopeptide repeat
  Pfam annotation: Domain name=TPR_1; Domain location=501-534; Score =12.7; E_value=0.17; Accession=PF00515.20; Description=Tetratricopepti de repeat
  Pfam annotation: Domain name=TPR_1; Domain location=542-575; Score =14.6; E_value=0.1; Accession=PF00515.20; Description=Tetratricopeptid e repeat
  Pfam annotation: Domain name=TPR_1; Domain location=584-617; Score =3.4; E_value=2.3; Accession=PF00515.20; Description=Tetratricopeptide repeat
  Pfam annotation: Domain name=TPR_1; Domain location=626-659; Score =10.1; E_value=0.36; Accession=PF00515.20; Description=Tetratricopepti de repeat
  Pfam annotation: Domain name=TPR_2; Domain location=206-239; Score =0.1; E_value=33; Accession=PF07719.9; Description=Tetratricopeptide repeat
  Pfam annotation: Domain name=TPR_2; Domain location=249-282; Score =3.5; E_value=12; Accession=PF07719.9; Description=Tetratricopeptide repeat
  Pfam annotation: Domain name=TPR_2; Domain location=292-325; Score =6.9; E_value=4.8; Accession=PF07719.9; Description=Tetratricopeptide repeat
  Pfam annotation: Domain name=TPR_2; Domain location=334-367; Score =15.5; E_value=0.22; Accession=PF07719.9; Description=Tetratricopeptid e repeat
  Pfam annotation: Domain name=TPR_2; Domain location=416-449; Score =19.7; E_value=0.012; Accession=PF07719.9; Description=Tetratricopepti de repeat
  Pfam annotation: Domain name=TPR_2; Domain location=458-491; Score =14.7; E_value=0.39; Accession=PF07719.9; Description=Tetratricopeptid e repeat
  Pfam annotation: Domain name=TPR_2; Domain location=501-534; Score =17.8; E_value=0.044; Accession=PF07719.9; Description=Tetratricopepti de repeat
  Pfam annotation: Domain name=TPR_2; Domain location=542-575; Score =13.0; E_value=0.82; Accession=PF07719.9; Description=Tetratricopeptid e repeat
  Pfam annotation: Domain name=TPR_2; Domain location=584-617; Score =7.1; E_value=4.4; Accession=PF07719.9; Description=Tetratricopeptide repeat
  Pfam annotation: Domain name=TPR_2; Domain location=626-659; Score =7.7; E_value=3.7; Accession=PF07719.9; Description=Tetratricopeptide repeat
  Pfam module annotation: Pfam domain module=TPR_1::TPR_1::TPR_1::TPR _1::TPR_1::TPR_1::TPR_1::TPR_1::TPR_1::TPR_2::TPR_2::TPR_2::TPR _2::TPR_2::TPR_2::TPR_2::TPR_2::TPR_2::TPR_2; Domain location=249 -282::292-325::334-367::...
  Pfam module annotation: Domain location=416-449::458-491::501 -534::542-575::584-617::626-659::206-239::249-282::292-325::334 -367::416-449::458-491::501-534::542-575::584-617::626-659
MPGITVDGLVTEEALNGVNSSQNNEHLSAPKSTAASTMAASMQSEALEMHVEGSGAGEPSIEQLYNNVCEMESSSEGGSPSRESFGSDGEESRIDSELRHLVAGEMEAMKVIEEEEENGSVTNALPPAENGTPVKAQSSNSSKKSKKASKSQLESDASVGPNGKASTEDGESEVSKPASRVGRRRKSNANPQNGTEDAGLDNPDLGPFLLKHARDLIASENPRRALKYALRATKSFEKCAGGKPSLNLVMSLHVVAAIYCNLGKYEEAVPVLQRSLEIPVIEEGQEHALAKFSGCMQLGDTYGMLGQTALSLQWYASGLEIQKQTLGEQDPRVGETCRYLAEAHVQALQLDEAQRLCQMALDIHREHGEPASLEETADRRLMGLICDTKGDHEAALEHLVMASMAMVANGQEIEVASVDCSIGDIYLSLGRYDEAVFAYQKALTVFKTSKGENHATVASVFVRLADLYNKTGKLRESKSYCENALKIYQKPIPGTSLEEIATGLTDVSAIYETMNEHEQALKLLQKALKMYNNSAGQQSTIAGIEAQMGVLHYILGNYGEAYDSFKSAIAKLRTCGEKKSAFFGIALNQMGLACVQRYSINEAAELFEEARTVLEQEYGPYHPDTLGVYSNLAGTYDAMGRLDEAIEILEYVVGMREEKLGTANPDVDDEKRRLGELLKEAGRVRSRKAKSLENLLETNPYTVTKRNTVAA

SEQ ID NO: 85090 - protein, 163 aa, Setaria italica
  misc_feature (81)..(81): Xaa can be any naturally occurring amino acid
  Transcript Sequence Number=SeqID_19116
  Gene Ontology: Mol. function=succinate-CoA ligase (GDP-forming) activity; Cellular component=mitochondrion; Biological process =tricarboxylic acid cycle
  Homolog annotation: Hit_ID=Q6K9N6; Match level="QueryCoverage=93%, HitCoverage=36%, E-value=2e-81, Identity=98%"; Hit description =Succinyl-CoA ligase [GDP-forming] subunit beta, mitochondrial
  Pfam annotation: Domain name=Ligase_CoA; Domain location=42-162; Score=221.3; E_value=2.5e-63; Accession=PF00549.11; Description=CoA -ligase
PINKLVAADAKLNFDDNAAFRQKEIFALRDTTQEDPREVAAAKADLNYIGLDGEIGCMVNGAGLAMATMDIIKLHGGTPAXFLDVGGSASEGQVVEAFKILTSDDRVKAILVNIFGGIMKCDVIASGIVNAAKQVDLKVPVVVRLEGTNVDQGKEDSSRTTTG

SEQ ID NO: 85091 - protein, 422 aa, Setaria italica
  Transcript Sequence Number=SeqID_19117
  Gene Ontology: Mol. function=succinate-CoA ligase (GDP-forming) activity; Cellular component=mitochondrion; Biological process =tricarboxylic acid cycle
  Homolog annotation: Hit_ID=Q6K9N6; Match level="QueryCoverage=100%, HitCoverage=100%, E-value=0.0, Identity=95%"; Hit description =Succinyl-CoA ligase [GDP-forming] subunit beta, mitochondrial
  Pfam annotation: Domain name=ATP-grasp_2; Domain location=29-238; Score=262.9; E_value=7.5e-76; Accession=PF08442.2; Description=ATP -grasp domain
  Pfam annotation: Domain name=Ligase_CoA; Domain location=281-417; Score=287.7; E_value=2.6e-83; Accession=PF00549.11; Description=CoA -ligase
  Pfam module annotation: Pfam domain module=ATP-grasp_2::Ligase_CoA; Domain location=29-238::281-417
MVRGSLGKLASRALSVAGRWQHQQLRRLNIHEYQGAELMGKYGINVPRGAAVGSVQELKDALKNAFPEEKEIVVKSQILAGGRGLGTFKSGLKGGVHIVKAEEAEGIASKMLGQILVTKQTGPEGKIVSKVYLCEKLSLTNEMYFAITLDRKSAGPLIIACSKGGTSIEDLAEKYPDMIIKVPIDVFKGITDEDAAKVVDGLALKAADRQSSIEQIKKLYELFCKCDCTLLEINPLAETADNKLVAADAKLNFDDNAAFRQKEIFALRDTTQEDPREVAAAKADLNYIGLDGEIGCMVNGAGLAMATMDIIKLHGGTPANFLDVGGSASEGQVVEAFKILTSDDRVKAILVNIFGGIMKCDVIASGIVNAAKQVDLKVPVVVRLEGTNVDQGKRILKESGMTLITAEDLDDAAEKAVKASVK

SEQ ID NO: 85092 - protein, 273 aa, Setaria italica
  Transcript Sequence Number=SeqID_19118
  Gene Ontology: Mol. function=metal ion binding
  Homolog annotation: Hit_ID=B9SY31; Match level="QueryCoverage=57%, HitCoverage=64%, E-value=1e-50, Identity=60%"; Hit description =Protein binding protein, putative
  Pfam annotation: Domain name=zf-C3HC4; Domain location=48-90; Score =36.7; E_value=9.2e-08; Accession=PF00097.17; Description=Zinc finger, C3HC4 type (RING finger)
MAAAAAAAAALSSSEGIVGVPAALPLDKAAAASASGSGGDRVVDCGVCAICLDKIALQETALVKGCDHAYCVTCILRWASYKQTPLCPQCKHPFEFLSVHRSLDGCLHDYLFEESVCLLLRAAWFEPLIVEPHEEALEEDEFYHQYQYDDDEDDLDEETYYMSRSPSFRIGNRRWGDNGYIRGGRREARPVNNDAAAGPSRTPKKKEKAASTSGSGSGSVSKDVAGRRAKRAQKREAADKAAAEKHLKHLQRLGLAKAPAPEVPAEAGPQVNE

SEQ ID NO: 85093 - protein, 138 aa, Setaria italica
  Transcript Sequence Number=SeqID_19119
  Gene Ontology: Mol. function=transferase activity, transferring phosphorus-containing groups; Cellular component=membrane; Biological process=two-component signal transduction system (phosphorelay)
  Homolog annotation: Hit_ID=A1A699; Match level="QueryCoverage=73%, HitCoverage=10%, E-value=2e-47, Identity=84%"; Hit description =Histidine kinase
  Pfam annotation: Domain name=HATPase_c; Domain location=22-132; Score= 7.6; E_value=0.014; Accession=PF02518.18; Description=Histidine kinase-, DNA gyrase B-, and HSP90-like ATPase
SFSSLLQLAVFVCDDVPKVVLGDPWRFRQILTNLVGNAVKFTERGHVFVRVCLAENSNVEANQVIHGTMNGKDGKIESTANGAFNTLSGFEAADRRNNWQYFKLLLSDKESLLDDLDGEILNSKIVFLVPFVSYLFWF

SEQ ID NO: 85094 - protein, 195 aa, Setaria italica
  Transcript Sequence Number=SeqID_19120
  Gene Ontology: Mol. function=transferase activity, transferring phosphorus-containing groups; Cellular component=membrane; Biological process=two-component signal transduction system (phosphorelay)
  Homolog annotation: Hit_ID=A1A699; Match level="QueryCoverage=94%, HitCoverage=19%, E-value=1e-90, Identity=88%"; Hit description =Histidine kinase
  Pfam annotation: Domain name=HisKA; Domain location=23-88; Score =84.5; E_value=3.8e-22; Accession=PF00512.17; Description=His Kinase A (phosphoacceptor) domain
DKVSEDCRKMEELKTQAEAADVAKSQFLATVSHEIRTPMNGVLGMLDMLLGTDLTMTQKDYAQTAQMCGRALITLINDVLDRAKIEAGKLELEAVPFDLRSLMDDVISLFSSKSLEKCIELAVFVCDDVPKVVLGDPWRFRQILTNLVGNAVKFTERGHVFVRVCLAENSNVEANQVIHGTMNGKLWVKFLLVFF

SEQ ID NO: 85095 - protein, 77 aa, Setaria italica
  Transcript Sequence Number=SeqID_19121
RVDGSLLKTGLMQINATLSFMILSDTTTEKLNRRKIGKRNDLLLEFSLWCWTCSDFGVFWLTFFLLFYLLDTFCLQF

SEQ ID NO: 85096 - protein, 188 aa, Setaria italica
  misc_feature (29)..(29): Xaa can be any naturally occurring amino acid
  Transcript Sequence Number=SeqID_19122
  Gene Ontology: Mol. function=protein serine/threonine kinase activity; Biological process=protein amino acid phosphorylation
  Homolog annotation: Hit_ID=Q8H4I0; Match level="QueryCoverage=94%, HitCoverage=26%, E-value=9e-62, Identity=63%"; Hit description =Putative receptor-type protein kinase LRK1
  Pfam annotation: Domain name=Pkinase; Domain location=1-149; Score= -107.1; E_value=0.041; Accession=PF00069.17; Description=Protein kinase domain
HRDIKASNVLLDGGMIAHLGDFGLARLYXDHGTDLQTTHVVGTMGYIAPELSRTGKASPLTDVFAFGTFLLEVTCGRRPVSNSVQHGRALLVDRVLEYWHRGALEETVYSRLQGNYNIDEARMVLTLGLMCSHPFPSERPTMRQVMQYLDGDVPLPELIPANMSLLSLMRNQVSFDQSVLQYPWSGDQ

SEQ ID NO: 85097 - protein, 135 aa, Setaria italica
  Transcript Sequence Number=SeqID_19123
  Gene Ontology: Mol. function=protein serine/threonine kinase activity; Biological process=protein amino acid phosphorylation
  Homolog annotation: Hit_ID=Q8H4I0; Match level="QueryCoverage=100%, HitCoverage=20%, E-value=1e-50, Identity=65%"; Hit description =Putative receptor-type protein kinase LRK1
  Pfam annotation: Domain name=Pkinase; Domain location=1-134; Score= -100.1; E_value=0.016; Accession=PF00069.17; Description=Protein kinase domain
VASRLFYLHEKWEQVVIHRDIKASNVLLDGGMIAHLGDFGLARLYDHGTDLQTTHVVGTMGYIAPELSRTGKASPLTDVFAFGTFLLEVTCGRRPVSNSVQHGRALLVDRVLEYWHRGALEETVDSRLQGNYNIE

SEQ ID NO: 85098 - protein, 64 aa, Setaria italica
  misc_feature (22)..(22): Xaa can be any naturally occurring amino acid
  Transcript Sequence Number=SeqID_19124
  Gene Ontology: Mol. function=magnesium ion binding; Cellular component=chloroplast; Biological process=photosynthesis, light harvesting
  Homolog annotation: Hit_ID=Q0H633; Match level="QueryCoverage=98%, HitCoverage=54%, E-value=2e-27, Identity=98%"; Hit description =Putative chloroplast chlorophyll A-B binding protein type II (Fragment)
PDTAAELKVKELKNGRLAMFSXMFGFFVQAIVTGKGPIENLFDHVADPVANNAWAYATNFVPGK

SEQ ID NO: 85099 - protein, 92 aa, Setaria italica
  Transcript Sequence Number=SeqID_19125
  Gene Ontology: Mol. function=magnesium ion binding; Cellular component=chloroplast; Biological process=photosynthesis, light harvesting
  Homolog annotation: Hit_ID=Q10HD0; Match level="QueryCoverage=95%, HitCoverage=33%, E-value=2e-43, Identity=98%"; Hit description =Chlorophyll a-b binding protein, chloroplastic
  Pfam annotation: Domain name=Chloroa_b-bind; Domain location=3-59; Score=-10.8; E_value=0.00015; Accession=PF00504.13; Description =Chlorophyll A-B binding protein
PTRTGGPLGEGLDKVYPGGAFDPLGLADDPDTAAELKVKELKNGRLAMFSMFGFFVQAIVTGKGPIENLFDHVADPVANNAWAYATNFVPGK

SEQ ID NO: 85100 - protein, 370 aa, Setaria italica
  Transcript Sequence Number=SeqID_19126
  Gene Ontology: Mol. function=transporter activity; Cellular component= integral to membrane; Biological process=transport
  Homolog annotation: Hit_ID=Q6EPQ3; Match level="QueryCoverage=100%, HitCoverage=53%, E-value=1e-160, Identity=77%"; Hit description=SPX (SYG1/Pho81/XPR1) domain-containing protein-like
LYALAYDLNSLTVLIVGRLLCGLGSARAVNRRYISDCVPLKTRLQASAGFVSASALGMACGPALAGLLQTKFRIYGLTFNQNTLPGWVMCVAWLVYLCWLWISFKEPGHIATDNSVNSQSSDSDHQVSGNLEDGLGQPLLVDVKERHDEDGEDNDDNEEDPEESHKPATSLAAAYRLLTPSVKVQLLIYFMLKFAMEILLSESSVVTTFYFNWTTSTVAIFLAVLGLTVLTTHTESGSYVTNLFQDRQILVASEIMVLIGIVMSFCFTPQYSVPQYVTSALITFVFSEVLEGVNLSLLSRVMSSRLSRGTYNGGLLSTEAGTLARVAADMTITAAGYLGQSRLLNATLLPSLLICVASIVATFCTYNSLY

SEQ ID NO: 85101 - protein, 558 aa, Setaria italica
  Transcript Sequence Number=SeqID_19127
  Gene Ontology: Mol. function=protein serine/threonine kinase activity; Cellular component=intrinsic to membrane; Biological process=regulation of transcription, DNA-dependent
  Homolog annotation: Hit_ID=Q6K246; Match level="QueryCoverage=100%, HitCoverage=87%, E-value=0.0, Identity=70%"; Hit description =Loricrin-like
VSSARGSDDGSCMDYDIFKLSLGNEGTSKLHKQACDSRRPFEKPGLDLKLSLAPSQSGVTDVDLIRTTALQETFVQPHIMALVPTVDEGSTSARRPHGGMVLSFLNQADRFSGVSLSQAFPVSSNQVQAPAPPTPTVLQLPKSPAACSSGFVHSQQRSSSTKVCSYSGCVKGARGSSGRCIAHGGGRRCQKDGCNKGAEGKTIFCKAHGGGRRCDYLGCTKSAEGRTDYCIAHGGGRRCSQEGCKRAARGKSGRCIKHGGGKRCQKLNCTKSAEGRSGMCIAHGGGRRCQHTDCGKGAQGSTNFCKAHGGGKRCTHPDCSKGAEGSTPFCKNHGGGKRCSAEGCTKSVHGGTQFCVAHGGGKRCIVEGCRKSARGRTDRCVGHGGGKRCQSTGCGKSAQGSTDFCKAHGGGRRCLWGQPGSDLGSGGAPCDRLARGKRCLCDQHNALVDDNSVHGGASFGVFSMVSDALSHGASPPSAGTSMHSFFMHPVEAPRRAPASAHEGRVHGGNFMPMLDGGVSLGKKPTNNVDAGSSTSAARSWKSSGDIEKPSSSARRSWL

SEQ ID NO: 85102 - protein, 526 aa, Setaria italica
  Transcript Sequence Number=SeqID_19128
  Gene Ontology: Mol. function=DNA-directed DNA polymerase activity; Cellular component=nucleus; Biological process=nucleobase, nucleoside, nucleotide and nucleic acid metabolic process
  Homolog annotation: Hit_ID=Q9LRE6; Match level="QueryCoverage=100%, HitCoverage=47%, E-value=0.0, Identity=90%"; Hit description=DNA polymerase delta catalytic subunit
  Pfam annotation: Domain name=DNA_pol_B; Domain location=1-433; Score =625.5; E_value=5.1e-185; Accession=PF00136.13; Description=DNA polymerase family B
QGSGQDTFEGATVLEARAGFYEKPIATLDFASLYPSIMMAYNLCYCTLVPPEDARKLNLPPESLNKTPSGEIFVKPELQKGILPEILEELLAARKRAKADLKEAKDPLERAVLDGRQLALKISANSVYGFTGATVGQLPCLEISSSVTSYGRQMIEHTKKLVEDKFTTVGGYEHNAEVIYGDTDSVMVQFGASTVEDAMKLGREAADYISGTFTKPIKLEFEKVYFPYLLISKKRYAGLYWTNPEKFDKMDAKGIETVRRDNCLLVKNLVTECLHKILVDRDIPGAVQYVKNTISDLLMNRVDLSLLVITKGLTKTGEDYAVKAAHVELAERMRKRDPATAPTVGDRVPYVIIKAAKGAKAYEKSEDPIYVLDNNIPIDPQYYLENQISKPLLRIFEPILKNASKELLHGSHTRSVSISTPSNSGIMKFAKKHLTCLGCKAVISGASQTLCSHCKGREAELYCKTVANVSDLEVLFGRLWTQCQECQGSLHQDVLCTSRDCPIFYRRRKAQKDMAEARLQLDRWDF

SEQ ID NO: 85103 - protein, 218 aa, Setaria italica
  Transcript Sequence Number=SeqID_19129
  Gene Ontology: Mol. function=metal ion binding
  Homolog annotation: Hit_ID=Q43479; Match level="QueryCoverage=98%, HitCoverage=96%, E-value=3e-97, Identity=77%"; Hit description=ES43 protein
  Pfam annotation: Domain name=BAH; Domain location=21-138; Score =142.0; E_value=1.8e-39; Accession=PF01426.10; Description=BAH domain
  Pfam annotation: Domain name=PHD; Domain location=142-191; Score =55.9; E_value=1.5e-13; Accession=PF00628.21; Description=PHD-finger
  Pfam module annotation: Pfam domain module=BAH::PHD; Domain location =21-138::142-191
MAKSRPPKRILESYTIKGSDRVIKPGDCVLMRAYDASKPPYVARVEAIEAAGSRGTNVRVRVRWYYRPEESIGGRRPFHGSKEVFLSDHYDLQSADTIEGKCNVHSFRSYTKLDSVNAEDFFCRFEYKSATGSFVPDRIAVFCKCEMPYNPDDLMIQCEECSDWFHPACIGMTIKEAKKLEHFFCQTCTAENGKMAENSHEATAQSEEKPVESKRRRR

SEQ ID NO: 85104 - protein, 131 aa, Setaria italica
  misc_feature (30)..(30): Xaa can be any naturally occurring amino acid
  Transcript Sequence Number=SeqID_19130
  Gene Ontology: Mol. function=secondary active sulfate transmembrane transporter activity; Cellular component=integral to membrane; Biological process=sulfate transport
  Homolog annotation: Hit_ID=B6UC24; Match level="QueryCoverage=100%, HitCoverage=19%, E-value=1e-65, Identity=90%"; Hit description =Sulfate transporter 1.2
  Pfam annotation: Domain name=Sulfate_transp; Domain location=1-131; Score=-55.1; E_value=1e-07; Accession=PF00916.12; Description =Sulfate transporter family
LSHAAIVGFMGGAAITIALQQLKYVLGIKXFTKETDIVSVMESVWGSVHHGWNWQTVVIGFTFLAFLLLAKYIGKKNKKYFWVPAIAPITSVILATLFVYLFRADKHGVQIVNNIKKGINPSSVHKIYFTG

SEQ ID NO: 85105 - protein, 109 aa, Setaria italica
  misc_feature (17)..(17): Xaa can be any naturally occurring amino acid
  Transcript Sequence Number=SeqID_19131
  Gene Ontology: Mol. function=serine-type endopeptidase activity; Cellular component=intracellular; Biological process=protein modification process
  Homolog annotation: Hit_ID=Q0WRN6; Match level="QueryCoverage=100%, HitCoverage=99%, E-value=5e-54, Identity=88%"; Hit description =Polyubiquitin 4 UBQ4
  Pfam annotation: Domain name=ubiquitin; Domain location=1-52; Score =56.7; E_value=9.1e-14; Accession=PF00240.15; Description=Ubiquitin family
  Pfam annotation: Domain name=ubiquitin; Domain location=60-109; Score= 53.7; E_value=7e-13; Accession=PF00240.15; Description=Ubiquitin family
  Pfam module annotation: Pfam domain module=ubiquitin::ubiquitin; Domain location=1-52::60-109
DNVNAKIQDKEGIPPDXQQRLIFAGKQLEDGRTLADYNIQKESTLHLVLRLRGGMQIFVKTLTGKTITLEVESSDTIDNVKAKIQDKEGIPPDQQRLIFAGKQLEDGRT

SEQ ID NO: 85106 - protein, 98 aa, Setaria italica
  misc_feature (11)..(11): Xaa can be any naturally occurring amino acid
  Transcript Sequence Number=SeqID_19132
  Gene Ontology: Mol. function=strictosidine synthase activity; Cellular component=plasma membrane; Biological process=biosynthetic process
  Homolog annotation: Hit_ID=B6TT85; Match level="QueryCoverage=100%, HitCoverage=28%, E-value=1e-36, Identity=78%"; Hit description =Strictosidine synthase 3
RNVAMCAPEKXKLVVPESVCGRPLGLQFHRQSGDLYVADAYLGLLRVPARGGLAEVVAAEAGGEPFNFLNGLDVDQRTGDVYFTDSSTTYRRSDYLLV

SEQ ID NO: 85107 - protein, 76 aa, Setaria italica
  Transcript Sequence Number=SeqID_19133
  Gene Ontology: Mol. function=ubiquitin-protein ligase activity; Cellular component=ubiquitin ligase complex; Biological process =ubiquitin-dependent protein catabolic process
  Homolog annotation: Hit_ID=B9RJ04; Match level="QueryCoverage=97%, HitCoverage=17%, E-value=8e-18, Identity=59%"; Hit description =Ubiquitin-protein ligase, putative
WVVVLDRLCGCAEGRAALLAHGAGVATVGWKAFRVSDVATDKAVRVLRSVARHAATPAVVQEMAHTGVVGTLCAVA

SEQ ID NO: 85108 - protein, 52 aa, Setaria italica
  Transcript Sequence Number=SeqID_19134
MMANSGQAVVDIDEAGGEAMRPPALPPVPYVLNFTDLSYSVKKGGGLLGCLR

SEQ ID NO: 85109 - protein, 82 aa, Setaria italica
  Transcript Sequence Number=SeqID_19135
  Gene Ontology: Mol. function=nucleic acid binding
  Homolog annotation: Hit_ID=B9RHF9; Match level="QueryCoverage=91%, HitCoverage=14%, E-value=3e-23, Identity=69%"; Hit description=Poly -A binding protein, putative
MQESGHAEVQKDSQRAAPSVAVSYSTAHPTEDADSRTLYVSNVHFAATKDSLSRHFNKFGAVLKVVIVTNAATGQPTGSVYY

SEQ ID NO: 85110 - protein, 578 aa, Setaria italica
  Transcript Sequence Number=SeqID_19136
  Gene Ontology: Mol. function=nucleic acid binding; Cellular component= cytoplasm; Biological process=mRNA polyadenylation
  Homolog annotation: Hit_ID=B6T7Z7; Match level="QueryCoverage=97%, HitCoverage=77%, E-value=1e-62, Identity=35%"; Hit description=RNA recognition motif family protein
  Pfam annotation: Domain name=RRM_1; Domain location=423-492; Score =78.4; E_value=2.6e-20; Accession=PF00076.14; Description=RNA recognition motif. (a.k.a. RRM, RBD, o
LNSVHTTESSTATRGRNKREWKGIGRDGNENFPLRSVLTDILHGEEKRTQKSNEIRHPLSKQQNGRKRERDDEPQQTKRDVSSRPMIGGGASRRLLQFAVRDAVKAVQPTSSSSEPASKRLRSVVSTTSAENMHDRRSERSQDNLSDRTSARSQDNPSDRRSARSQDNPSERRSERTRPVLQLQGAALALRAAAEAAADSTKVRSTGSVFKRLGHGNVVKQPSRSREEKRDYEDFEPVMAVDERDSDRYVNNEESEEESGELTIADRVAAMNVDLSSEDDMERDEGISRYQTCVSPDGAFSSFEDKKALSAKCSGELETDAIRPSGVIDKERSVPSSTETASKAVPISVDVNTVVPLSYETPKDVHVVEKPYTPMNSNATSVATNAKESGHAEVQKDSQRAAPSVAVSYSTAHPTEDADSRTLYVSNVHFAATKDSLSRHFNKFGAVLKVVIVTNAATGQPTGSAYVEFLHKESAERALSLNGTSFMTRILKVVRRSSHEAAHFYGWPGSGRSSLYGRHSRMAYPRAVLPGGSFRGRAPMKPGARSLQWKREPSGTDSGTKTDMSVPLSSEQVLPPAT

SEQ ID NO: 85111 - protein, 75 aa, Setaria italica
  Transcript Sequence Number=SeqID_19137
  Gene Ontology: Mol. function=phosphotransferase activity, alcohol group as acceptor
MLVSHRSGSVCFLIHKYGYRVEKSLLISWFEASCKALRSVLSHANAIKFQDSILWLLRALKEFSMVLMFNPREES

SEQ ID NO: 85112 - protein, 211 aa, Setaria italica
  Transcript Sequence Number=SeqID_19138
  Gene Ontology: Mol. function=protein binding; Cellular component =membrane; Biological process=vesicle-mediated transport
  Homolog annotation: Hit_ID=Q946Y7; Match level="QueryCoverage=99%, HitCoverage=89%, E-value=1e-67, Identity=56%"; Hit description =Syntaxin-61
  Pfam annotation: Domain name=SNARE; Domain location=148-210; Score =49.1; E_value=1.7e-11; Accession=PF05739.11; Description=SNARE domain
  Pfam annotation: Domain name=Syntaxin-6_N; Domain location=6-99; Score=153.2; E_value=7.9e-43; Accession=PF09177.3; Description =Syntaxin 6, N-terminal
  Pfam module annotation: Pfam domain module=SNARE::Syntaxin-6_N; Domain location=148-210::6-99
MTPAQDPFYIVKDEIQDSIDKVQDTFNQWKQTPENTGEYVHLTKELLTSCESIQWQVDELEKAISVAEKDPAYYGLNDAEIRRRRSWTNTARNQVLSLRRNVEAGRQKTLFGHSTNTSESIRSKKHISQDNDEFIASESDQQMLLIKRQDEELDALSASVQRIGGVGLTIHDELVGQEKLLGELSLDMETTSNRLDFVQKRVAMVMKKARL

SEQ ID NO: 85113 - protein, 94 aa, Setaria italica
  Transcript Sequence Number=SeqID_19139
  Gene Ontology: Mol. function=protein binding; Cellular component =membrane; Biological process=vesicle-mediated transport
  Homolog annotation: Hit_ID=Q946Y7; Match level="QueryCoverage=77%, HitCoverage=29%, E-value=2e-22, Identity=69%"; Hit description =Syntaxin-61
  Pfam annotation: Domain name=SNARE; Domain location=7-69; Score=49.0; E_value=1.8e-11; Accession=PF05739.11; Description=SNARE domain
MYIFNRRQDEELDALSASVQRIGGVGLTIHDELVGQEKLLGELSLDMETTSNRLDFVQKRVAMVMKKASLKGQIMMIAFLVILFIILFVLVFLT

SEQ ID NO: 85114 - protein, 58 aa, Setaria italica
  Transcript Sequence Number=SeqID_19140
KILQNIVYDLIIMQVRLYCTPNSMTPTALYLQNNSTVKLSKLITFTSKPFSTNLLNNY

SEQ ID NO: 85115 - protein, 86 aa, Setaria italica
  Transcript Sequence Number=SeqID_19141
  Gene Ontology: Mol. function=methionine-tRNA ligase activity; Cellular component=cytoplasm; Biological process=tRNA aminoacylation for protein translation
  Homolog annotation: Hit_ID=B9RWD7; Match level="QueryCoverage=86%, HitCoverage=10%, E-value=1e-37, Identity=94%"; Hit description =Methionine-tRNA synthetase, putative
MASSSSPPPPPPKLPIPGRRNILITSALPYVNNVPHLGNIIGCVLSADVFARYCRLRGYNALYICGTDEYGTATETKAMEERCSPK

SEQ ID NO: 85116 - protein, 123 aa, Setaria italica
  Transcript Sequence Number=SeqID_19142
  Gene Ontology: Mol. function=substrate-specific transmembrane transporter activity; Cellular component=integral to membrane; Biological process=transmembrane transport
  Homolog annotation: Hit_ID=B6U7I8; Match level="QueryCoverage=99%, HitCoverage=24%, E-value=5e-44, Identity=79%"; Hit description =Carbohydrate transporter/ sugar porter
PDEARRVLARTAGDAAVADRRLQEIVTSVREASKNAAVSGGGKSSSTGVWREILLRPTPAVRRVMLAIVGLQVFQQACGVAALVLYAPRVFSHVGITSERAVLGATVLLGAVKTAAIVVPLFL

SEQ ID NO: 85117 - protein, 62 aa, Setaria italica
  Transcript Sequence Number=SeqID_19143
  Gene Ontology: Mol. function=manganese ion binding; Cellular component=integral to membrane; Biological process=photosynthesis
  Homolog annotation: Hit_ID=B6SQV2; Match level="QueryCoverage=56%, HitCoverage=58%, E-value=2e-11, Identity=91%"; Hit description =Photosystem II core complex proteins psbY
  Pfam annotation: Domain name=PsbY; Domain location=33-61; Score=11.5; E_value=0.0025; Accession=PF06298.3; Description=Photosystem II protein Y (PsbY)
MACAPEASAAVQDLAALAAAAAAPADDNRGLLLLIVVAPAIGWVLFNILQPALNQLNRMRSD

SEQ ID NO: 85118 - protein, 77 aa, Setaria italica
  Transcript Sequence Number=SeqID_19144
MALPTRLVSDSPTRFFFPLPRERQLLISPRPPTPSLQDGKQEKDRHRGRGRHWRPALQSISEAASQSSSSVSEAATS

SEQ ID NO: 85119 - protein, 186 aa, Setaria italica
  Transcript Sequence Number=SeqID_19145
  Homolog annotation: Hit_ID=Q53J17; Match level="QueryCoverage=88%, HitCoverage=93%, E-value=4e-20, Identity=36%"; Hit description =T10O24.15, related
MGNCQAAEAAAVIIQHPGGKVERLYWSTTAAEVMRNNPGHYVALVILRVAADKAAAATTGDAAAAATTGAGAGGGGGGGAKITRVKLLKPKDTLLLGQVYRLITAQEVTKALQARKNEKMQRCEAIRQQHEQLRRGDGGDHGSSDQDGKQEKDRHRGRGRHWRPALQSISEAASQSSSSVSEAATS

SEQ ID NO: 85120 - protein, 65 aa, Setaria italica
  misc_feature (59)..(59): Xaa can be any naturally occurring amino acid
  Transcript Sequence Number=SeqID_19146
MSYQAGYPPPGTAAYPPPGQQQAYVAPPPAYPPSQDAGAYGQQQQHQTTSRGGDGFWKXCCAAIC

SEQ ID NO: 85121 - protein, 241 aa, Setaria italica
  misc_feature (46)..(46): Xaa can be any naturally occurring amino acid
  Transcript Sequence Number=SeqID_19147
  Gene Ontology: Mol. function=protein serine/threonine kinase activity; Cellular component=integral to membrane; Biological process=protein amino acid phosphorylation
  Homolog annotation: Hit_ID=Q94IJ4; Match level="QueryCoverage=97%, HitCoverage=37%, E-value=1e-101, Identity=77%"; Hit description =Somatic embryogenesis receptor-like kinase 2
  Pfam annotation: Domain name=Pkinase; Domain location=3-226; Score =9.8; E_value=4.5e-09; Accession=PF00069.17; Description=Protein kinase domain
  Pfam annotation: Domain name=Pkinase_Tyr; Domain location=1-226; Score=-33.0; E_value=1.6e-11; Accession=PF07714.9; Description =Protein tyrosine kinase
  Pfam module annotation: Pfam domain module=Pkinase::Pkinase_Tyr; Domain location=3-226::1-226
MVVAHRNLLRLVGFCMTSAECLLVYPYMGNGSVASRLRERKPFEPXLDWQTRRRIALGSARGLSCLHDQCDPKIIHRDVKAANILLDEDFEAVVGHFNLAKLMDHKDTDEVTTGVRGTIGHIAPEYLSTGRISEKIDVYGYGMMLLELITGQRVFDLARLANDEDVMLLDWVKGLLNQKRLEMIIDPDIHKSCIDSEVESLIQVALLCTQSSPVDRPQMSEVVRMLEGMDLTRWESGSRQK

SEQ ID NO: 85122 - protein, 81 aa, Setaria italica
  Transcript Sequence Number=SeqID_19148
LLHVCSAYYMFNYVVLHLSLVEFKQGDGCGCSKSSGYAVMHPYVVWHGMTGSFLIATDLLAVLEFRMHPLNSEIAKLALTI

SEQ ID NO: 85123 - protein, 345 aa, Setaria italica
  Transcript Sequence Number=SeqID_19149
  Gene Ontology: Mol. function=drug transporter activity; Cellular component=membrane; Biological process=multidrug transport
  Homolog annotation: Hit_ID=Q9LUH2; Match level="QueryCoverage=96%, HitCoverage=69%, E-value=2e-88, Identity=48%"; Hit description =Aberrant lateral root formation 5
  Pfam annotation: Domain name=MatE; Domain location=130-293; Score =110.2; E_value=6.7e-30; Accession=PF01554.10; Description=MatE
FTEPLLLLLRQDPEVSRAAASFVRCQIPGLFAFSFLQCLLRYLQAQSVVAPLVVCSVAPFAIHVALVHLLVNVLGLGLVGASAAVSATFWVSCLMLLAYVTRSRAFSETWKGFSADAFKYVLPTVKLATPSAVMVCLEYWAFELLVLIAGLLPNSTVSTSLIAMCSSTEAIAYMITFGFSAAVSTRVSNEIGAGNVDRAKNAVSVTLKLSVFLALSFVLLLASGHTLWAGLFSGSATIASEFAAITPLMMVSIVLDSAQGVLSGVARGCGWQHLAAVTNLVAFYFVGMPLALLFAFKLDLRARGLWAGLICGLTCQACALLVITVRTRWSELADAMREEKANYVA

SEQ ID NO: 85124 - protein, 63 aa, Setaria italica
  misc_feature (10)..(10): Xaa can be any naturally occurring amino acid
  Transcript Sequence Number=SeqID_19150
  Subcellular localization annotation: CTP_CleavageSite=26; ConfidenceScore=5.20e-01
AVGSPQICRXPSSSSSPINRIGTRVRVCGGGGCEIKRRRARGSIPSRASRICYAWSLCTGSLE

SEQ ID NO: 85125 - protein, 33 aa, Setaria italica
  Transcript Sequence Number=SeqID_19151
IGAENEQIEQTPFGENISIMPFLQRFLLSGTST

SEQ ID NO: 85126 - protein, 145 aa, Setaria italica
  Transcript Sequence Number=SeqID_19152
  Gene Ontology: Mol. function=peptidyl-prolyl cis-trans isomerase activity; Cellular component=mitochondrial matrix; Biological process=protein folding
  Homolog annotation: Hit_ID=A7DX10; Match level="QueryCoverage=71%, HitCoverage=71%, E-value=1e-51, Identity=90%"; Hit description =Parvulin-type peptidyl-prolyl cis/trans isomerase
  Pfam annotation: Domain name=Rotamase; Domain location=50-142; Score =85.1; E_value=2.5e-22; Accession=PF00639.13; Description=PPIC-type PPIASE domain
MGKDSKPKDAKGKGKAGSSGGDDAGGKGGKGKGGKSADGLGTCTYVKARHVLCEKQGKINEAYKKLQDGWLDSGDKVPPAEFAKVAQEFSECPSGKKGGDLGWFPRGKMAGPFQEVAFNTPVGAVSAPFKSTHGYHFILCEGRKN

SEQ ID NO: 85127 - protein, 81 aa, Setaria italica
  Transcript Sequence Number=SeqID_19153
STDFIVYGLKNCYTVMPIITNNFAMSVGYKFGLQQLVFFHVGAFHSNCFSPLLPLPLNPPFILHEFKKQQAARVDPALHSC

SEQ ID NO: 85128 - protein, 162 aa, Setaria italica
  misc_feature (13)..(13): Xaa can be any naturally occurring amino acid
  misc_feature (45)..(45): Xaa can be any naturally occurring amino acid
  Transcript Sequence Number=SeqID_19154
  Gene Ontology: Mol. function=receptor activity; Cellular component =nucleus; Biological process=proteolysis
  Homolog annotation: Hit_ID=B8K1X3; Match level="QueryCoverage=100%, HitCoverage=40%, E-value=4e-45, Identity=56%"; Hit description =Putative receptor kinase
RHWHPTPEHRKKXPQTQLSGFFYPRYLLDHEDEITAIPDFVGISXPEEVPFPDPSLPFLPGYRWIRSKDSCGGLLLCGCWKVNPRDEFNYVVCNPAADKWVVLPEPPDDGSSVSTIRLCFDPAIFSHFHVFQLLEEDQYGYITGLDIYSSETGAWSHKENGW

SEQ ID NO: 85129 - protein, 673 aa, Setaria italica
  Transcript Sequence Number=SeqID_19155
  Gene Ontology: Cellular component=vacuole
  Homolog annotation: Hit_ID=P93811; Match level="QueryCoverage=17%, HitCoverage=25%, E-value=6e-15, Identity=37%"; Hit description =F19P19.4 protein
LQLFSGERCNYVGSGLRNVSLPADSLGSSSRSFGRHEMGEDEETRRKIEDVVHHCSRRLFTDSDKIGKNFFTSNNNDSMCNDPEQSSVLNGENFESLISDAVMDTPRNGSRLPDVFLEDIEPSHEFPRIPYSCPLPIIDSAAKEIGTTSTEARDNFVGTDAKLSKNGNRNRSAMSGAENPPQCSAKFSDRVPDRHLGSGMNRVSRSSSLKETPCARQPDAVPSVDKIGDRSSSNSKGRRSPLRRMLDPILKPRHSSPVRPSFVPKCHLPVNTTKQSLDMGRSVPQNVQRRSVDMVVNSNYPTEANINQPPHVLLNSARYLQQEKDSPTTRQALLQLAWKNGLPLFMLSYGESDILAATVRKKSISEKDDLESTYAVFTVEEPKKKSGAWIKAGGKNKKHHLLSSIVGELKVTRRKSRCHHTKNIHVHREFVLVGSEFLPSSEESGDSHISGELAAFISALPQQEAETSSQSSSQNVGQNNSAPIGCGCPPLGNFQPCTRNANSGSANVIAVLPDGFHGTSTSGQPLPLIERWKSGGTCDCGGWDEGCILSVLTGAAPENDAIQANQAMDGSQRFELLAQGRSREDRNAFSMISFKEGLYTVEFRSSIALLQAFAMCIVMLHGRFPSRMQVASQAAQEHDLLANHELKTMAASQGRAPTSYVPHRPPLSPVGRA

SEQ ID NO: 85130 - protein, 107 aa, Setaria italica
  Transcript Sequence Number=SeqID_19156
  Gene Ontology: Mol. function=sequence-specific DNA binding; Cellular component=nucleus; Biological process=regulation of transcription, DNA-dependent
  Homolog annotation: Hit_ID=Q6IER9; Match level="QueryCoverage=91%, HitCoverage=32%, E-value=3e-35, Identity=66%"; Hit description=WRKY transcription factor 12
  Pfam annotation: Domain name=WRKY; Domain location=67-107; Score =52.5; E_value=1.6e-12; Accession=PF03106.7; Description=WRKY DNA -binding domain
  Subcellular localization annotation: CTP_CleavageSite=56; ConfidenceScore=5.13e-01
TPSSRGPLDHEVLLSFPAASTSGQQLLQPRKQPGRKPGVRTPRPKRSKKSQLKKVVCEVPVADGGVSTDLWAWRKYGQKPIKGSPYPRGYYKCSSLKACMARKLVER

SEQ ID NO: 85131 - protein, 412 aa, Setaria italica
  Transcript Sequence Number=SeqID_19157
  Gene Ontology: Mol. function=cysteine-type peptidase activity; Cellular component=cytoplasm; Biological process=proteolysis
  Homolog annotation: Hit_ID=B6TMK2; Match level="QueryCoverage=99%, HitCoverage=98%, E-value=1e-142, Identity=66%"; Hit description =Sentrin-specific protease 2
  Pfam annotation: Domain name=Peptidase_C48; Domain location=224-411; Score=186.5; E_value=7.3e-53; Accession=PF02902.11; Description=Ulp1 protease family, C-terminal catalytic domain
  Subcellular localization annotation: CTP_CleavageSite=28; ConfidenceScore=5.27e-01
MNPPLRPLTERRNAASDAPPSPRRFDAPQSHGRPSQRRRRWPFSPLLPENFFAFDMGNFISGLFGGRRPKDDGLGFYKGWCDARSRDLTVITDEETGTGQHLLGRTTKDWSRKAALEAVKGSQRQKSEPFYKKALGEARRNDNRLEERGIKVRLEEERLAGIRKPYKAAEEDLSELFKPLTDEEEKEVHDCFHARGPSSKVLVLHEPSNIEVSKEKFQCLIPGRWLNDEVINLYLELLKEREKREPKRFLKCHFFNTFFYKKLACGKNGYDYKSVKRWTTRRKLGYDLIECNKIFVPVHKDVHWCLAIINMKKNTFQYLDSLGGMDHNVLNMLARYIAEEVKDKSNEVIDTSSWQEDIVDDIPLQQNGWDCGMFMLKYIDFHSRGLSLSFRQKDMEYFRKRTAKEILKLRAD

SEQ ID NO: 85132 - protein, 67 aa, Setaria italica
  Transcript Sequence Number=SeqID_19158
VQAFVLVLMSPYHVKKSRLLTFSVKQIHAYHVKKSRLLTFSVKQIHALKFSDEVQCTLACRDYSHYH

SEQ ID NO: 85133 - protein, 88 aa, Setaria italica
  Transcript Sequence Number=SeqID_19159
  Gene Ontology: Mol. function=protein binding; Cellular component =ribonucleoprotein complex; Biological process=mRNA processing
  Homolog annotation: Hit_ID=Q0WMZ9; Match level="QueryCoverage=95%, HitCoverage=95%, E-value=8e-38, Identity=92%"; Hit description=Sm -like protein
  Pfam annotation: Domain name=LSM; Domain location=13-81; Score=79.0; E_value=1.7e-20; Accession=PF01423.14; Description=LSM domain
MSQNNPSQLLPSELIDRCIGSKIWVIMKGDKELVGTLCGFDVYVNMVLEDVTEYEYTAEGRRITKLDQILLNGNNIAILVPGGSPPDV

SEQ ID NO: 85134 - protein, 89 aa, Setaria italica
  Transcript Sequence Number=SeqID_19160
  Gene Ontology: Mol. function=extracellular-glutamate-gated ion channel activity; Cellular component=integral to membrane; Biological process=ion transport
  Homolog annotation: Hit_ID=Q653Y6; Match level="QueryCoverage=94%, HitCoverage=9%, E-value=1e-28, Identity=80%"; Hit description =Putative ionotropic glutamate receptor ortholog GLR6
EYKLTTTDPRLHDSNGSTLRLSTLKIFDGGEQMLQQLLLTNFTGLTGPVQFNSDRNLVHPAYDILNIGGSGSQLIGYWSNYSGLSVTAP

SEQ ID NO: 85135 - protein, 79 aa, Setaria italica
  Transcript Sequence Number=SeqID_19161
RDPLKYLRNILFIFLECFLASFHTEKSPENCTLCRNHYHNLQGRTQEMAGRGADPSLLEAQVFGTFSFCIILLGPLLIF

SEQ ID NO: 85136 - protein, 161 aa, Setaria italica
  misc_feature (154)..(154): Xaa can be any naturally occurring amino acid
  Transcript Sequence Number=SeqID_19162
  Gene Ontology: Mol. function=oxidoreductase activity; Cellular component=cytoplasm; Biological process=metabolic process
  Homolog annotation: Hit_ID=A3QQM8; Match level="QueryCoverage=100%, HitCoverage=43%, E-value=2e-60, Identity=67%"; Hit description=12 -oxophytodienoic acid reductase 1
DKYGGSMENRCRFALEVIKAAIDEIGADRVGVRLSPYSNCLDCWDSDPDALGLYMIHAMNKLGVLYCSMVEPEGVKVDGKVQIPYKLLHFRKAFAGTFIVAGGYNREEGNKAVSEGYTDLVAYGKWFLANPDLPKRFELNAPLNKYDRSTFYNXDLVVGYT

SEQ ID NO: 85137 - protein, 73 aa, Setaria italica
  Transcript Sequence Number=SeqID_19163
PVKCVRVEAFSTGEAGKSWEATRCCTNYFVQKTEQSIEYKFCRPAKFIRSRMQNFNISLYIVEDSGQKGGVKA

SEQ ID NO: 85138 - protein, 81 aa, Setaria italica
  Transcript Sequence Number=SeqID_19164
WLSLGWSPAGAEGAAPRSSGGGHPDYPPETGVYHRDDLAPGSEDDSEWEEEEEDEADEEEVSPSGRQPEMEETKEVTLKAG

SEQ ID NO: 85139 - protein, 455 aa, Setaria italica
  misc_feature (144)..(144): Xaa can be any naturally occurring amino acid
  Transcript Sequence Number=SeqID_19165
  Gene Ontology: Mol. function=protein binding; Cellular component =clathrin adaptor complex; Biological process=intracellular protein transport
  Homolog annotation: Hit_ID=B6SS12; Match level="QueryCoverage=100%, HitCoverage=72%, E-value=0.0, Identity=88%"; Hit description=Adaptor complexes medium subunit family protein
  Pfam annotation: Domain name=Adap_comp_sub; Domain location=127-439; Score=125.8; E_value=1.4e-34; Accession=PF00928.13; Description =Adaptor complexes medium subunit family
TGAFMVAHVIGDIITGDVAEPEVIVSSGPSVGGLLDSLTGSIGISARSKPIAAPVAAPTASASSPVGAAQSESLKGGVRPFDKDLLRNFIIGAMPFGTPQDLNYANVNSIRTTGYSGDPLPTDQKQPAWKPYLYKGRQRILFSXSLETIHAALYDRDDVPDFLSVSGQVTCRAELEGLPDVSLPLTGLKTAHVEVSSFHHCVQASEPTNNKQTLVFQPPLGNFVLMHYQSPCNTAPPVKGFYQLSMVSENEGAFLFKLTLMEGYKSPFIMDFCMITMPFPRRRVASYEGNPSIGTVSMTEHSIEWRIVTSGRGLSGRSIEATFPGTVRFLPRTTQRTSSSFRLVSSTAYTDDSDNEQDNVKNGASLDDYIMEKINKDLQAVDLEEPLSWQAYNYAKVSFKITGGTLSGLTIDPKSVNIYPSVKAPPEYSMQASSGDYILWNTLGKCPTAILPREL

SEQ ID NO: 85140 - protein, 186 aa, Setaria italica
  Transcript Sequence Number=SeqID_19166
KIEFLPFAPEIMAAGREFAKNKIKEPFLCAQLRLLDGQFKNHWKATFSALKEKLKAVELEMKRNKNSGPVHMFIMTDLPPANWTKTYLANVAKDERYRLYTLKESDELVPQTAERLMAAEHGVRSGFLPKAIENTDKDCGPVQLPEILLYVEESVCSCASLGFVGTVGSTIAGSIETMRKNNVCKW

SEQ ID NO: 85141 - protein, 273 aa, Setaria italica
  Transcript Sequence Number=SeqID_19167
ERQWQVVNPDCPNAVNPFHRCAEYCPVPPPRAAAKHPPPAQSHDGSTHSDPGGLHPRPRRRDKGGGSGGLPLYVFLREGSDGDGKKVDPRCPNAPNPFHVCTDHCLAKMAEAGRSSEGAKSPLSLFSRHSRRSSSSSEEGSVKSAGSRKVDPKCPNAGNPFHECGEHCGAKMQQVEQHKGTKMQSPRKKGGKDVTVIPNWKVDPRCPNASNPFHMCAQYCFDHLIETTQTSATKSDKKKGKAVSKEVEREINPDCANASNPYHKCGEHCKRKG

SEQ ID NO: 85142 - protein, 198 aa, Setaria italica
  misc_feature (20)..(20): Xaa can be any naturally occurring amino acid
  misc_feature (182)..(182): Xaa can be any naturally occurring amino acid
  Transcript Sequence Number=SeqID_19168
  Gene Ontology: Mol. function=acid-amino acid ligase activity; Cellular component=intracellular; Biological process=regulation of cyclin-dependent protein kinase activity
  Homolog annotation: Hit_ID=B9SE02; Match level="QueryCoverage=99%, HitCoverage=41%, E-value=8e-73, Identity=68%"; Hit description =Serine/threonine-protein kinase Nek8, putative
  Pfam annotation: Domain name=RCC1; Domain location=146-196; Score =42.3; E_value=1.9e-09; Accession=PF00415.10; Description=Regulator of chromosome condensation (RCC1)
  Pfam annotation: Domain name=RCC1; Domain location=94-143; Score =24.4; E_value=0.00045; Accession=PF00415.10; Description=Regulator of chromosome condensation (RCC1)
  Pfam module annotation: Pfam domain module=RCC1::RCC1; Domain location=146-196::94-143
AVAAGGRHTLALSDLGQVWXWGYGGEGQLGLGSRIRTVSSPHPVPCIESALYSKDRPSAMKGNKTAEGHISKVMGNCVKAIACGGRHSAVVTDSGALLTFGWGLYGQCGQGNTEDVLSPTCVSSILGIKMQDVAAGLWHTVCTSVDGDVYSFGGNQFGQLGTGSDQAETVPKLVDATSLENXARSVSCGARHSAIITD

SEQ ID NO: 85143 - protein, 77 aa, Setaria italica
  Transcript Sequence Number=SeqID_19169
  Subcellular localization annotation: CTP_CleavageSite=45; ConfidenceScore=5.30e-01
MAMAVITPKGGSSSPAYVAKPPPPPPGFHKTAAGYDSYNGRATTTAAAAASESDERRALDGIVLALHAAAALLAFVG

SEQ ID NO: 85144 - protein, 109 aa, Setaria italica
  misc_feature (101)..(101): Xaa can be any naturally occurring amino acid
  Transcript Sequence Number=SeqID_19170
  Gene Ontology: Mol. function=aspartic-type endopeptidase activity; Biological process=proteolysis
  Homolog annotation: Hit_ID=B6SL29; Match level="QueryCoverage=94%, HitCoverage=21%, E-value=6e-38, Identity=81%"; Hit description =Aspartic proteinase nepenthesin-2
VHPERVSGAGAQQLLGGSEAAAAATVPANWGYDIGTFNYVVTASLGTPGVAQTLEVDTGSDLSWVQCKPCASSCYNQKDPLFDPAQSSSYAAVPCGGSACXGLGIYASG

SEQ ID NO: 85145 - protein, 81 aa, Setaria italica
  Transcript Sequence Number=SeqID_19171
  Subcellular localization annotation: CTP_CleavageSite=64; ConfidenceScore=5.32e-01
MRGSAEAVAVARDVASSSPSKPAPALDMMRFQRPSSDCLPLPNGIAAAGSGSGSRKPPASPAPRSSKDDASPAVATDSSRL

SEQ ID NO: 85146 - protein, 65 aa, Setaria italica
  Transcript Sequence Number=SeqID_19172
  Pfam annotation: Domain name=DUF2372; Domain location=10-64; Score= -4.0; E_value=0.0066; Accession=PF10178.1; Description=Uncharacterised conserved protein (DUF237
MIDSPFSYYWVHKEIVYSENLHSIIHHFCSGSGSARSLVISLGLKEHSQGTLKDIISAVIENCLW

SEQ ID NO: 85147 - protein, 119 aa, Setaria italica
  misc_feature (111)..(111): Xaa can be any naturally occurring amino acid
  Transcript Sequence Number=SeqID_19173
  Gene Ontology: Mol. function=drug transporter activity; Cellular component=membrane
  Homolog annotation: Hit_ID=Q5GAV3; Match level="QueryCoverage=67%, HitCoverage=8%, E-value=8e-34, Identity=73%"; Hit description =Putative integral membrane protein
  Pfam annotation: Domain name=DUF2372; Domain location=43-119; Score =125.7; E_value=1.5e-34; Accession=PF10178.1; Description =Uncharacterised conserved protein (DUF237
MEVPINSAQSGAHFPVQHQSLSLDIKGNKTDIVISKYEDTFLVIVTQIGCMGTILAAKKDESVFLDPTYNVSVLFGKRDEPLLLACARQLIEHISGSGSARSLVISLGLKXHSQGTLKD

SEQ ID NO: 85148 - protein, 52 aa, Setaria italica
  Transcript Sequence Number=SeqID_19174
  Pfam annotation: Domain name=DUF2372; Domain location=1-51; Score =14.6; E_value=9e-05; Accession=PF10178.1; Description=Uncharacterised conserved protein (DUF237
LQPLLLACAHQLIEHISGSGSARSMVISLGLKDHSQGTLKDIIAAVIENRLW

SEQ ID NO: 85149 - protein, 143 aa, Setaria italica
  Transcript Sequence Number=SeqID_19175
LCLASDSNLGNRILQPCRNTNWKPQPPTSPVVGQYISIWDCLKVKTVLLCLLKEKEILTAEVLEFHTSYNEGSSCSILYVHVSIFVDGLIMPIPTPAQLIKTITKDNSQSQLKLYPSVFPENALPGQERSPMTGLNHCHLCAQ

SEQ ID NO: 85150 - protein, 130 aa, Setaria italica
  Transcript Sequence Number=SeqID_19176
  Gene Ontology: Mol. function=drug transporter activity; Cellular component=membrane
  Homolog annotation: Hit_ID=Q5GAV3; Match level="QueryCoverage=61%, HitCoverage=8%, E-value=7e-34, Identity=72%"; Hit description =Putative integral membrane protein
  Pfam annotation: Domain name=DUF2372; Domain location=43-129; Score =160.0; E_value=6.8e-45; Accession=PF10178.1; Description =Uncharacterised conserved protein (DUF237
MEVPMNSAQSGAHFPVQHRSLSLDVKGNKTDIVISKYEDTFLVIVTQIGCMGTILAAKKDESVFSDPTYNVNVLFGKRDEPLLLACAHQLIEHISGSGSARSMVISLGLKDHSQGTLKDIIAAVIENRLW

SEQ ID NO: 85151 - protein, 60 aa, Setaria italica
  Transcript Sequence Number=SeqID_19177
  Pfam annotation: Domain name=DUF1279; Domain location=8-47; Score= -6.3; E_value=0.01; Accession=PF06916.5; Description=Protein of unknown function (DUF1279)
QEGPERPPRNRTMELVASSGGALTLALLCNKALLPVRVPITIALTPPVARALSRWRLVKS

SEQ ID NO: 85152 - protein, 150 aa, Setaria italica
  Transcript Sequence Number=SeqID_19178
  Pfam annotation: Domain name=DUF1279; Domain location=5-137; Score =147.5; E_value=4e-41; Accession=PF06916.5; Description=Protein of unknown function (DUF1279)
MAFSGRIKHLVKKYGKVAVGVHISVSCASIAGLYVAINNNVDVEAVFRRFGISPGVAVGGEASPAQAPGPAACDEALRDAALPPRPSDVLQEGPERPPRNRTMELVASSGGALTLALLCNKALLPVRVPITIALTPPVARALSRWRLVKS

SEQ ID NO: 85153 - protein, 121 aa, Setaria italica
  Transcript Sequence Number=SeqID_19179
  Gene Ontology: Mol. function=hydrolase activity; Biological process =metabolic process
  Homolog annotation: Hit_ID=B9SNK0; Match level="QueryCoverage=100%, HitCoverage=35%, E-value=2e-30, Identity=55%"; Hit description =Gibberellin receptor GID1, putative
  Pfam annotation: Domain name=Abhydrolase_3; Domain location=1-120; Score=-28.8; E_value=1.2e-05; Accession=PF07859.5; Description =alphabeta hydrolase fold
HHLAVRAATTKRGELDLDPVTVRGYVLLMPFLGGVRRTPSEAECPAEAFPNLDLVDRFWRLSLPAGATRDHPAANPFGPDSPDLGSVDLRPVLVVAGGLDLIRDRTVEYAERLAAMGKPVE

SEQ ID NO: 85154 - protein, 49 aa, Setaria italica
  Transcript Sequence Number=SeqID_19180
MASRDKAGCPPAALPLDRVMAALAANAEQLGRRWEAALRGRCGKGEDVA

SEQ ID NO: 85155 - protein, 409 aa, Setaria italica
  Transcript Sequence Number=SeqID_19181
  Gene Ontology: Mol. function=oxidoreductase activity; Cellular component=peroxisome; Biological process=tetrahydrofolate metabolic process
  Homolog annotation: Hit_ID=B6TIK6; Match level="QueryCoverage=98%, HitCoverage=99%, E-value=0.0, Identity=79%"; Hit description =Sarcosine oxidase
  Pfam annotation: Domain name=DAO; Domain location=14-369; Score =146.5; E_value=8.1e-41; Accession=PF01266.16; Description=FAD dependent oxidoreductase
MAASNGEAVHGRFDVIVVGAGIMGSCAAYAASSRGARALLLERFDLLHHRGSSHGESRTIRATYPQPHYPPMARLSRRLWEEAQADAGYRVLTPTPHLDLGPRDDPALRASIRNGGAAEVAASWPWAGVFRVPEGWTAATSELGGVMKATKAVAMFQALAVRKGAVVRDRTEVVDIAKPADGSILVRTASGEEFHGAKCIVTVGAWTSKLVKSVIGMDLPVQPVQTLICYWKVKPGHESELTTEAGFPTFASYGDPYIYSTPSMEFPGLIKIAKHGGPPCDPDSRDWSTGAADLAEPVARWIDAFMPGHVDTAGGPVIRQSCMYSMTPDEDYVIDFLGGEFGKDVVVGAGFSGHGFKMGPAIGRILAEMAMDGEARTAAEAGVDLQPLRIDRFVDNPKGNLKNPGDQDK

SEQ ID NO: 85156 - protein, 134 aa, Setaria italica
  Transcript Sequence Number=SeqID_19182
MGGAVSMEEDLEMERRLAKKLKVKKGKLGGPDDGMDELFADLGFGGDFGLDDEANAYDWNVEDDTKLDRKGKNKKKKVEKDDMETEELNVGYEEIDRKKKKKKVKEDDMETEELDVGDEENERKQKKKKKKVKK

SEQ ID NO: 85157 - protein, 77 aa, Setaria italica
  Transcript Sequence Number=SeqID_19183
KNLTRTALGNVSDSVLYLSTWKLNDVLMPVNKFVFQWACASRWILNAMGWASGLVEAEQGNNDCFLDLRLQVAPFCA

SEQ ID NO: 85158 - protein, 322 aa, Setaria italica
  Transcript Sequence Number=SeqID_19184
  Gene Ontology: Mol. function=protein binding; Cellular component =extracellular region
  Homolog annotation: Hit_ID=B9SI67; Match level="QueryCoverage=79%, HitCoverage=58%, E-value=8e-85, Identity=67%"; Hit description =Microfibril-associated protein, putative
  Pfam annotation: Domain name=MFAP1_C; Domain location=33-315; Score =507.5; E_value=1.7e-149; Accession=PF06991.3; Description=Micro -fibrillar-associated protein 1
ERQEADIDEEDEEAQEERRRRIREKQLLREQEEEELLPQEDEEPVEDEESEESEYETDSEDEQMGMAMVKPVFIPKSQRDTIAERERLEEEERQLEELVKKRLEARKIETRQIVVEEIKKEVHIEKALNEEANIEDVDTDDELNEAEEYESWKNREIARIKRDREERDARLKEKEEIEKVRNMTEEERREWERKNPKQLRQTKQKWKFMQKYYHKGAFFQESADDLIQSAGKEDIYSRDFSEPTGEDKMDKSILPKVMQVKHFGRSGRTKWTHLVNEDTTDWNAPWATNGPLRAKYNAKMAGMNAPIAKPKGSKKLKDWDEK

SEQ ID NO: 85159 - protein, 56 aa, Setaria italica
  Transcript Sequence Number=SeqID_19185
AHLLNYTKLNLEHEHSFCIIIVVMLLNFLLSLQSGFLCILIDNLIKVGDIFRLCPR

SEQ ID NO: 85160 - protein, 190 aa, Setaria italica
  misc_feature (153)..(153): Xaa can be any naturally occurring amino acid
  Transcript Sequence Number=SeqID_19186
  Gene Ontology: Mol. function=transferase activity, transferring glycosyl groups; Cellular component=1,3-beta-glucan synthase complex; Biological process=cell wall organization and biogenesis
  Homolog annotation: Hit_ID=Q9SHJ3; Match level="QueryCoverage=96%, HitCoverage=9%, E-value=7e-45, Identity=48%"; Hit description =Callose synthase 7
KRNLPYDKFADIWNAFITSLREEDLLNNREKNLLIVPSSGGETSVFQWPPFLLASKIPIALDMAKNVKKKDDELMKRINQDPYTEYAVIECYETLLDILYSIIVEQSDKKVIDKIDENIKNSIECKQLVKEFRLDELPQLSEKFDKLLDLLKXIDENDPTKNNTQIANLLQDIMEIITQDIMKNGQGILK

SEQ ID NO: 85161 - protein, 113 aa, Setaria italica
  Transcript Sequence Number=SeqID_19187
  Gene Ontology: Mol. function=electron carrier activity; Cellular component=integral to membrane; Biological process=steroid biosynthetic process
  Homolog annotation: Hit_ID=Q5Y750; Match level="QueryCoverage=68%, HitCoverage=53%, E-value=3e-24, Identity=61%"; Hit description =Obtusifoliol-14-demethylase
TRRRQQSSGTPTRKRRPPPPVSPGVPLLGDLPALLAKGTLELIRDRYTRLGSVFTVRLLHLKVTFLVGPDVSSHFYQGFDSEISQDEVSQFTIPTFGPGVAFDVDYATRREQF

SEQ ID NO: 85162 - protein, 194 aa, Setaria italica
  Transcript Sequence Number=SeqID_19188
  Gene Ontology: Mol. function=pyruvate kinase activity; Cellular component=cytoplasm; Biological process=glycolysis
  Homolog annotation: Hit_ID=Q2RAK2; Match level="QueryCoverage=89%, HitCoverage=33%, E-value=2e-96, Identity=95%"; Hit description =Pyruvate kinase
  Pfam annotation: Domain name=PK; Domain location=1-191; Score=-119.7; E_value=3.1e-12; Accession=PF00224.13; Description=Pyruvate kinase, barrel domain
LRKLTTKGLVENQGATIFVGQYLFTGSETTSVWLEVSEVNGDDVVCIIKNTATLAGSLFTLHCSQIHIDLPTLSDEDKDVIKKWGAPNKIDFLSLSYTRHAEDVRQAREFLSKLGDLSQTQIFAKIENVEGLNHFDEILAEADGIILSRGNLGIDLPPEKVFLFQKSALHKCNMAGKPAVVTRVVDSRPEVVSH

SEQ ID NO: 85163 - protein, 310 aa, Setaria italica
  misc_feature (7)..(7): Xaa can be any naturally occurring amino acid
  misc_feature (75)..(75): Xaa can be any naturally occurring amino acid
  Transcript Sequence Number=SeqID_19189
  Gene Ontology: Mol. function=pyruvate kinase activity; Cellular component=cytoplasm; Biological process=glycolysis
  Homolog annotation: Hit_ID=Q2RAK2; Match level="QueryCoverage=100%, HitCoverage=58%, E-value=1e-174, Identity=97%"; Hit description =Pyruvate kinase
  Pfam annotation: Domain name=PK; Domain location=1-162; Score=-98.1; E_value=1e-13; Accession=PF00224.13; Description=Pyruvate kinase, barrel domain
  Pfam annotation: Domain name=PK_C; Domain location=177-307; Score =117.4; E_value=4.7e-32; Accession=PF02887.8; Description=Pyruvate kinase, alphabeta domain
  Pfam module annotation: Pfam domain module=PK::PK_C; Domain location =1-162::177-307
KIDFLSXLSYTRHAEDVRQAREFLSKLGDLSQTQIFAKIENVEGLNHFDEILAEADGIILSRGNLGIDLPPEKVXFLFQKSALHKCNMAGKPAVVTRVVDSMTDNLRPTRAEATDVANAVLDGSDAILLGAETLRGLYPVETISTVGRICAEAEKVFNQDLYYKRTVKYVGEPMTHLESIASSAVRAAIKVKASVIICFTSSGRAARLIAKYRPSMPVLSVVIPRLKTNQLRWSFTGAFEARQSLIVRGLFPMLADPRHPAESTSATNESVLKVALDHGKASGVIKSHDRVVVCQKVGDSSVVKIIELDD

SEQ ID NO: 85164 - protein, 480 aa, Setaria italica
  Transcript Sequence Number=SeqID_19190
  Gene Ontology: Mol. function=pyruvate kinase activity; Cellular component=cytoplasm; Biological process=glycolysis
  Homolog annotation: Hit_ID=Q2RAK2; Match level="QueryCoverage=98%, HitCoverage=89%, E-value=0.0, Identity=95%"; Hit description =Pyruvate kinase
  Pfam annotation: Domain name=PK; Domain location=30-379; Score=296.8; E_value=4.7e-86; Accession=PF00224.13; Description=Pyruvate kinase, barrel domain
  Pfam annotation: Domain name=PK_C; Domain location=394-480; Score =25.7; E_value=2.4e-07; Accession=PF02887.8; Description=Pyruvate kinase, alphabeta domain
  Pfam module annotation: Pfam domain module=PK::PK_C; Domain location =30-379::394-480
MHSTNLLLEEPIRMASILEPSKTSFFPAMTKIVGTLGPKSRSVDTISSCLKAGMSVARFDFSWGDADYHQETLENLKLAIKATKKLCAVMLDTVGPELQVVNKSETPISLEENGTVVLTPHQGQEATSNLLPINFSGLAKAVKPGATIFVGQYLFTGSETTSVWLEVSEVNGDDVVCIIKNTATLAGSLFTLHCSQIHIDLPTLSDEDKDVIKKWGAPNKIDFLSLSYTRHAEDVRQAREFLSKLGDLSQTQIFAKIENVEGLNHFDEILAEADGIILSRGNLGIDLPPEKVFLFQKSALHKCNMAGKPAVVTRVVDSMTDNLRPTRAEATDVANAVLDGSDAILLGAETLRGLYPVETISTVGRICAEAEKVFNQDLYYKRTVKYVGEPMTHLESIASSAVRAAIKVKASVIICFTSSGRAARLIAKYRPSMPVLSVVIPRLKTNQLRWSFTGAFEARQSLIVRGLFPMLAVVKSNLQN

SEQ ID NO: 85165 - protein, 175 aa, Setaria italica
  misc_feature (126)..(126): Xaa can be any naturally occurring amino acid
  Transcript Sequence Number=SeqID_19191
  Gene Ontology: Mol. function=catalytic activity
  Homolog annotation: Hit_ID=B9FUR1; Match level="QueryCoverage=48%, HitCoverage=19%, E-value=1e-19, Identity=57%"; Hit description =Superoxide dismutase [Cu-Zn]
FVVGQASCCRASIKQGSDNQIERSTSEICKSSTLVVLNSEDSSPVAQEKGRGSDKSPETNQKSSVSSTSDSESESSQDTSELSNSPLPDNEFMKAFTNDLLSRGYPLPKMLEGGMELRKNFEEEFXGDIWNRLTKKVALDTSLSVVSLASFRGGTRFFACTGVLIGRHKSITRIL

SEQ ID NO: 85166 - protein, 61 aa, Setaria italica
  Transcript Sequence Number=SeqID_19192
GTYDICYYSNISTGIFNSFGIPYCKTLFLKLLITNTYPPFYFCSHVYILHKEIITEGGLII

SEQ ID NO: 85167 - protein, 59 aa, Setaria italica
  Transcript Sequence Number=SeqID_19193
FRRFFTSGAAGRRRFVAFLAVTAALVASYHLLAPTNPSRYHALFLSLGSNATAAAHLRA

SEQ ID NO: 85168 - protein, 521 aa, Setaria italica
  misc_feature (35)..(35): Xaa can be any naturally occurring amino acid
  misc_feature (313)..(313): Xaa can be any naturally occurring amino acid
  misc_feature (352)..(352): Xaa can be any naturally occurring amino acid
  misc_feature (507)..(507): Xaa can be any naturally occurring amino acid
  Transcript Sequence Number=SeqID_19194
  Gene Ontology: Mol. function=catalytic activity; Cellular component =nucleus; Biological process=DNA integration
  Homolog annotation: Hit_ID=B8B5M4; Match level="QueryCoverage=98%, HitCoverage=54%, E-value=7e-56, Identity=40%"; Hit description =Superoxide dismutase [Cu-Zn]
RTAYRSCAKLSESVVSLSFIGKNEHYQYTGLVIKXNKYSSCFLTSATAIRCKQGGRNRNMDLLIHVNLPDGQMMTGYLMTIHFDYNIAVIGLGPVHVFKEASLDQPGEVGYINTVTAICCNSTGKIMSLTGLVTKKSSELYGQKLITSTCIIPEFGIGGPLVDSEGNFVGMNMSQVDNEGTLFLPKETILESLVPYFLPSTFVVGQASCCRASIKQGSDNQIERSTSEICKSSTLVVLNSEEKGRGSDKSPETNQKSSVSSTSDSESESSQDTSELSNSPLPDNEFMKAFTNDLLSRGYPLPKMLEGGMELRXNFEEEFAGDIWNRLNKKVALDTSLSVVSLASFRGGTAVXACTGVLIGRHKSITRILTSASLVRFANKNEIDGSLKIRVLLPNKKHATGKLQHHNLHYNIAVVSIRNFHCRRIAKLHIEKPVYPLNDNQVVAIGRTFDTGKLMATSGVLTDNSSNLVSEEHGICTCKINKGGIGGPLIDFCGNFIGMNFYDAKKXTPYLPRHIILVANL

SEQ ID NO: 85169 - protein, 166 aa, Setaria italica
  Transcript Sequence Number=SeqID_19195
  Gene Ontology: Mol. function=catalytic activity; Cellular component =nucleus; Biological process=DNA integration
  Homolog annotation: Hit_ID=Q10AR1; Match level="QueryCoverage=84%, HitCoverage=12%, E-value=6e-16, Identity=38%"; Hit description =Pentatricopeptide, putative, expressed
SILLILLFINYLSCLFSIRNFHCRRIAKLHIEKPVYPLNDNQVVAIGSTFDTGKLMATSGVLTDNSSNLVSEEHGICTCKITKAGIGGPLIDFCGNFIGMNFYDAKRTPYLPRHIILEQLKDFDRKGSAAAKINEDGDPNRFSVPGPYWWYPSLAPRFIYERRRKH

SEQ ID NO: 85170 - protein, 255 aa, Setaria italica
  Transcript Sequence Number=SeqID_19196
  Gene Ontology: Mol. function=zinc ion binding; Cellular component =intracellular
MIKRRFFRQDHGDSGGSSSSSSSSGSDSDRDVAEEAASDDEVEEQQKEEEEAVEEESGEEEEEELKQQIQEESSGYQSEESSGNDVDGPSVDDDHSSPRGEECDEISLPVKKSSGANAGSAKSAANTDDAVEEDFANCILKCKSVYKCKLCPRIMCLNEEMVRVHLKSKRHARSKKLLGEGRLKLMLNSDGELEEEEETHAERHARTIALAKQVQKPKKDSGRQRQNRRKKRSRNHQEKKQEAQGSNKKQRKAKG

SEQ ID NO: 85171 - protein, 63 aa, Setaria italica
  Transcript Sequence Number=SeqID_19197
  Gene Ontology: Mol. function=DNA-3-methyladenine glycosylase I activity; Biological process=base-excision repair
  Homolog annotation: Hit_ID=B4FWT0; Match level="QueryCoverage=84%, HitCoverage=14%, E-value=4e-20, Identity=88%"; Hit description=DNA-3- methyladenine glycosylase I
MCNSNVKSAGVAQIDGRPVLQPAGNRVAPPEGARPLKKSLHKSLSMPASFDNNAAAAAARPAP

SEQ ID NO: 85172 - protein, 116 aa, Setaria italica
  Transcript Sequence Number=SeqID_19198
  Gene Ontology: Mol. function=protein serine/threonine kinase activity; Cellular component=chloroplast; Biological process=protein amino acid phosphorylation
  Homolog annotation: Hit_ID=Q9T020; Match level="QueryCoverage=87%, HitCoverage=11%, E-value=1e-14, Identity=40%"; Hit description =Putative receptor-like protein kinase
QATPGWAYLLRLHFCDIVSKAANQFAFNVYVGGWSVLSNYEIANKDTFGALAVPLYKDFVLSDTDATGKITVSIGPSTEGNMDPDGLLNGLEILRMVGDTGSGGDPSRSRSKKIIA

SEQ ID NO: 85173 - protein, 96 aa, Setaria italica
  Transcript Sequence Number=SeqID_19199
  Gene Ontology: Mol. function=protein serine/threonine kinase activity; Cellular component=chloroplast; Biological process=protein amino acid phosphorylation
  Homolog annotation: Hit_ID=Q7XQK6; Match level="QueryCoverage=100%, HitCoverage=20%, E-value=9e-43, Identity=84%"; Hit description =OSJNBa0017B10.2 protein
  Pfam annotation: Domain name=Pkinase_Tyr; Domain location=1-96; Score= -163.6; E_value=0.0076; Accession=PF07714.9; Description=Protein tyrosine kinase
VKKLNPESVQGLQEWQSEVNFLGRLSHPNLVRLLGYCGEDRELLLVYEFMSKGSLENHLFRRGSTEPLAWNTRLKIAIGAARGLAFLHSSEKQVIY

SEQ ID NO: 85174 - protein, 84 aa, Setaria italica
  misc_feature (59)..(59): Xaa can be any naturally occurring amino acid
  Transcript Sequence Number=SeqID_19200
MASSNSSSAAAATAADGGDDLDQLLDSALDDFTSLDLSASAAPKSSGSEASASASGSGXRGPVLGLGLGLPDPKAPKRRGAKPP

SEQ ID NO: 85175 - protein, 66 aa, Setaria italica
  Transcript Sequence Number=SeqID_19201
NLFPCRKCWRIYCIAELYVIYRRLPLLSVEDVIQGPFIYNIEFRYAVIFSNLFPCRKCLVYCVVRT

SEQ ID NO: 85176 - protein, 471 aa, Setaria italica
  Transcript Sequence Number=SeqID_19202
  Gene Ontology: Mol. function=protein kinase activity; Cellular component=plasma membrane; Biological process=protein amino acid phosphorylation
  Homolog annotation: Hit_ID=Q9FWF0; Match level="QueryCoverage=98%, HitCoverage=88%, E-value=0.0, Identity=82%"; Hit description=Protein kinase-like protein
  Pfam annotation: Domain name=Pkinase; Domain location=13-283; Score= -5.1; E_value=3.5e-08; Accession=PF00069.17; Description=Protein kinase domain
  Pfam annotation: Domain name=Pkinase_Tyr; Domain location=40-283; Score=-59.9; E_value=9.6e-10; Accession=PF07714.9; Description =Protein tyrosine kinase
  Pfam annotation: Domain name=TPR_2; Domain location=397-430; Score =11.0; E_value=1.5; Accession=PF07719.9; Description=Tetratricopeptide repeat
  Pfam annotation: Domain name=TPR_2; Domain location=431-464; Score =11.2; E_value=1.4; Accession=PF07719.9; Description=Tetratricopeptide repeat
  Pfam module annotation: Pfam domain module=Pkinase::Pkinase_Tyr::TPR _2::TPR_2; Domain location=13-283::40-283::397-430::431-464
GIVPGRYDGSYSLADLRAATGGFAAANIVSESGEKAPNLVYRGQLKGPAGGAPPRAIAVKKFAKLAWPDPKQFAEEAKGVGSLRHRRMANLIGYCCDGDERLLVAEFMPNDTLAKHLFHWENQTIEWAMRLRVAYYISQALEYCSTKGRPLYHDLNAYRVLFDESGDPRLSCFGLMKNSRDGKSYSTNLAYTPPEYLRNGRVTPESVIFSFGTVLLDLLSGKRIPPSHALDIMRGRNIQAVMDSHLEGNYSIEVATTLVNLASQCLQYEPRDRPDIKKLVSILEPLQIKLEVPSYVMLGIPKPVEEPQAPPTPQRPLSPMGEACSRMDLTAIHQILFTTHYRDDEGSNELSFQEWTQQMRDMLDARKRGDFAFKDKDFKAAIDCYTQFVDVGTMVSPTVFARRSLCYLMCDQPDAALRDAMQAQIIYPDWPTAFYMQAVALSKLNMQSDAVDMLNEASQLEEKRQKSTKGP

SEQ ID NO: 85177 - protein, 58 aa, Setaria italica
  Transcript Sequence Number=SeqID_19203
LSVQLLVDAMGSMHKVQISFLWFPVRGIKLANPTSPSFSWTQIGLLLFGFEYQSNSHL

SEQ ID NO: 85178 - protein, 185 aa, Setaria italica
  misc_feature (14)..(14): Xaa can be any naturally occurring amino acid
  Transcript Sequence Number=SeqID_19204
  Gene Ontology: Mol. function=nucleoside-triphosphatase activity; Cellular component=integral to membrane; Biological process=defense response
  Homolog annotation: Hit_ID=Q8GU88; Match level="QueryCoverage=100%, HitCoverage=12%, E-value=5e-74, Identity=77%"; Hit description =Putative pleiotropic drug resistance protein 7
  Pfam annotation: Domain name=ABC2_membrane; Domain location=1-182; Score=140.5; E_value=5.4e-39; Accession=PF01061.16; Description=ABC -2 type transporter
IFGTIFLNLGKKLXNRQDLFNSLGSMYAAVLFIGIQNGQTVQPIVDVERTVFYREKAAGMYSALPYAFAQVLIEIPHIFLQTAIYGLIVYSLIGFDWTVVKFFWYIFFMFFTFMYFTFYGMMAVAMTPNSDIAAIVSTAFYAIWNIFAGFLIPRPRIPIWWRWYSWACPVAWTLYGLVASQFGDI

SEQ ID NO: 85179 - protein, 76 aa, Setaria italica
  Transcript Sequence Number=SeqID_19205
  Subcellular localization annotation: CTP_CleavageSite=33; ConfidenceScore=5.04e-01
LYGCLAHLMVIALPLAGAPLPFTSRDPGARSRRGAAAGAGDAEASERALRYLGRFSVVLWRGCQRGHSLVSLLMVW

SEQ ID NO: 85180 - protein, 433 aa, Setaria italica
  Transcript Sequence Number=SeqID_19206
  Gene Ontology: Mol. function=Rab GTPase activator activity; Cellular component=intracellular; Biological process=regulation of Rab GTPase activity
  Homolog annotation: Hit_ID=B6T5C5; Match level="QueryCoverage=96%, HitCoverage=94%, E-value=0.0, Identity=83%"; Hit description=TBC domain containing protein
  Pfam annotation: Domain name=TBC; Domain location=120-333; Score= -16.1; E_value=2.1e-06; Accession=PF00566.10; Description=TBC domain
ADSFNQVRARLRSQNVPSTRFKIKVGKTLSVRKWHAAFTREGCLDIASVLSRIQRGGVHPAIRGEVWEFLLGCYDPESTFDEREQIRHRRRMQYARWKEECREMDSHVGSGKIVTAPIITEDGVPIKDPLVLLEAASDTQATSTSSSGAEVSDSPNRVMDKKIIEWKLTLHQIGLDVLRTDRSMVFYENKENLSKLWDILAVYAWIDKEVGYCQGMSDLCSPMIVLLNDEADAFWCFERLMRRLRGNFRCTQQSVGVENQLQHLASIIQVLDPKLHDHLETLGGGDYLFAFRMFMVLFRRELSFGDSLYLWEMMWALEYDPDIFSTYDEAGVATHKIEGFKPKVKSIRQFGKYERENMKNGANDGDGPVPISVFLVASVLKENGPKLLQEARGIDDVIRILNNINGDLDAQRACAVALKLHKKYLKKLQGKKT

SEQ ID NO: 85181 - protein, 89 aa, Setaria italica
  Transcript Sequence Number=SeqID_19207
QTKVKRTRGKQDVTHSSIIIMEHLDPRVLRSLVTCRTPIMRSRAGLTSERAQDDDTAVRTQARAAGVGEPWRLEVEKLLAMGNGSNITY

SEQ ID NO: 85182 - protein, 364 aa, Setaria italica
  Transcript Sequence Number=SeqID_19208
  Gene Ontology: Mol. function=hydrolase activity, acting on ester bonds; Biological process=lipid metabolic process
  Homolog annotation: Hit_ID=B6TDT3; Match level="QueryCoverage=88%, HitCoverage=75%, E-value=1e-112, Identity=58%"; Hit description =Alpha-L-fucosidase 2
  Pfam annotation: Domain name=Lipase_GDSL; Domain location=34-338; Score=216.0; E_value=9.6e-62; Accession=PF00657.14; Description=GDSL- like LipaseAcylhydrolase
SSNSSSGAELAAPAPPAAEVKGKEQERQRPPVVLFNFGDSNSDTGGVAAAGGIRIMPPEGRTYFRRPTGRLSDGRVIIDFICESLGTHELNPYLKGIGSDYSNGANFAMAGSTVSHGVSPYSLNVQVDQFVYFRHRSLEMFERGLKGPVSKEGFENALYMMDIGHNDMVGVAHTPSDQWDKKITEIVGEVRKAISILYDNGARKFWIHGTGALGCLPALVVQEKGEHDAHGCLASVNRAAKAYNKKLSQLCDDMRFHLKDATIVYTDMFAIKYDFVANHTKYGIEWPFMVCCGNGGPPYNFKPGKFGCGDLCPPEAKVVSWDGVHFTDFGSGLAAKLAMSGEYSKPRVKLASLIHGGSKKASDS

SEQ ID NO: 85183 - protein, 443 aa, Setaria italica
  Transcript Sequence Number=SeqID_19209
  Gene Ontology: Mol. function=sequence-specific DNA binding; Cellular component=nucleus; Biological process=regulation of transcription, DNA-dependent
  Homolog annotation: Hit_ID=Q8W0T5; Match level="QueryCoverage=98%, HitCoverage=57%, E-value=0.0, Identity=84%"; Hit description=OCL5 protein
  Pfam annotation: Domain name=START; Domain location=1-174; Score =190.8; E_value=3.9e-54; Accession=PF01852.11; Description=START domain
PKLHSEASRETVVVIMNHVNLVEMLMDVNQWSTLFSSIVSRAATLEVLSTGVAGNYNGALQLMTAEFQVPSPLVPTRESQFVRYCKQHTDGSWAVVDVSLDGLRAGGAVGLRGRRRPSGCLIREMPNGYSRVTWVEHVEADDAMVHDLYRPLVSSGLAFGAQRWAAALERQCERLASAMASGVPAASTGGDAAGVVNSAEGRRSMLRLAERMVASFCGGVTASTTHQWTTLSGSGPEDVRVMTRKSVDDPGRPPGIILNAATSFWLPVPPGRVFGFLRDDATRSEWDILSNGGDVQEMAHIANGRDHGNAVSLLRVNNANSNQSNMLILQECCTDKTGSYVIYAPVDVVAMNVVLNGGDPDYVALLPSGFAILPDGPGAGGGGSLLTVAFQILVDSVPTAKLSLGSVATVNSLIACTVERIKAALAADNTAGGGARPPPYGDE

SEQ ID NO: 85184 - protein, 139 aa, Setaria italica
  misc_feature (128)..(128): Xaa can be any naturally occurring amino acid
  misc_feature (134)..(134): Xaa can be any naturally occurring amino acid
  Transcript Sequence Number=SeqID_19210
  Gene Ontology: Mol. function=drug transporter activity; Cellular component=membrane; Biological process=multidrug transport
  Homolog annotation: Hit_ID=B9RC22; Match level="QueryCoverage=92%, HitCoverage=23%, E-value=4e-30, Identity=53%"; Hit description =Multidrug resistance pump, putative
  Pfam annotation: Domain name=MatE; Domain location=25-139; Score=7.6; E_value=0.00084; Accession=PF01554.10; Description=MatE
SLFPGFEFPTDARGEARSILALALPMILTGLLLYLRSMISMLFLGRLGGLALAGGSLAIGFANITGYSVLSGLAMGMEPICGQAFGAGHYSLLGITMQRTVLLLIAAAVPIGGLWMHMRPLLLLCGQXASIAAXAETYI

SEQ ID NO: 85185 - protein, 82 aa, Setaria italica
  Transcript Sequence Number=SeqID_19211
  Gene Ontology: Mol. function=protein binding; Cellular component =membrane coat; Biological process=intracellular protein transport
  Subcellular localization annotation: CTP_CleavageSite=10; ConfidenceScore=5.01e-01
MASAPPAPAPAHTAGPSLVDTLFQRSLDDLVKSLRSDPSAAGESAAVARALSEIHREIRAPDAATKAVALQKLTYLSSLHFA

SEQ ID NO: 85186 - protein, 101 aa, Setaria italica
  Transcript Sequence Number=SeqID_19212
  Subcellular localization annotation: CTP_CleavageSite=52; ConfidenceScore=5.77e-01
RSPIPMRTAPPASRRPLAAVFNSARSSRPLRGASNSRRRRRRPRLRLRLRPSEDAAAAGSPELRPGRIDRGGGAARAEKVSARPGGDGEAMRACGGVKREG

SEQ ID NO: 85187 - protein, 35 aa, Setaria italica
  Transcript Sequence Number=SeqID_19213
LIVHPSIAIFVLFLTSHERNNIVEMFPRFIWNSNT

SEQ ID NO: 85188 - protein, 66 aa, Setaria italica
  Transcript Sequence Number=SeqID_19214
  Gene Ontology: Mol. function=electron carrier activity
  Homolog annotation: Hit_ID=B9RMP3; Match level="QueryCoverage=93%, HitCoverage=11%, E-value=1e-13, Identity=53%"; Hit description =Cytochrome P450, putative
FALATVQVSLASLLYHFEWALPAGVRAEDINLEESFGLATRKKEPLFVVVRKSEGYEFKGEELNEV

SEQ ID NO: 85189 - protein, 521 aa, Setaria italica
  Transcript Sequence Number=SeqID_19215
  Gene Ontology: Mol. function=electron carrier activity; Cellular component=integral to membrane; Biological process=oxidation reduction
  Homolog annotation: Hit_ID=B9RMP3; Match level="QueryCoverage=91%, HitCoverage=91%, E-value=1e-137, Identity=53%"; Hit description =Cytochrome P450, putative
  Pfam annotation: Domain name=p450; Domain location=34-502; Score =315.9; E_value=8.4e-92; Accession=PF00067.14; Description=Cytochrome P450
MELNLVSSASLLLLALSAAYVYYTTRSRSPQRLPPSPPGWPVIGHLHLLSRGMPHHVMADLARSMKAPLLGLRMGSVRAVVISKPELARAALTSNDAALASRPHLLSGQFLSFGCSDVTFAPAGAYHRMARRVVVSELLSARRVATYGTVRVGELRRLLARLTRSASSPAAVPVDLSECFLHLANDVLCRVAFGRRFAHGKGDKLGAVLVEAQDLFAGFTVGDFFPELEPFASTVTGLRRRLKNCLANLREVCDEIVDEHLSGKRPRIPGDRDEDFVDVLLRVQKSQDLEVPLTDDNIKALVLDMFIAGTDTSSATLEWVMTELVRHPWILKKAQDEVRRVVGGKGRVEEADLGELHYMRAIIKETFRLHPAVPLLVPRESVAPCTLGGYDVPARTRVFINTFAMGQDPEIWEKPTEFSPERFDNGGGEIDLKDPDFRLLPFGGGRRGCPGYSFALATVQLTLASLLYHFDWALPAGVRADDVNLDEVFGLATRKKEPLFVVVRNNEQYEFMGEELNEVQD

SEQ ID NO: 85190 - protein, 186 aa, Setaria italica
  misc_feature (40)..(40): Xaa can be any naturally occurring amino acid
  misc_feature (43)..(43): Xaa can be any naturally occurring amino acid
  Transcript Sequence Number=SeqID_19216
  Gene Ontology: Mol. function=drug transporter activity; Cellular component=membrane; Biological process=multidrug transport
  Homolog annotation: Hit_ID=B2KZI8; Match level="QueryCoverage=95%, HitCoverage=76%, E-value=2e-44, Identity=52%"; Hit description =Putative ripening regulated protein (Fragment)
  Pfam annotation: Domain name=MatE; Domain location=34-186; Score =39.7; E_value=1.2e-08; Accession=PF01554.10; Description=MatE
YVKVSEAGRRSWHGWSREALNLNDVKVYLRLAIPSTFMTXIAXLEYWAFEMVVLLAGFLPDPKLETSILSISLNTMWMVYTIPSGLSSVISIRVSNELGAGNPQAARLSVYISGIMCLTEGLFIAIVTVSVRDLWGYLYSNEKKVVKYVSMMMPILATSDFMDGIQCTLSARGCGWQKLCSLINLF

SEQ ID NO: 85191 - protein, 347 aa, Setaria italica
  Transcript Sequence Number=SeqID_19217
  Gene Ontology: Mol. function=electron carrier activity; Cellular component=extracellular region; Biological process=response to oxidative stress
  Homolog annotation: Hit_ID=B6SIU4; Match level="QueryCoverage=90%, HitCoverage=90%, E-value=1e-137, Identity=78%"; Hit description =Peroxidase 24
  Pfam annotation: Domain name=peroxidase; Domain location=69-310; Score=389.1; E_value=7.5e-114; Accession=PF00141.15; Description =Peroxidase
MRRQQVAAAAGAARWRGDGGGGAATAWWWVAAVVLGHLVSSARAGLLESNPGLAYNFYQKSCPKVDSIVRSVTWAQVAANPALPARLLRLHFHDCFVKGCDASILLDNAQSEKKAGPNLSVGGYEVIDAIKTQLEQACPGVVSCADIVALAARDAVSYQFQSSLWQVETGRRDGNVSLASNTGALPSPFAGFNGLLQSFAARGLNLTDLIALSGAHTIGVASCSSVTPRLYNGNATNVDPLLDSAYAKTLMNSCPSSSASGTVNLDGRTAVKFDSSYYTNVLNKQGTLASDAALTQNAAAAQMVQDLTNPFKFYAAFSMSMKKMGRVEVLTGTNGQIRKQCNQVNSS

SEQ ID NO: 85192 - protein, 253 aa, Setaria italica
  Transcript Sequence Number=SeqID_19218
  Gene Ontology: Mol. function=actin binding; Cellular component=F -actin capping protein complex; Biological process=actin cytoskeleton organization and biogenesis
  Homolog annotation: Hit_ID=Q9M9G7; Match level="QueryCoverage=100%, HitCoverage=100%, E-value=1e-103, Identity=70%"; Hit description =Probable F-actin-capping protein subunit beta
  Pfam annotation: Domain name=F_actin_cap_B; Domain location=1-236; Score=414.6; E_value=1.7e-121; Accession=PF01115.9; Description=F -actin capping protein, beta subunit
MEAAMDLMRRMPPGSAETALNALLSLLPDHSLDLLSQVDLPLQVCMDKENLKEYILCEYNRDADSYRSPWSNKYDPPLEDGTVPSEEMRNLEIEANEVFSVYRDQYYEGGISSVYIWEDEDNGGFIACFLIKKDGQGTRGYMQIGSWDAIHVIQVGPEEEGAAHYCLNSTVMLSLTTDNKQSGTFNLSGSIRRQMSMTLAVADGHLVNMGKMIEEMEGKLRNSLDQVYFGKTREMVCTLRPPPEVLNMRLPDS

SEQ ID NO: 85193 - protein, 166 aa, Setaria italica
  Transcript Sequence Number=SeqID_19219
  Pfam annotation: Domain name=Sel1; Domain location=102-137; Score =19.6; E_value=0.013; Accession=PF08238.4; Description=Sel1 repeat
  Subcellular localization annotation: CTP_CleavageSite=50; ConfidenceScore=5.65e-01
AAAAVAAAAVRSYARSLRSPSFAASTAGKAAKTPPNPLDTPRNSAAAAAAAAAASSGRAEVRDLAAACGLQEDERVPLAEVVSDCTRRWFQDALKEARAGDITMQVLVGQMYRSGYGVNKNEHKARVWMEKASRYRSTVWKVSNKRPGYNASDSDSDSGDAKESYK

SEQ ID NO: 85194 - protein, 62 aa, Setaria italica
  Transcript Sequence Number=SeqID_19220
  Gene Ontology: Mol. function=ATPase activity, coupled to transmembrane movement of substances; Cellular component=integral to membrane; Biological process=transport
  Homolog annotation: Hit_ID=Q5JJV5; Match level="QueryCoverage=98%, HitCoverage=4%, E-value=1e-15, Identity=73%"; Hit description =Putative ABC transporter
MSSLQLLQLTERGRNLLSSRRRTLAVVSGALLAGGTLAYTQSGRWNKQQKENACSDGNAHTG

SEQ ID NO: 85195 - protein, 118 aa, Setaria italica
  Transcript Sequence Number=SeqID_19221
ISNLTMDGIVCNLTKTKEVYLHAPQIALITSQFLAYQICLIFETGEPNKINQSSRNCRFTRSKWHIKHQHHCSTVQILFLQGVGKQYSSDRETLLCELLIDHGCCQPSSSQRAALRTA

SEQ ID NO: 85196 - protein, 658 aa, Setaria italica
  Transcript Sequence Number=SeqID_19222
TNGPTFIDWCNLDRCSRVKPFRCGELDFEQRITNAQAVAATGSCNYNKGRYARKEDAILQALNIERERALEPASKTYLHGGTCSLNPKIEMPNGQVKDAAAKGPSTTIHSLPLPLPLPPPPPKRKRKTPYDSEDDAPKGSRRMRDLRDIGSKTVPPMDSPHAGTISVPKYDDLPNVGQVKTSVQSHASTKRKHAAAHQDQPYGVPRKKDRSRPLSELCNGDMWNGSRPNGHKADEHFLGAATCSSSSSGTSTLDSSLETTSCHRRAAFKTDQAKGTEISCMSRLFTDDFHHRDDFVETPLAGRSILEPDHLQKYQPCGLAKHPTWKHNKQANGCSKVVKCDRKNIKMRSISSVDQEGYNRTKDSDKHEHHKARTVKHKAPRDEVVLLEKRLDKRSLNKPSGDDTKMHIAMIPTDSDCVGAVEQQCSKRKRDPEESSETISNRSNCDSGSISSLVFELPLQVLPPQKKALDPERCRAVKPIKTLHLNSTLCNVELSVLGSSNNGRRVPLVSLMSKWNGKPVVGYPVSVEVCDDVFGCPLSSGGEQQAVTSSMDGIMLKRDETKGLQCLVPPSPQACRAKPKSRSRKPSEKDVDKLWQPHTKKPASSSRKMRRLSSFASGQRDGEDRKSAVGKVSGATIACIPLRVVFSRINEALSFPVK

SEQ ID NO: 85197 - protein, 173 aa, Setaria italica
  Transcript Sequence Number=SeqID_19223
  Gene Ontology: Mol. function=extracellular-glutamate-gated ion channel activity; Cellular component=integral to membrane; Biological process=ion transport
  Homolog annotation: Hit_ID=Q84QE2; Match level="QueryCoverage=95%, HitCoverage=17%, E-value=2e-27, Identity=37%"; Hit description =Avr9/Cf-9 rapidly elicited protein 141
WIATDGVGSAVDALGADDIDAMEGVVSLRPYVQMTEQVRNFSARFRARLRWESPSADIYAHDPTISMLWSYDTAWAVAAVAEAAGVSSPAFQSPHRSTVTDLDRLGVSATGAALLKAVHETTFHGLAGNFKLVDGQLQPPAYEVINIIGKGARSVGFWTPEAGISQALHPNAA

SEQ ID NO: 85198 - protein, 142 aa, Setaria italica
  misc_feature (14)..(14): Xaa can be any naturally occurring amino acid
  Transcript Sequence Number=SeqID_19224
  Gene Ontology: Mol. function=protein serine/threonine kinase activity; Cellular component=integral to membrane; Biological process=protein amino acid phosphorylation
  Homolog annotation: Hit_ID=B9R6R5; Match level="QueryCoverage=100%, HitCoverage=26%, E-value=1e-39, Identity=40%"; Hit description =Receptor protein kinase, putative
  Pfam annotation: Domain name=LRR_1; Domain location=119-141; Score =8.8; E_value=6.4; Accession=PF00560.25; Description=Leucine Rich Repeat
  Pfam annotation: Domain name=LRR_1; Domain location=23-46; Score=5.9; E_value=22; Accession=PF00560.25; Description=Leucine Rich Repeat
  Pfam annotation: Domain name=LRR_1; Domain location=47-69; Score=1.1; E_value=1.9e+02; Accession=PF00560.25; Description=Leucine Rich Repeat
  Pfam annotation: Domain name=LRR_1; Domain location=71-93; Score=5.7; E_value=25; Accession=PF00560.25; Description=Leucine Rich Repeat
  Pfam annotation: Domain name=LRR_1; Domain location=95-117; Score =5.7; E_value=25; Accession=PF00560.25; Description=Leucine Rich Repeat
  Pfam module annotation: Pfam domain module=LRR_1::LRR_1::LRR_1::LRR _1::LRR_1; Domain location=119-141::23-46::47-69::71-93::95-117
RILSLYRNQLTGEXPGDLGRYSELNVIEVSENQLTGPLPPYACANGQLQYILVLSNLLTGPIPAAYAACSLLLRFRVSNNHLEGDVPPGVFGLPHASIIDLSYNHLTGPVPAAVAYAANLTSLFASNNRMSGVLPAEIAGAS

SEQ ID NO: 85199 - protein, 44 aa, Setaria italica
  Transcript Sequence Number=SeqID_19225
VRWLAKSHIFPVSYLMPRSYSVLGAKLVILTKIDLLVHCCNGIL

SEQ ID NO: 85200 - protein, 84 aa, Setaria italica
  Transcript Sequence Number=SeqID_19226
  Gene Ontology: Mol. function=oxidoreductase activity; Cellular component=plasma membrane; Biological process=metabolic process
  Homolog annotation: Hit_ID=B6U607; Match level="QueryCoverage=100%, HitCoverage=27%, E-value=2e-35, Identity=77%"; Hit description =Carbonyl reductase 1
WPKHFSAYKVSKVTLNAYSRILARRHPELRINCAHPGYVKTDMTLQSGLLTPEEGASNLVNVVLLPEGGPTGTFFALGQEAPFV

SEQ ID NO: 85201 - protein, 314 aa, Setaria italica
  Transcript Sequence Number=SeqID_19227
  Gene Ontology: Mol. function=oxidoreductase activity; Biological process=oxidation reduction
  Homolog annotation: Hit_ID=B6T3T7; Match level="QueryCoverage=98%, HitCoverage=99%, E-value=1e-118, Identity=69%"; Hit description =Carbonyl reductase 3
  Pfam annotation: Domain name=Epimerase; Domain location=18-180; Score= -71.1; E_value=0.078; Accession=PF01370.13; Description=NAD dependent epimerasedehydratase family
  Pfam annotation: Domain name=KR; Domain location=19-152; Score=-79.2; E_value=0.018; Accession=PF08659.2; Description=KR domain
  Pfam annotation: Domain name=adh_short; Domain location=16-194; Score= 34.2; E_value=7.6e-08; Accession=PF00106.17; Description=short chain dehydrogenase
  Pfam module annotation: Pfam domain module=Epimerase::KR::adh_short; Domain location=18-180::19-152::16-194
RYNRKERLIPDPANARIAVVTGGNKGIGLEVCRQLAGAGITVVLTARDEKRGAAAVEKLREAGLSDVIFHQLEITDAPSISRLTDFLKTRFGKLDILVNNAAIGGVEYVQDPVDSSLTSNEKFGGMDQLQRLEWMASAVRETYAAAREGLQTNYYGTKHVIEALLPLLQASSDGRIVNVSSEWGLLRLINNEELKQELNDDVEKLTEERLDEILGTFLNDFKAGEVEAHGWPKHFSAYKVSKVTLNAYSRILARRHPELRINCAHPGYVKTDMTLQSGLLTPEEGASNLVKVALLPEAGPTGVYFDLGQEAPFV

SEQ ID NO: 85202 - protein, 72 aa, Setaria italica
  Transcript Sequence Number=SeqID_19228
FGMEDARVLQELILFCQKFWRITGIVVACTSKLDRNGPWTEICTDFCTVHNHRCTEIHYLPEMSVRGPVNFR

SEQ ID NO: 85203 - protein, 165 aa, Setaria italica
  Transcript Sequence Number=SeqID_19229
  Gene Ontology: Mol. function=binding; Cellular component=mitochondrion
  Homolog annotation: Hit_ID=B9S5H2; Match level="QueryCoverage=98%, HitCoverage=24%, E-value=3e-50, Identity=53%"; Hit description =Pentatricopeptide repeat-containing protein, putative
  Pfam annotation: Domain name=PPR; Domain location=1-35; Score=37.8; E_ value=4.3e-08; Accession=PF01535.12; Description=PPR repeat
  Pfam annotation: Domain name=PPR; Domain location=36-69; Score=12.8; E_value=0.27; Accession=PF01535.12; Description=PPR repeat
  Pfam annotation: Domain name=PPR; Domain location=72-106; Score=3.5; E_value=3.4; Accession=PF01535.12; Description=PPR repeat
  Pfam module annotation: Pfam domain module=PPR::PPR::PPR; Domain location=1-35::36-69::72-106
FLWNALIGGYEHHGHAIEALQLFKEMRGAKVAPSHITFISLLSACGNSGLVSEGRVVFYTMVREYCLDARVEHYAALVNLIGRHGQLEDALEVIKSMPIAPDRAVWGAFLGACTAKKNEQLAQMAAKALSEIDPESSAPYVLMHNLHAHEGRWGSASVVREDMER

SEQ ID NO: 85204 - protein, 201 aa, Setaria italica
  Transcript Sequence Number=SeqID_19230
  Gene Ontology: Mol. function=hydrolase activity, acting on ester bonds; Biological process=response to stress
  Homolog annotation: Hit_ID=B6T8U5; Match level="QueryCoverage=100%, HitCoverage=72%, E-value=4e-54, Identity=62%"; Hit description=ER6 protein
  Pfam annotation: Domain name=Usp; Domain location=1-163; Score=45.0; E_value=2.9e-10; Accession=PF00582.18; Description=Universal stress protein family
AFAVKWAVQNYLRPGDAVVLLHVRPTSVLYGADWGSIPVSVDDEPDAGIAEGAARAAAASGEEETEPEEAKKKREEDFDAFTSTKAQDLAQPLVVAQIPFKIHIVKDHDMKERLCLEAERLGLSALIMGSRGFGASRRAGKGRLGSVSDYCVHHCVCPVVVVRFPDDAAGAGCGHAFGDELRTVPENEPVYHEAPEAQKEK

SEQ ID NO: 85205 - protein, 110 aa, Setaria italica
  Transcript Sequence Number=SeqID_19231
  Gene Ontology: Mol. function=hydrolase activity, acting on ester bonds; Biological process=response to stress
  Homolog annotation: Hit_ID=B6TBM4; Match level="QueryCoverage=93%, HitCoverage=38%, E-value=8e-29, Identity=65%"; Hit description=USP family protein
CAGSFACCHWILDFDSVLKERLCLEAERLGLSAMIMGSRGFGAHRKGGKGRLGSVSDYCVHHCVCPVVVVRYPDDAAGAGGDAAGAIDELHTVPEDEPVYHDAPEVQKEN

SEQ ID NO: 85206 - protein, 266 aa, Setaria italica
  Transcript Sequence Number=SeqID_19232
  Gene Ontology: Mol. function=zinc ion binding; Biological process =response to stress
  Homolog annotation: Hit_ID=B6TBM4; Match level="QueryCoverage=99%, HitCoverage=100%, E-value=4e-88, Identity=64%"; Hit description=USP family protein
  Pfam annotation: Domain name=Usp; Domain location=49-220; Score=84.2; E_value=4.7e-22; Accession=PF00582.18; Description=Universal stress protein family
  Subcellular localization annotation: CTP_CleavageSite=68; ConfidenceScore=5.62e-01
MATNPSSGADAPPAPAPVRLSAAAQAAAIQPSSPRFFFSSLAGTNPASPHRRIAIAVDLSDESAFAVRWAVQNYLRPGDAVVLLHVRPTSVLYGADWGSIPVSVTDEADAAEDAAAAAQGGPTEEELQKKREEDYDAFTSTKAQDLAQPLVDAQIPFKIHVVKDHDMKERLCLEAERLGLSAMIMGSRGFGAARRTSKGRLGSVSDYCVHHCVCPVVVVRFPDDGLAEDGEAGGLSSVVGAEDVLHPVPEEDAEYHDATEEQHKDT

SEQ ID NO: 85207 - protein, 126 aa, Setaria italica
  Transcript Sequence Number=SeqID_19233
  Gene Ontology: Cellular component=integral to membrane; Biological process=vesicle-mediated transport
  Homolog annotation: Hit_ID=C3TX87; Match level="QueryCoverage=95%, HitCoverage=52%, E-value=1e-34, Identity=60%"; Hit description =Synaptobrevin-like protein
  Pfam annotation: Domain name=Synaptobrevin; Domain location=34-122; Score=134.2; E_value=4.3e-37; Accession=PF00957.13; Description =Synaptobrevin
MLSIYVSATANFTGVHGRPRLRDQMQYCTDHPEEVSRLSKVKAQVDQVKGIMMENIDKVIDRGEQIDGLVTRTEQLHDQAADFRQQGARVRRKMWYQNMKMKLIVLGIVVALILIIILSVCHGICK

SEQ ID NO: 85208 - protein, 231 aa, Setaria italica
  Transcript Sequence Number=SeqID_19234
  Gene Ontology: Mol. function=glutathione transferase activity
  Homolog annotation: Hit_ID=Q9FQA8; Match level="QueryCoverage=97%, HitCoverage=96%, E-value=9e-87, Identity=73%"; Hit description =Glutathione S-transferase GST 31
  Pfam annotation: Domain name=GST_C; Domain location=100-202; Score =47.1; E_value=7e-11; Accession=PF00043.17; Description=Glutathione S- transferase, C-terminal domain
  Pfam annotation: Domain name=GST_N; Domain location=5-78; Score=66.9; E_value=7.6e-17; Accession=PF02798.12; Description=Glutathione S -transferase, N-terminal domain
  Pfam module annotation: Pfam domain module=GST_C::GST_N; Domain location=100-202::5-78
MSEASAVRVIGLWPSPFVIRVLIALKLKGVEYEFVEEVVGRKSELLLRSNPVHKKIPVLLHNGKPISESLIIVQYIDEVWSAAAPAILPADPYTRAVQRFWAQYIDDKFPSAIRTLRGTDAGDKDQAAEQLSAALAALEGGLLKLGQGKHYFGEDSVGYLDIALVSHVGWLKAVEKMTGVALLDEAKVPNLVAWADRLCAHPAVVDAIPDADKFVEFSVMHGSFSKNYSPT

SEQ ID NO: 85209 - protein, 41 aa, Setaria italica
  Transcript Sequence Number=SeqID_19235
IARQICFSAAVLKTTTSCKEKTRIEIYCKSFSFNPALLISS

SEQ ID NO: 85210 - protein, 205 aa, Setaria italica
  Transcript Sequence Number=SeqID_19236
  Gene Ontology: Mol. function=nucleoside-triphosphatase activity
  Homolog annotation: Hit_ID=Q8H6B2; Match level="QueryCoverage=74%, HitCoverage=12%, E-value=2e-45, Identity=64%"; Hit description =Bromodomain protein 103
  Subcellular localization annotation: CTP_CleavageSite=50; ConfidenceScore=5.14e-01
RPKYYARGYMYYKPAMRKKVKSKKRTAASQIAKKLLRKPAARPPPADSIAANLRRSTRKRRIPVNLEGYDTDSSSMEDDDLMRPRYRTSKNKGGNDAAHDEVSARPKRQKLSNSIPRREGLRPRRSLRGRRLHPYQESEDEQESSEEQGAEDRRENGNDIEEDGDDDEVDGGDEAEADGDDEDGEEEQRKRRRRYDWDRSEVRRP

SEQ ID NO: 85211 - protein, 205 aa, Setaria italica
  Transcript Sequence Number=SeqID_19237
  Gene Ontology: Mol. function=2 iron, 2 sulfur cluster binding; Cellular component=chloroplast envelope; Biological process =oxidation reduction
  Homolog annotation: Hit_ID=Q10BT2; Match level="QueryCoverage=95%, HitCoverage=56%, E-value=1e-81, Identity=70%"; Hit description=Cell death suppressor protein Lls1, putative, expressed
  Pfam annotation: Domain name=PaO; Domain location=1-69; Score=71.5; E_ value=3e-18; Accession=PF08417.4; Description=Pheophorbide a oxygenase
MLVAFCIPVAPGRSRLILGVPQECWVWLLKIIPRWFSHSITNRVLDSDICLVHFEERNFIAAGLDNWHKACHVPTSSDGMVVAFRNWFRKYCKHQVGWGSPQVEQLPPSPTKDKLLERYWSHVVQCTSCSAALKAMKALEVAMQVMSVAIVGFLSVAKGTLLASTVQRTAVMSAAVLCFVASRWLANYIEKNFYFQVLCSFLTSE

SEQ ID NO: 85212 - protein, 97 aa, Setaria italica
  Transcript Sequence Number=SeqID_19238
  Gene Ontology: Mol. function=protein kinase activity
  Homolog annotation: Hit_ID=B6SXV9; Match level="QueryCoverage=64%, HitCoverage=8%, E-value=1e-24, Identity=80%"; Hit description =Ubiquinone biosynthesis protein ubiB
KYGLERLIAAISAQSAESSNGSGAGSGESANGSSKWRSFDMHSVVAATEDLFDFILSRKGWRVRVFLVQDIIKASDAFLQEATFPYIFEEEGKMGKL

SEQ ID NO: 85213 - protein, 910 aa, Setaria italica
  Transcript Sequence Number=SeqID_19239
  Gene Ontology: Mol. function=nucleoside-triphosphatase activity; Cellular component=mitochondrial matrix; Biological process=ATP -dependent proteolysis
  Homolog annotation: Hit_ID=P93647; Match level="QueryCoverage=97%, HitCoverage=100%, E-value=0.0, Identity=91%"; Hit description=Lon protease homolog 1, mitochondrial
  Pfam annotation: Domain name=AAA; Domain location=429-624; Score =185.8; E_value=1.2e-52; Accession=PF00004.21; Description=ATPase family associated with various cellular activities (AAA)
  Pfam annotation: Domain name=AAA_2; Domain location=425-567; Score= -32.2; E_value=0.0035; Accession=PF07724.6; Description=ATPase family associated with various
  Pfam annotation: Domain name=AAA_3; Domain location=429-566; Score =7.8; E_value=5.3e-05; Accession=PF07726.3; Description=ATPase family associated with various
  Pfam annotation: Domain name=AAA_5; Domain location=429-572; Score =28.2; E_value=4.4e-06; Accession=PF07728.6; Description=ATPase family associated with various
  Pfam annotation: Domain name=LON; Domain location=36-279; Score=95.4; E_value=2e-25; Accession=PF02190.8; Description=ATP-dependent protease La (LON) domain
  Pfam annotation: Domain name=Lon_C; Domain location=691-900; Score =368.1; E_value=1.6e-107; Accession=PF05362.5; Description=Lon protease (S16) C-terminal proteolytic domain
  Pfam annotation: Domain name=MMR_HSR1; Domain location=428-540; Score= -15.9; E_value=0.029; Accession=PF01926.15; Description=GTPase of unknown function
  Pfam module annotation: Pfam domain module=AAA::AAA_2::AAA_3::AAA _5::LON::Lon_C::MMR_HSR1; Domain location=429-624::425-567::429 -566::429-572::36-279::691-900::428-540
MANLAVPYAAAPPFPVDFDAIRVPAMADSPVELPGRLAILPFRNKVLLPGAIVRIRCTNPSSVKLVEQELWQKEEKGLIGVLPVRDSEAGAVGSLLSAGVGSDSGEGGSKAGGSAGESSKQDTKNGKEPIHWHSKGVAARALHLSRGVEKPSGRVTYIVVLEGLCRFSVQELSARGSYHVARVSRLDMTKTELEQAEQDPDLIALSRQFKATAMELISVLEQKQKTVGRTKVLLDTVPVYRLADIFVASFEISFEEQLSMLDSVDLKVRLSKATELVDRHLQSILVAEKITQKVEGQLSKSQKEFLLRQQMRAIKEELGDNDDDEDDVVALERKMQNAGMPPNIWKHAQRELRRLRKMQPQQPGYSSSRAYLELLADLPWQKVSEERELDLRAAKESLDRDHYGLTKVKQRIIEYLAVRKLKPDARGPVLCFVGPPGVGKTSLASSIAKALNRKFIRISLGGVKDEADIRGHRRTYIGSMPGRLIDGLKRVSVSNPVMLLDEIDKTGSDVRGDPASALLEVLDPEQNKTFNDHYLNVPFDLSKVIFVATANRMQPIPPPLLDRMEVIELPGYTPEEKLKIAMKHLIPRVLEQHGLSSTYLQIPEAMVKLIVERYTREAGVRNLERNLAALARAAAVKVAEQVNTLRLGKEIQPITTTLLDSRLADGGEVEMEVIPMGHDISNTYENPSPMIVDEAMLEKVLGPPRFDDGEAADRVASPGVSVGLVWTSFGGEVQFVEATAMVGKGDLHLTGQLGDVIKESAQLALTWVRARAADLNLSPTSDINLLESRDIHIHFPAGAVPKDGPSAGVTLVTSLVSLFSNRKVRADTAMTGEMTLRGLVLPVGGVKDKVLAAHRYGIKRVILPERNLKDLAEVPSPILSGMEILLVKRIEEVLGHAFEGGCPLRSRSKL

SEQ ID NO: 85214 - protein, 121 aa, Setaria italica
  Transcript Sequence Number=SeqID_19240
  Gene Ontology: Mol. function=voltage-gated potassium channel activity; Cellular component=integral to membrane; Biological process=potassium ion transport
  Homolog annotation: Hit_ID=Q9SM12; Match level="QueryCoverage=99%, HitCoverage=13%, E-value=1e-43, Identity=75%"; Hit description =Potassium channel protein ZMK2
  Subcellular localization annotation: CTP_CleavageSite=34; ConfidenceScore=5.09e-01
DSPAVVPDGGGSSRHRRQGRFQQSTSSDSARWPRVSIYKGHPFLRNHSSEAGKLINLPGTMEEFKAIIREKLKVDAEKALIVNDEGAEIDSIDVIRDNDKLFVVTEEDLRRLAAMDPVSAS

SEQ ID NO: 85215 - protein, 250 aa, Setaria italica
  misc_feature (160)..(160): Xaa can be any naturally occurring amino acid
  Transcript Sequence Number=SeqID_19241
  Homolog annotation: Hit_ID=B6SLI4; Match level="QueryCoverage=98%, HitCoverage=98%, E-value=1e-124, Identity=87%"; Hit description=F -box domain containing protein
  Pfam annotation: Domain name=F-box; Domain location=3-47; Score=28.5; E_value=2.7e-05; Accession=PF00646.25; Description=F-box domain
MENEFPDEVLKSVFPLLDGKDLVFCMLVCRQWRDIAKDDYFWKCICSRKWPSICKQPPSDANYKKLYLTFSQPPTMQHLPVPRLTFEDLVFYIDMWLEGSLIFSQAISGCTLRAGLQCTPRGIPDILAAHLKSLDCIMMLEVEPRLSIPMGPAITVSVLXHRKDSNKMACIINKSTFDYIDSNAARALAYEYLRFSPRHPFISDIRAWMSLLFLYKGGNVVEVFGIELDFCDAARSETEILWLLDMLDWK

SEQ ID NO: 85216 - protein, 83 aa, Setaria italica
  Transcript Sequence Number=SeqID_19242
  Subcellular localization annotation: CTP_CleavageSite=69; ConfidenceScore=5.40e-01
MLRRALLSSASTRHGGAQIPNPSHSPPQALLQWRHHASVASSSAPPQPPPPPPPSPPRGPSRPGGGGPSVSSLNPAEVAKFAA

SEQ ID NO: 85217 - protein, 56 aa, Setaria italica
  Transcript Sequence Number=SeqID_19243
  Gene Ontology: Mol. function=electron carrier activity
  Homolog annotation: Hit_ID=Q4KXE1; Match level="QueryCoverage=100%, HitCoverage=17%, E-value=9e-11, Identity=71%"; Hit description=Early salt stress and cold acclimation-induced protein 2-3
MARSLGLGFACFALVIAAASATQFRVGGQKGWSVPDAGFEPYNTWAGKLRFQIGDQ

SEQ ID NO: 85218 - protein, 167 aa, Setaria italica
  misc_feature (26)..(26): Xaa can be any naturally occurring amino acid
  misc_feature (70)..(70): Xaa can be any naturally occurring amino acid
  Transcript Sequence Number=SeqID_19244
  Gene Ontology: Mol. function=metal ion binding
  Homolog annotation: Hit_ID=B6TYZ9; Match level="QueryCoverage=100%, HitCoverage=58%, E-value=1e-69, Identity=77%"; Hit description=RING zinc finger protein
QFYNMTDITSNISGVQQYWEHLKYPXVSKILLFETWLRREIQALTRDESVDAIVYHIHGVIGSFMKRLEXEHKSRRISPETRREEFRTLLSDAARPFLLGRTERFVTEVELFLVSNLNMEAYNKLRVQRFRESSSHLMREQDALPHDRSLEEHYLYFICNDTDCDEM

SEQ ID NO: 85219 - protein, 77 aa, Setaria italica
  Transcript Sequence Number=SeqID_19245
VLNLSYLQISKFTGKFKSSANGANGKFWTNTIPDWCLKCRSKGEQYVLCSRQFVHFCHIYDRLKDLQVKVLVITIIL

SEQ ID NO: 85220 - protein, 140 aa, Setaria italica
  misc_feature (12)..(12): Xaa can be any naturally occurring amino acid
  Transcript Sequence Number=SeqID_19246
  Gene Ontology: Mol. function=protein serine/threonine kinase activity; Biological process=protein amino acid phosphorylation
  Homolog annotation: Hit_ID=Q53QB4; Match level="QueryCoverage=97%, HitCoverage=15%, E-value=5e-53, Identity=69%"; Hit description =Leucine Rich Repeat family protein
  Pfam annotation: Domain name=Pkinase; Domain location=1-129; Score= -79.2; E_value=0.0009; Accession=PF00069.17; Description=Protein kinase domain
  Pfam annotation: Domain name=Pkinase_Tyr; Domain location=1-133; Score=-131.3; E_value=5.4e-05; Accession=PF07714.9; Description =Protein tyrosine kinase
  Pfam module annotation: Pfam domain module=Pkinase::Pkinase_Tyr; Domain location=1-129::1-133
SNRRELGLVQRXSIMSDVALAMAYLHHEHFDVVLHCDLKPSNVLLDEDMTACVADFGIARLLLGEDTSIFSRNMHGTIGYMAPEYASTGKASRKSDVFSYGVMLLEVMTGKKPTDAMFNGEEVSLREWVSQAFPSRLAHD

SEQ ID NO: 85221 - protein, 151 aa, Setaria italica
  Transcript Sequence Number=SeqID_19247
  Gene Ontology: Mol. function=protein serine/threonine kinase activity; Cellular component=integral to membrane; Biological process=protein amino acid phosphorylation
  Homolog annotation: Hit_ID=O24585; Match level="QueryCoverage=100%, HitCoverage=16%, E-value=6e-81, Identity=92%"; Hit description =Putative receptor protein kinase CRINKLY4
NCGLFARNRTVFCWGDETVSGVVGLAPRDVRFQSIGAGGYHVCGVLENAQVFCWGRSLEMQQVAPASAIGDGDVNIVPIDAMVSVVGGRFHACGIRSIDHQVACWGFALRNSTSPPKGLKMYALVAGDYFTCGAPAETSLMPRCWGNSGPM

SEQ ID NO: 85222 - protein, 162 aa, Setaria italica
  misc_feature (18)..(18): Xaa can be any naturally occurring amino acid
  Transcript Sequence Number=SeqID_19248
  Gene Ontology: Mol. function=binding; Cellular component=plasma membrane
  Homolog annotation: Hit_ID=B9R701; Match level="QueryCoverage=69%, HitCoverage=17%, E-value=3e-34, Identity=63%"; Hit description =Calmodulin binding protein, putative
IAESIKPRVPPRSSRRKXSSQVNGMLMHMSMHSVSLLLEAILLKAKSLDALGRVTDAAEECRIIIDIIESAWPYGVPDGIAEECKLIDIFHSALEYLPKLWMRSGCFDKAIIAYRRALAKPWNLDSQRSANLQKDLAVTLLYCGVDVKFPQEFAQERNLVSP

SEQ ID NO: 85223 - protein, 131 aa, Setaria italica
  Transcript Sequence Number=SeqID_19249
FLQEAAAPSPLGLDDPSGNANAAGAMTNGRRRKPQRGAGEDEEGGAAAKKDGNGKKRSIARILTSLAALDAEEHADRAGAADASRRELALLESNADTRSQAMMDYYAKMEGSFDAAADSEAAARSKRSRLA

SEQ ID NO: 85224 - protein, 170 aa, Setaria italica
  Transcript Sequence Number=SeqID_19250
  Gene Ontology: Mol. function=flavin-containing monooxygenase activity; Cellular component=intrinsic to endoplasmic reticulum membrane; Biological process=metabolic process
  Homolog annotation: Hit_ID=Q9FLK4; Match level="QueryCoverage=74%, HitCoverage=26%, E-value=6e-22, Identity=42%"; Hit description =Dimethylaniline monooxygenase (N-oxide-forming)-like protein
MASMRPPAEPKKVCVVGAGMSGLAAARELRREGLAVTVLEQCGDIGGQWLYDPRTDADDPLGAAVPVNVHSSMYASVRLLSTRETMGFSDFQFVPRPGAAGRDARRFPGRREVYCYLKDFCAAFGLADAVRLNTRVVRVAMAAPAPREASGGDVKWLVRSVHVQPDGSED

SEQ ID NO: 85225 - protein, 231 aa, Setaria italica
  Transcript Sequence Number=SeqID_19251
  Gene Ontology: Mol. function=protein transporter activity; Cellular component=mitochondrial inner membrane; Biological process=protein transport
  Homolog annotation: Hit_ID=B6SIC7; Match level="QueryCoverage=85%, HitCoverage=86%, E-value=2e-97, Identity=91%"; Hit description =Protein translocase/ protein transporter
  Pfam annotation: Domain name=Tim17; Domain location=63-181; Score =117.1; E_value=6e-32; Accession=PF02466.11; Description =Tim17Tim22Tim23 family
MASGGGDPRPEDDDPFSDGGTSDSDSADESHPRRMGARRPGATNNPILTRLAVSRNPSPLAAATAAPGVCLLRFAWESAAGSLVGAVVGYGKGLVMMKGFKGSFPDAASSAKIFAVLAGVQSLVACSLRKLRGKDDGINAGVAGCCTGLALSFPGAPQTLIQSCLTFGTFSYIIEKLNKQQPALALPPLTGAKDLKGGQTVLPPFTLPLPQDAMDGFSKFQHFLLSKFREN

SEQ ID NO: 85226 - protein, 291 aa, Setaria italica
  Transcript Sequence Number=SeqID_19252
  Gene Ontology: Mol. function=potassium ion transmembrane transporter activity; Cellular component=integral to membrane; Biological process=potassium ion transport
  Homolog annotation: Hit_ID=Q7XLC6; Match level="QueryCoverage=100%, HitCoverage=35%, E-value=1e-130, Identity=78%"; Hit description =Probable potassium transporter 11
  Pfam annotation: Domain name=K_trans; Domain location=1-291; Score= -233.6; E_value=1.5e-12; Accession=PF02705.8; Description=K+ potassium transporter
YVWHFCTVKRYEFEMHSKVSMAWILGLGPSLGLVRVPGIGFVYTELASGVPHIFSHFITNLPAIHSVVVFVCVKYLPVYTVPTEERFLVRRIGPKSYHMFRCVARYGYKDLHKRDEDFEKMLFDCVLLFVRLESMMEGYSDSDEFSVPERGGAGALMSGGASAFLGEKTCSTMCSNGELSFSSQDSIVPAQSPRPPLSRGMTDSGLLTTRLSAGQASTVGDELEFLNRCKDAGVVHILGNTIVRARRDSGIVKKLAVDYMYAFMRRMCRENSVLFNVPHESLLNVGQIYYI

SEQ ID NO: 85227 - protein, 276 aa, Setaria italica
  misc_feature (3)..(3): Xaa can be any naturally occurring amino acid
  Transcript Sequence Number=SeqID_19253
  Gene Ontology: Mol. function=hydrolase activity
  Homolog annotation: Hit_ID=B9R9Y4; Match level="QueryCoverage=92%, HitCoverage=65%, E-value=8e-94, Identity=64%"; Hit description =Catalytic, putative
  Pfam annotation: Domain name=DUF676; Domain location=1-174; Score =176.0; E_value=1.1e-49; Accession=PF05057.6; Description=Protein of unknown function (DUF676)
TSXLTLDGVDVMGERLADEVLDVVSRRPELTKISFLAHSVGGLAARYAIAKLYRHPDGVSDGNTKGTICGLEAINFITVATPHLGSRGNKQVPLLFGSLAMEKVACRVVHWIFRRTGKHLFLTDDEEGQPPLLQRMVEDHGDLYFISALRAFKRRVVYANADCDHIVGWRTSSIRRNTELPELAVSSSEKYPHIVHEEYSEEIDDEKCQDSMTDCNLDILEEKMVTGLRRVSWEKVDVSFQSSITSFAAHSIIQVKYAFMNDGADVIQHIIDHFQL

SEQ ID NO: 85228 - protein, 338 aa, Setaria italica
  Transcript Sequence Number=SeqID_19254
  Gene Ontology: Mol. function=nucleotide binding; Cellular component =nucleus; Biological process=defense response
  Homolog annotation: Hit_ID=Q8RV64; Match level="QueryCoverage=99%, HitCoverage=39%, E-value=6e-90, Identity=54%"; Hit description =Disease-resistant protein DS3
YARTNIRSSQVRSLAYFGLSKCMPSIREFKLIRVLNLGLSGHEGGDDTIDLTGISELLQLRYLKVASDVCIELPKHMRRLHYLETLDIGTKITHVPWDIIHLPCLLHLHLPFETNLMDWISAIPASVWSHGKLTNLQYLHLTCSIPVPDHLQRNMEVLGSLLGGHGNLKTLALILGSAHKNVVHSPSEVTFSWDEFAPPLLERFEWLPHIFTFSRVPKWMGKLGNLRILKISVRELLRDGVNILGELSALTALSLYLQMAPVKRIVFDKAGFSALKYFKLICSAVPCLKFEMDTMPNLKRLKLGFSAHRVDQHGTTPISIEHLPGLEEISAKVGNATS

SEQ ID NO: 85229 - protein, 106 aa, Setaria italica
  Transcript Sequence Number=SeqID_19255
KTQKKQVEEICKKDAVETVNARSSNVRLSVGTYSTVESGIQEIGLSPPSVGQWSSPDSMNIQFNRGFKGCIEYPRTSQKHSLKAKLMEARMESQKVQLRQVLKQKI

SEQ ID NO: 85230 - protein, 614 aa, Setaria italica
  Transcript Sequence Number=SeqID_19256
  Homolog annotation: Hit_ID=Q9LPT5; Match level="QueryCoverage=98%, HitCoverage=84%, E-value=1e-104, Identity=41%"; Hit description =F11F12.2 protein
KAREVSVRRLAAGVWRLRPPEAVAGATAAGGAERRVRVGVEHIPRHLQVQLLKQNTLGHHQSMKNEASSPISVLERKSGELHKVQLHATSTTMEKATKWEPEDRKGMESHDAYLIASQLNLLDEQQDTTYVANLQMELQQVRDRVTELETERRSAKKKLDHLFKKLAEEKAAWRNREHEKVRAILEDMKADLDHEKKNRRRLEMINLKLVNELKEAKMSAKQLLQEYETERKARELTEEVCNELAREVEEDKAEIEALKQDSLKLREEVDEERKMLQMAEVWREERVQMKLVDAKLTLDAKYTQLSKLQQDVEAFISACSCANGDITVVEEAENIIQAIKSVRAQDAEFRYEPPAASEDIFSIFEELRPSEEPVIKEIEPCYKNNSAKCESEIQEASPMTDIFLEKKAKVYSNKSPQDESDTEDGSSWETISHEDMQGSSGSPDGSEPSVNNKICDGSISWKSGNDFEYRGNEKLKDDLTDAYLTNVNQPKKKESAISKLWKSSRPKNSEICKKDAVETVNARSSNVRLSVGTYSTVESGIQEIGLSPPSVGQWSSPDSMNIQFNRGFKGCIEYPRTSQKHSLKAKLMEARMESQKVQLRQVLKQNRKERSKYS

SEQ ID NO: 85231 - protein, 103 aa, Setaria italica
  Transcript Sequence Number=SeqID_19257
  Gene Ontology: Mol. function=oxidoreductase activity; Cellular component=cell wall
  Homolog annotation: Hit_ID=Q53RM3; Match level="QueryCoverage=98%, HitCoverage=27%, E-value=8e-34, Identity=70%"; Hit description=Plant- specific FAD-dependent oxidoreductase
VRASSFFHQTTFSLPLARAAAFVADVRRLRDLNPRALCGVELYDGILMRYVKASTAHLGKPPSAGSGGGDMVDFDMTYYRSRDPRRARLFEDVMEEIEQSGHL

SEQ ID NO: 85232 - protein, 159 aa, Setaria italica
  Transcript Sequence Number=SeqID_19258
MRRSSCGYGGYGQPQPDMNMNYHRSHSEHVTKFAGNPRHTGGGGAVQHHTAVHKESFEEVDGDCYDPRRGHSNHALQQQQQAHRHHNGGGSHRYETYQETYEESCEEETYSAGRRHGNGHAGGGRRYEYESYEETSYEDEEEVVGGGGYAQLKRGQRCA

SEQ ID NO: 85233 - protein, 151 aa, Setaria italica
  Transcript Sequence Number=SeqID_19259
  Gene Ontology: Mol. function=nucleoside-triphosphatase activity; Cellular component=intracellular; Biological process=response to DNA damage stimulus
  Homolog annotation: Hit_ID=Q67EU8; Match level="QueryCoverage=100%, HitCoverage=44%, E-value=1e-83, Identity=98%"; Hit description=DNA repair protein RAD51 homolog A
  Pfam annotation: Domain name=Rad51; Domain location=1-151; Score =256.4; E_value=6.8e-74; Accession=PF08423.3; Description=Rad51
LDKILRGGIETGSITEIYGEFRSGKTQLCHTLCVTCQLPLDQGGGEGKALYIDAEGTFRPQRLLQIADRFGLNGADVLENVAYARAYNTDHQSRLLLEAASMMIETRFALMVVDSATALYRTDFSGRGELSARQMHMAKFLRSLQKLADEF

SEQ ID NO: 85234 - protein, 62 aa, Setaria italica
  Transcript Sequence Number=SeqID_19260
PGVDSAGCWIVPKAYQNRLYRSRPIDICILFVCYSLILPSFKRETKKEVVAAGMWILLRCCQ

SEQ ID NO: 85235 - protein, 110 aa, Setaria italica
  Transcript Sequence Number=SeqID_19261
DHKEENYEPNEDKILENGMYEDAPVKGIESAIMLPSVAGTLKMPVEQLKTNLGDEGEEHSFSCGQDMIEIFCTGSAKKDLFPLPKDYHVDSFPSKLGPVPRIVPFFTSIC

SEQ ID NO: 85236 - protein, 316 aa, Setaria italica
  Transcript Sequence Number=SeqID_19262
  Gene Ontology: Mol. function=aspartic-type endopeptidase activity; Cellular component=extracellular region; Biological process =proteolysis
  Homolog annotation: Hit_ID=B6SMJ5; Match level="QueryCoverage=91%, HitCoverage=65%, E-value=9e-45, Identity=39%"; Hit description =Aspartic proteinase nepenthesin-2
  Pfam annotation: Domain name=Asp; Domain location=93-315; Score= -198.8; E_value=0.084; Accession=PF00026.15; Description=Eukaryotic aspartyl protease
MAPSTFVLLFALLLASLAATSDASFDLRAELNHPYAGSPLSNHEMLRDAAMASKARRRAWNDAASVAIAADHGAISDADVLVRPFGRSEHTLTVGVGTPPQPRTLLLDTGSDLIWTHCKLLGGKHREPLYDPAGSSSFAAVPCDGRLCETGSFNTKNCSSNKCLYTYDYGSATTRGELASETFTFGEHHKVSVSLDFGCGRLTSGSIDGASGILGISPDKLSLVSQLQIPRFSYCLTPFLDRDTSHMFFGAMADLSKYRTTGPIQTTYLVRDPSGRNYYYYVPLIGISVGTKRLNVTASSFAIGLDGGGGTFVDSG

SEQ ID NO: 85237 - protein, 436 aa, Setaria italica
  Transcript Sequence Number=SeqID_19263
  Gene Ontology: Mol. function=aspartic-type endopeptidase activity; Cellular component=extracellular region; Biological process =proteolysis
  Homolog annotation: Hit_ID=B6SMJ5; Match level="QueryCoverage=95%, HitCoverage=94%, E-value=2e-57, Identity=36%"; Hit description =Aspartic proteinase nepenthesin-2
  Pfam annotation: Domain name=Asp; Domain location=93-431; Score= -107.9; E_value=3.6e-07; Accession=PF00026.15; Description=Eukaryotic aspartyl protease
MAPSGFILLLVAILASSGTTGNASFDLRAVLNHPYAGRPVSKYEMIREAVSASKARRAWNAARVAKACGRGGGGGGGTISSPDMPVRPLGKSIYTLTADVGTPPQRHTLVIDTGSDLVWVQCKLFGGGATPTDPLYDPDRSSSFAAVPCDGKLCREGEFESKNCSRNKCLYTYGYGSGRAVGELASETFTFGVRRKVPVTLDFGCGTFLEGDIFTASGFLGLSPDKLSFVSQLKIPRFSYCLTPYTDRKSGHMFFGAMADLSKYRTTAPIQTISFLNNRIGSNLYYFLPLIGVSVGTKKLNVPASSFDRTFIDSGYTTGALTAAARDALKGALVDALKLPRRNASDPDFDFCFQLPHGVPMEAVQTPPLLYHFEGGATMVLHRESYLAEPSPGEMCLVIGVDTQPVLGNLQQQNMHVLFDVQNQKFSFAPTQCDQI

SEQ ID NO: 85238 - protein, 52 aa, Setaria italica
  Transcript Sequence Number=SeqID_19264
IGRKIHLYNVTIGLYMLDWWERYLFSILSPRSLLLLSRRSPSPPDDFSVDPF

SEQ ID NO: 85239 - protein, 83 aa, Setaria italica
  Transcript Sequence Number=SeqID_19265
SWHAPRVTVLTVCSNCYPAIKSAMHHFLPGCFKFLIIPSSIVNANVHVHIGKLAPQYIENPGKQDIDIYSASTSSTRKLSKKF

SEQ ID NO: 85240 - protein, 66 aa, Setaria italica
  Transcript Sequence Number=SeqID_19266
MSWIGRKIHLYNVTIGLYMLDWWERYLFNILMVCLFWYILRYLLGFFQSNLKTLFQDGNYLVGGST

SEQ ID NO: 85241 - protein, 161 aa, Setaria italica
  Transcript Sequence Number=SeqID_19267
  Homolog annotation: Hit_ID=B6STT5; Match level="QueryCoverage=85%, HitCoverage=63%, E-value=2e-71, Identity=94%"; Hit description =Mediator of RNA polymerase II transcription subunit 18
DLAQPTPSWTIRHVGGAMRGAGAEQISVLVRTIVESKASKNVLQYFYTLGYKLDHELLKIGFAFRFHRGAQITVTVTSANKMPRLHATDEAVPVTPGIQLVEITAPAAADNYNDVVSAVTAFCEYLAPLLHLSKPGHSTGIVATAGAAAASLMSSGGGKTL

SEQ ID NO: 85242 - protein, 120 aa, Setaria italica
  misc_feature (113)..(113): Xaa can be any naturally occurring amino acid
  Transcript Sequence Number=SeqID_19268
  Gene Ontology: Mol. function=protein tyrosine kinase activity; Cellular component=plasma membrane; Biological process=protein amino acid phosphorylation
  Homolog annotation: Hit_ID=Q10E34; Match level="QueryCoverage=98%, HitCoverage=15%, E-value=5e-55, Identity=89%"; Hit description =Receptor protein kinase CLAVATA1, putative, expressed
VAAAILKARSLKKASEARVWKLTAFQRLDFTSDDVLDCLKEENIIGKGGAGIVYKGAMPNGELVAVKRLPAMGRGSSHDHGFSAEIQTLGRIRHRHIVRLLGFCSNMRLTSGXEYMPNGS

SEQ ID NO: 85243 - protein, 75 aa, Setaria italica
  misc_feature (14)..(14): Xaa can be any naturally occurring amino acid
  Transcript Sequence Number=SeqID_19269
  Homolog annotation: Hit_ID=Q2QQY9; Match level="QueryCoverage=80%, HitCoverage=20%, E-value=5e-14, Identity=66%"; Hit description=ABA -responsive protein, putative, expressed
PPYVIMGEARGGAXSSRGGRGDSPMEHILDFFNTWSRKAEELASNIWFNRKAPAPRSSAATLRDCFRSLFSLDQS

SEQ ID NO: 85244 - protein, 255 aa, Setaria italica
  Transcript Sequence Number=SeqID_19270
  Gene Ontology: Mol. function=ribonuclease H activity
  Homolog annotation: Hit_ID=B6U8P6; Match level="QueryCoverage=94%, HitCoverage=87%, E-value=1e-126, Identity=90%"; Hit description=ABA -responsive protein
  Pfam annotation: Domain name=GRAM; Domain location=120-198; Score =79.1; E_value=1.6e-20; Accession=PF02893.12; Description=GRAM domain
QPQPPEAVRWGTRQMGPPAAPGAHPENQEAARWTAARGDQELPPYVIMGEPVAAPAQQQRGKGDSPMEHILDFFNTWSRKAEELASNIWFNLKTAPSMSDAAMGKLSLGAKALSEGGFDKLYKQTFSSGPEEHLKKTFACYLSTATGPVAGTLYLTNMNVAFCSDRPLSFAAPSGQTAWSYYKVMIPLAKVAAVEPVTMKQNPPEKYVHVVTVDSHDFWFMGFVSYDKAVHHLTEAVSHRSQHGVAGATAAAGTK

SEQ ID NO: 85245 - protein, 89 aa, Setaria italica
  misc_feature (63)..(63): Xaa can be any naturally occurring amino acid
  Transcript Sequence Number=SeqID_19271
  Homolog annotation: Hit_ID=B9T2X9; Match level="QueryCoverage=100%, HitCoverage=22%, E-value=3e-24, Identity=46%"; Hit description =Pentatricopeptide repeat-containing protein, putative
  Pfam annotation: Domain name=PPR; Domain location=16-50; Score=20.8; E_value=0.0056; Accession=PF01535.12; Description=PPR repeat
RVLKYMNKKGYRPSVISQTGLMEAYGRGKQYRKAEAVFRRMQTSGPEPSPVTYQIILKSLVEXSGDYAQARKLFAQMSERGIPLSTVTF

SEQ ID NO: 85246 - protein, 396 aa, Setaria italica
  Transcript Sequence Number=SeqID_19272
  Gene Ontology: Mol. function=transcription regulator activity; Cellular component=nucleus; Biological process=regulation of transcription
  Homolog annotation: Hit_ID=B9T2X9; Match level="QueryCoverage=90%, HitCoverage=85%, E-value=1e-156, Identity=45%"; Hit description =Pentatricopeptide repeat-containing protein, putative
  Pfam annotation: Domain name=PPR; Domain location=140-174; Score =23.8; E_value=0.00073; Accession=PF01535.12; Description=PPR repeat
  Pfam annotation: Domain name=PPR; Domain location=175-209; Score =20.8; E_value=0.0056; Accession=PF01535.12; Description=PPR repeat
  Pfam annotation: Domain name=PPR; Domain location=210-243; Score=8.4; E_value=0.91; Accession=PF01535.12; Description=PPR repeat
  Pfam annotation: Domain name=PPR; Domain location=248-282; Score =23.2; E_value=0.0011; Accession=PF01535.12; Description=PPR repeat
  Pfam annotation: Domain name=PPR; Domain location=315-349; Score =45.5; E_value=2.1e-10; Accession=PF01535.12; Description=PPR repeat
  Pfam annotation: Domain name=PPR; Domain location=350-384; Score =37.7; E_value=4.7e-08; Accession=PF01535.12; Description=PPR repeat
  Pfam module annotation: Pfam domain module=PPR::PPR::PPR::PPR::PPR::PP R; Domain location=140-174::175-209::210-243::248-282::315-349::350 -384
  Subcellular localization annotation: CTP_CleavageSite=43; ConfidenceScore=5.48e-01
MEAAAIGSQSPLSFPSSLCKAKVSSGLPICNVKVKNRRLEVVCHGMLATRKFMQRKRKEEVFKDAADEAEQKNWRRMMREIEEKGSAVSILKTQRSGKEPLPRDVILGTLVRFKQLKKWNIVSEILEWLRTQHWWDFTEMDFLMLVTAYGKLGDFSRAERVLKYMNKKGYRPSVISQTGLMEAYGRGKQYRKAEAVFRRMQTSGPEPSPVTYQIILKSLVEGDKYKEAETIFEDLLNEKRASFKPDQKMFHMMIYMYRKSGDYAQARKLFAQMSERGIPLSTVTFNSLMSFETDYKEVSSIYDQMQRAGLKPDVVSYSLLIKAYGKARREEEALAVFEEMLDAGVRPTRKSYNILLDAFAISGLVDEANTVFKAMRRHRVEPDLCSYTTMVLAYVN

SEQ ID NO: 85247 - protein, 314 aa, Setaria italica
  Transcript Sequence Number=SeqID_19273
  Gene Ontology: Mol. function=binding
  Homolog annotation: Hit_ID=B9T2X9; Match level="QueryCoverage=72%, HitCoverage=67%, E-value=1e-95, Identity=43%"; Hit description =Pentatricopeptide repeat-containing protein, putative
  Pfam annotation: Domain name=PPR; Domain location=132-166; Score =39.9; E_value=1e-08; Accession=PF01535.12; Description=PPR repeat
  Pfam annotation: Domain name=PPR; Domain location=167-201; Score =28.4; E_value=2.9e-05; Accession=PF01535.12; Description=PPR repeat
  Pfam annotation: Domain name=PPR; Domain location=27-61; Score=45.5; E_value=2.1e-10; Accession=PF01535.12; Description=PPR repeat
  Pfam annotation: Domain name=PPR; Domain location=62-96; Score=37.7; E_value=4.7e-08; Accession=PF01535.12; Description=PPR repeat
  Pfam annotation: Domain name=PPR; Domain location=97-131; Score=35.1; E_value=2.8e-07; Accession=PF01535.12; Description=PPR repeat
  Pfam module annotation: Pfam domain module=PPR::PPR::PPR::PPR::PPR; Domain location=132-166::167-201::27-61::62-96::97-131
SLVILDYKEVSSIYDQMQRAGLKPDVVSYSLLIKAYGKARREEEALAVFEEMLDAGVRPTRKSYNILLDAFAISGLVDEANTVFKAMRRHRVEPDLCSYTTMVLAYVNASDMNGAEKFFRRIKDDGLKPNVVVYGTLMKGYSKLNNVEKVMRVYERMRIQGVEPNQTIYTTIMDVHGRNSDFGNAVIWFKEMEARGYPPDQKAKNILLSLAKTPEEQQEANESVGNGAIQLEVKPDNEEVDGAGEHEITQNDSGNQHLLDDTRARNHVNGRIRAGNYAFDEEDDDDDDDDYEEEDDEEFNFVSLKDKRELNFAS

SEQ ID NO: 85248 - protein, 192 aa, Setaria italica
  Transcript Sequence Number=SeqID_19274
  Gene Ontology: Mol. function=nucleic acid binding; Cellular component= intracellular; Biological process=RNA processing
  Homolog annotation: Hit_ID=B9SPA3; Match level="QueryCoverage=86%, HitCoverage=19%, E-value=9e-51, Identity=56%"; Hit description =Squamous cell carcinoma antigen recognized by T-cells, putative
DAAAPSGSDSDSSDSDDEGAGGVDELRIQALERTLQEQPLDYETHVQYIQCLRKSGNIEKLRAAREEMNKYFPLTPKMWQEWAKDEISLSMSEESFADIEKLYERGVQEYLSIKLWRDYLDYVEEHDPSVSQCTTSGLSKMRDLFERAITAGGLHVTEGSKLWAAYREYEMAILITISDDNDEERAKQVQRI

SEQ ID NO: 85249 - protein, 109 aa, Setaria italica
  Transcript Sequence Number=SeqID_19275
YRSRASLGNWTIYLQLPFRLPVCRTLNISSGIPLIKVFTLLVNGFLLDISSHDVKLPSQFSFQFKLFFHSRSRDDNLSHHNISAFHHLQNQLWRYHNSFLQEHLTPQSI

SEQ ID NO: 85250 - protein, 123 aa, Setaria italica
  Transcript Sequence Number=SeqID_19276
LGGIMPQRRWRLPTGPMSPPALWWRYSPPRAAQDPVEQRLAMAIPLMLVVAPPRPAHPGSLPPHRSSARFVFNLPVWAAGLICSELAKDLTFNPSKTRSKHAHIFFPSSEFPLVLIQYILDVL

SEQ ID NO: 85251 - protein, 405 aa, Setaria italica
  Transcript Sequence Number=SeqID_19277
  Gene Ontology: Mol. function=oxidoreductase activity, acting on the CH-OH group of donors, NAD or NADP as acceptor; Cellular component =cytoplasm; Biological process=branched chain family amino acid biosynthetic process
  Homolog annotation: Hit_ID=B6THR9; Match level="QueryCoverage=99%, HitCoverage=99%, E-value=0.0, Identity=90%"; Hit description=3 -isopropylmalate dehydrogenase
  Pfam annotation: Domain name=Iso_dh; Domain location=42-391; Score =734.8; E_value=6.5e-218; Accession=PF00180.12; Description =Isocitrateisopropylmalate dehydrogenase
  Subcellular localization annotation: CTP_CleavageSite=35; ConfidenceScore=5.20e-01
MAALQATPLKTLAFSRRRAGGAVARPRHMAAFRCSAAARSYNITLLPGDGIGPEVVAVAKDVLSLAGALEGVELRFQEKLMGGSALDATGVPLPDETLAAAKDSDAVLLGAIGGYKWDNNEKHLKPETGLLQLRAGLRVFANLRPAAVLPQLVDASTLKKEVAEGVDIMVVRELTGGIYFGKPRGFGTNDNGEETGFNTEVYSASEIDRIARVAFEVARKRRGKLCSVDKANVLEASMLWRRRVTALASEFPDIELSHMYVDNAAMQLVRNPKQFDTIVTNNIFGDILSDEASMITGSIGMLPSASVGESGPGLFEPIHGSAPDIAGQDKANPLATILSAAMLLRYGLGEDNAAKRIEAAVTETLNQGFRTGDIYSPGTTLVGCKRMGEEVLKTVESQKAVAAIN

SEQ ID NO: 85252 - protein, 114 aa, Setaria italica
  Transcript Sequence Number=SeqID_19278
  Gene Ontology: Mol. function=transferase activity, transferring glycosyl groups
  Homolog annotation: Hit_ID=Q654V3; Match level="QueryCoverage=100%, HitCoverage=30%, E-value=2e-46, Identity=86%"; Hit description =Putative Avr9/Cf-9 rapidly elicited protein 231
GLVHIAMTLDAHYLRGSMAAIYSLLKHASCPESLFFHFLAAEGGGAPPVADLRAAVAASFPSLRFEIYPFRADAVAGLISASVRAALEAPLNYARNHLADLLPRCVPRAIYLDS

SEQ ID NO: 85253 - protein, 99 aa, Setaria italica
  Transcript Sequence Number=SeqID_19279
  Gene Ontology: Mol. function=transferase activity, transferring glycosyl groups
  Homolog annotation: Hit_ID=Q654V3; Match level="QueryCoverage=79%, HitCoverage=21%, E-value=3e-37, Identity=91%"; Hit description =Putative Avr9/Cf-9 rapidly elicited protein 231
SLPPFLLVFAGEVEAVDHRWNQHGLGGDNVHGSCRPLHDGPVSLMHWSGKGKPWDRLDAGRPCPLDHTWRLYDLYIPSDGSGAASPASGPALSASLFSW

SEQ ID NO: 85254 - protein, 289 aa, Setaria italica
  Transcript Sequence Number=SeqID_19280
  Gene Ontology: Mol. function=transferase activity, transferring glycosyl groups
  Homolog annotation: Hit_ID=Q654V3; Match level="QueryCoverage=91%, HitCoverage=69%, E-value=1e-123, Identity=86%"; Hit description =Putative Avr9/Cf-9 rapidly elicited protein 231
  Pfam annotation: Domain name=Glyco_transf_8; Domain location=1-243; Score=177.1; E_value=5e-50; Accession=PF01501.12; Description =Glycosyl transferase family 8
IFFHFLAAEAGAAGGEGPEPEPELLRRAVAASFPSLRFEIYPFRAEAVAGLISASVRAALEAPLNYARNHLADLLPRCVPRAIYLDSDVLAVDDVRRLWETRLPAAAVVAAPEYCHANFSRYFTEAFWNDPVLGARVFAGRRRAPCYFNTGVMVIDLRRWRVGNYRQRIERWMEMQKEKRIYELGSLPPFLLVFAGEVEAVDHRWNQHGLGGDNVFGSCRPLHNGPVSLMHWSGKGKPWDRLDAGKPCPLDHTWKSYDLYIGENDSSASGQSRSALSSSAALPAAVFSW

SEQ ID NO: 85255 - protein, 112 aa, Setaria italica
  misc_feature (110)..(110): Xaa can be any naturally occurring amino acid
  Transcript Sequence Number=SeqID_19281
  Gene Ontology: Mol. function=methyltransferase activity; Cellular component=nematocyst; Biological process=pathogenesis
  Homolog annotation: Hit_ID=B6SZU3; Match level="QueryCoverage=100%, HitCoverage=30%, E-value=1e-48, Identity=80%"; Hit description =Jasmonate O-methyltransferase
  Pfam annotation: Domain name=Methyltransf_7; Domain location=1-112; Score=-166.2; E_value=5e-05; Accession=PF03492.7; Description=SAM dependent carboxyl methyltransferase
QFFLNDLPGNDFNLVFQSLELFKKLAAAKDKGESLPPYYIAGLPGSFYTRLFPDRCVHLFHSSYCLMWRSKVPDELARGTVLNEGNMYIWEATPPSVVKLYRKQFQEDFXLF

SEQ ID NO: 85256 - protein, 61 aa, Setaria italica
  Transcript Sequence Number=SeqID_19282
  Subcellular localization annotation: CTP_CleavageSite=18; ConfidenceScore=5.08e-01
EMIRMPSKSTRSLPVAAPAAAVAAADRIPSQPLPTSLRTWRAHFRRFHKPPRSPKVPRNGA

SEQ ID NO: 85257 - protein, 328 aa, Setaria italica
  Transcript Sequence Number=SeqID_19283
  Gene Ontology: Mol. function=ATPase activity, coupled to transmembrane movement of substances; Cellular component=integral to membrane; Biological process=transport
  Homolog annotation: Hit_ID=Q71CZ3; Match level="QueryCoverage=100%, HitCoverage=22%, E-value=1e-149, Identity=76%"; Hit description =Multidrug resistance associated protein MRP2
  Pfam annotation: Domain name=ABC_tran; Domain location=50-221; Score =153.7; E_value=5.5e-43; Accession=PF00005.19; Description=ABC transporter
CLEELPSDAVQRLPSGRSDFAININNGCFSWEASPEVTTLKDLNFKVRPGMRVAVCGTVGSGKSSLLSCILGEIPKLSGEVQICGTTAYVSQSAWIQSGKIQDNILFGKEMDNEKYERVLESCSLKKDLEILPFGDQTVIGERGINLSGGQKQRIQIARALYQEADIYLFDDPFSAVDAHTGSHLFKECLLGALASKTVVYVTHQIEFLPAADLILVMKDGRIAQAGKYNDILGSGEEFMELVGAHKDALAALDLIDVAGRSNESSPSRGTAKLTRSLSSAEKKDKQDEGNNQSGQLVQEEEREKGKVGFWVYWKYLTLAYKGALVPI

SEQ ID NO: 85258 - protein, 480 aa, Setaria italica
  misc_feature (98)..(98): Xaa can be any naturally occurring amino acid
  misc_feature (334)..(334): Xaa can be any naturally occurring amino acid
  Transcript Sequence Number=SeqID_19284
  Homolog annotation: Hit_ID=P93812; Match level="QueryCoverage=96%, HitCoverage=43%, E-value=8e-63, Identity=32%"; Hit description =F19P19.6 protein
  Pfam annotation: Domain name=DUF810; Domain location=1-480; Score= -29.2; E_value=5.3e-13; Accession=PF05664.3; Description=Protein of unknown function (DUF810)
LKITKDPDYCDVLSSSLSSIMGWAEKRLLAYHETFNTSNIYSLQYILSIGISTAKILVEDQDKSYEYHSGAKGDINVVHSRIETYIHSSLRTAFAQCXFIQKMEEGASKRLSRNHTPILSILAKKTSDLAIKEKNVYSPILKKWHHLRLSVSSATLHGCFGNELKQFIAGLTELTPDTAQVLKAADKLEKDLIHIAIEDSMDIDDVGKSLVRQMPPYEVGTVMANLVKAWVKEQVDKLKGWADQKLEQETWNPKDNNMDSFAPSSVEMLHLIKETFDVFFELSIPMHSALLADLTAGLDKCLHYYVSKVKSGCGKYIVKTVLTYNNVGDFILNXFTGTQSTLFPQLPHLTRCDVGSKLFKKNEKPQLLVKRGSQVGSTTGNESSSLSGLCLRINTLHYIQNELENLDKKTKACLRNAELAQPDVVDGLNINLLLTLSACQEGIRQLCKTTAYKVIFSDLSHVLMDALYVGSPRPCIQTGY

SEQ ID NO: 85259 - protein, 62 aa, Setaria italica
  Transcript Sequence Number=SeqID_19285
  Homolog annotation: Hit_ID=B6SXM9; Match level="QueryCoverage=100%, HitCoverage=10%, E-value=2e-26, Identity=91%"; Hit description =MAC/Perforin domain containing protein
GKSKVPDVFVRIVQQPNNLHLSSYSETSTKDGLTVTCSKRGGETYIQNHSNWLQTVPKKPDA

SEQ ID NO: 85260 - protein, 63 aa, Setaria italica
  Transcript Sequence Number=SeqID_19286
  Homolog annotation: Hit_ID=B6SXM9; Match level="QueryCoverage=55%, HitCoverage=5%, E-value=1e-12, Identity=94%"; Hit description =MAC/Perforin domain containing protein
  Subcellular localization annotation: CTP_CleavageSite=38; ConfidenceScore=5.02e-01
VPLQWAPMFNELVLGPQKRKGSYPSMQFRFLGPKLHVSTSQVPAMLICTLDLKVSVCSFIHRY

SEQ ID NO: 85261 - protein, 615 aa, Setaria italica
  Transcript Sequence Number=SeqID_19287
  Homolog annotation: Hit_ID=B6SXM9; Match level="QueryCoverage=99%, HitCoverage=99%, E-value=0.0, Identity=88%"; Hit description =MAC/Perforin domain containing protein
  Pfam annotation: Domain name=MACPF; Domain location=98-313; Score =107.7; E_value=4.1e-29; Accession=PF01823.11; Description =MACPerforin domain
MEVGEEAVRALGAGFDLTSDFRLRFAKASEGRRLVELGGETRDVPLPGGAGATLRGVPRDVGVDKGDRIRFRSDVLEFNQMSELLNQKSSVQGKVPSGYFNALYELSGAWLTDAKETKHLAFDGYFISLYNLHLKASPLVLRDEVRKAVPSKWDPVALAWFIKTYGTHIIVEMAIGGQDVICVKQSHSSTVAAADLKLHMEDLGDFLFSDMKNHSPIHRKTKDGKSKVPDVFVRIVQQPNNLHLSSYSETSTKDGLTVTCSKRGGETYIQNHSNWLQTVPKKPDAIMFKFVPITSLLTGIPGSGYLSHAINLYLRYKPDLQELQYFLEFQVPLQWAPMFNELVLGPQKRKGSYPSMQFRFLGPKLHVSTSQVSSSQKPIVGLRLYLEGRKCNRLAIHVQHLSSAPSMLVDSMASSMSEWRESEDTDPGYIEAIQWKNYSCVCTSAIKYNPEWHKRAPGGVFIVTGAQLVAKGTWSKKVLHLRLLYTHIPNCSIQRTEWTRAPAASQKGSFLTTISTTLSSPFTQRDTHQQHAPRHEPAQLNSGVYPDGPPVPLRSRKLLKFVDMAEVVKGPHDVPGHWLVIAAKLVKEGGKIGLHVKFALLGYDGQPSQGDSFGS

SEQ ID NO: 85262 - protein, 86 aa, Setaria italica
  Transcript Sequence Number=SeqID_19288
MGADQFLSISEGGLGGEAVYCAVILWLSVVSWIIFSWVGGDEDGMRRGRRRRGSRGSPVFVGAAGICDGTGPGCSGGYGICGTCID

SEQ ID NO: 85263 - protein, 80 aa, Setaria italica
  misc_feature (37)..(37): Xaa can be any naturally occurring amino acid
  Transcript Sequence Number=SeqID_19289
KCECLLHLGLSSSQTKNEKWMGSWECTLTCGPRGASXPIMLLSQRLERAVHVGAGGEPQTWRPASPTIIPRVDAALPLRP

SEQ ID NO: 85264 - protein, 430 aa, Setaria italica
  Transcript Sequence Number=SeqID_19290
  Gene Ontology: Mol. function=protein serine/threonine kinase activity; Biological process=protein amino acid phosphorylation
  Homolog annotation: Hit_ID=Q5JJY4; Match level="QueryCoverage=83%, HitCoverage=55%, E-value=1e-178, Identity=81%"; Hit description =Probable protein phosphatase 2C 4
  Pfam annotation: Domain name=Pkinase; Domain location=60-341; Score =158.3; E_value=2.3e-44; Accession=PF00069.17; Description=Protein kinase domain
  Pfam annotation: Domain name=Pkinase_Tyr; Domain location=60-341; Score=48.1; E_value=6.3e-17; Accession=PF07714.9; Description =Protein tyrosine kinase
  Pfam module annotation: Pfam domain module=Pkinase::Pkinase_Tyr; Domain location=60-341::60-341
  Subcellular localization annotation: CTP_CleavageSite=47; ConfidenceScore=5.07e-01
FTFKVLRSGSAGRTDRPPPSRRRWRRRRWGVEVPPEETNRCVRGCCRSAAIPLHLPPASFSLVSPIARGSESTVYEARLGGKRVAAKKPVLATSEDLDKFHYQLQLLCELDHPGLAKLIAAHASPPNYLMFFDFFEPPNLADKIHVEEWSPSVQQVVAIASDLAKALQYLHILGVVHRDIKPANILLDKDLHPHLADFGLAMFQKDIKCVSVENWKSSGKPTGGFHKRNMVGTLIYMAPEILRKDIHTEKSDVYSFAVSINELLTGVVPYTDLRAEAQAHTVLEMTYTEQQLTAAVVSQGLRPALALPKSGVPPTLLSLIQRCWDRDPEKRPSFENIIDELNIIQKHLVSSACLPPSPVSKTQSGNIEAHHYLLCWFVNANYATMFSCLLQFCCKIHLTTGTDHSTAYNVFHDAHRKGFFFNTQSCVSLY

SEQ ID NO: 85265 - protein, 183 aa, Setaria italica
  misc_feature (15)..(15): Xaa can be any naturally occurring amino acid
  misc_feature (165)..(165): Xaa can be any naturally occurring amino acid
  Transcript Sequence Number=SeqID_19291
  Gene Ontology: Mol. function=methyltransferase activity; Cellular component=nucleus; Biological process=cell division
  Homolog annotation: Hit_ID=Q9LFB3; Match level="QueryCoverage=99%, HitCoverage=55%, E-value=9e-72, Identity=75%"; Hit description=Cell division-like protein
  Pfam annotation: Domain name=FtsJ; Domain location=1-159; Score =159.5; E_value=1e-44; Accession=PF01728.11; Description=FtsJ-like methyltransferase
GSWSQVLSRNVYVPXKQSPDYKEGDLPLIVAIDLQPMAPIEGVIQVQGDITNARTAEVVIRHFDGFKADLVVCDGAPDVTGLHDMDEFVQSQLILAALTIVTHVLKVGGKFVAKIFRGKDTSLLYCQLKLFFSQVTFAKPKSSRNSSIEAFAVCENYSPPEGFKXEEDLYHLLEKVGTPSGAD

SEQ ID NO: 85266 - protein, 98 aa, Setaria italica
  Transcript Sequence Number=SeqID_19292
YPSLLQPLIHERDMFLAWSLKRSKAVNKSKTVVGVVGKGHMNGIVYALISDQGDLRFRDLVGRESSDTWVTSLIKGLVRDTIIGLVLWALYEQLQAVL

SEQ ID NO: 85267 - protein, 134 aa, Setaria italica
  misc_feature (74)..(74): Xaa can be any naturally occurring amino acid
  misc_feature (103)..(103): Xaa can be any naturally occurring amino acid
  Transcript Sequence Number=SeqID_19293
  Gene Ontology: Mol. function=transferase activity
  Homolog annotation: Hit_ID=B9SJZ3; Match level="QueryCoverage=99%, HitCoverage=32%, E-value=2e-16, Identity=34%"; Hit description =Pentatricopeptide repeat-containing protein, putative
  Pfam annotation: Domain name=PPR; Domain location=17-51; Score=30.3; E_value=7.9e-06; Accession=PF01535.12; Description=PPR repeat
  Pfam annotation: Domain name=PPR; Domain location=54-87; Score=20.4; E_value=0.0076; Accession=PF01535.12; Description=PPR repeat
  Pfam annotation: Domain name=PPR; Domain location=88-122; Score=30.0; E_value=9.7e-06; Accession=PF01535.12; Description=PPR repeat
  Pfam module annotation: Pfam domain module=PPR::PPR::PPR; Domain location=17-51::54-87::88-122
HAVYAEMLHLGIEPSIVTYNTLLDSYLKEGRKDKAGMLLKEMETQGGDCSLNDVTCNVMISWFTREGNLDKAAXLVDSMRLSKTASSFTYNPLITALLEKGFXKKVESLQLEMENEGIMPTVVTYNAIIDGLLK

SEQ ID NO: 85268 - protein, 155 aa, Setaria italica
  Transcript Sequence Number=SeqID_19294
  Gene Ontology: Cellular component=membrane
  Homolog annotation: Hit_ID=A6MZY1; Match level="QueryCoverage=96%, HitCoverage=77%, E-value=2e-17, Identity=30%"; Hit description =Serine incorporator 3 (Fragment)
MKGLLSSGIMSSYIVFLCWSALHSEPEAGKCHSHMKIAKDGDWATIVSFIIAICSIVMATFSTGIDTKSFQFRNDEVQLEEDTPYSYEIFHIVFAMGAMYFAMLFISWELNHPARKWSIDVGWASTWVKIINEWFAASIYIWRLISPVVLRNQFV

SEQ ID NO: 85269 - protein, 109 aa, Setaria italica
  misc_feature (55)..(55): Xaa can be any naturally occurring amino acid
  Transcript Sequence Number=SeqID_19295
  Subcellular localization annotation: CTP_CleavageSite=70; ConfidenceScore=5.05e-01
MMDPGSRDNLDFGDQLSTPNPPTPHMINFSLQQQSQVQYFPSYGFHSHNPPVSSXHRHPWVMLGCTTPSPASTTTTELDSADDADDAVLAYINQFLLEDEDDESYPVSS

SEQ ID NO: 85270 - protein, 190 aa, Setaria italica
  Transcript Sequence Number=SeqID_19296
  Gene Ontology: Mol. function=DNA binding
  Homolog annotation: Hit_ID=Q6L564; Match level="QueryCoverage=44%, HitCoverage=27%, E-value=4e-36, Identity=82%"; Hit description =Putative MYB transcription factor
  Pfam annotation: Domain name=Myb_DNA-binding; Domain location=45-92; Score=50.6; E_value=6.1e-12; Accession=PF00249.23; Description=Myb -like DNA-binding domain
RGRRLCSLSIDECSTGRATDGGSGGGYLSDDGGRGGAALRERKKGVPWSEEEHRLFLEGLDKLGRGDWRGISRGFVTTRTPTQVASHAQKFFLRQSSAGKKSSTKRRSSLFDMVQNCESGRDVVLVSDASDGKAASTSNSVSPKAPRDVYRKESTAIHERTTIRPSSERDSVSETVTVTTEQAHGYHCSP

SEQ ID NO: 85271 - protein, 290 aa, Setaria italica
  misc_feature (264)..(264): Xaa can be any naturally occurring amino acid
  Transcript Sequence Number=SeqID_19297
  Gene Ontology: Cellular component=plasma membrane
  Homolog annotation: Hit_ID=Q9XI89; Match level="QueryCoverage=77%, HitCoverage=46%, E-value=9e-73, Identity=59%"; Hit description =F7A19.6 protein
  Pfam annotation: Domain name=DUF1336; Domain location=117-289; Score =233.4; E_value=5.6e-67; Accession=PF07059.4; Description=Protein of unknown function (DUF1336)
EAKTRNEGIKILTKLRRGEDACNTLKSFKDGEKQHESIFKNLTPVCTPRHANKVQPLAVASPRGQKKKSAVVRLSFKRQSFDGEQTTEICSSRRYLICPRAGLLVPQAGEKISEGCWSVLEPSTFKLRGESFFKDKKKSPAPGCSPYTPFGVDIFMSPRKIHHIAQHIELPSVKPNEKIPSLLIVNIQMPTYPAAMFLGDSDGEGINLVLYFKLNDNFEKEISPQFHDSIKRLVNDEIEKVKGFPLDSTVPFRERLKILAGLVXPDDMNLSSAERKLVQAYNEKPVLSRP

SEQ ID NO: 85272 - protein, 154 aa, Setaria italica
  Transcript Sequence Number=SeqID_19298
  Gene Ontology: Mol. function=oligopeptide transporter activity; Cellular component=integral to membrane; Biological process =oligopeptide transport
  Homolog annotation: Hit_ID=B6U8Q5; Match level="QueryCoverage=100%, HitCoverage=20%, E-value=8e-67, Identity=79%"; Hit description =Oligopeptide transporter 4
VQVASLPVGHFMARVLPRTRHRAPKLLGGGEWSLNPGPFNMKEHVLISIFANAGFAFGGGSAYAVGIIDIIRAFYHRHISFFTAWLLVITTQVLGYGWAGLMRKYVVEPAHMWWPSTLVQVSLFRALHEKDEASKGSRQISRSKFFLVALACSF

SEQ ID NO: 85273 - protein, 58 aa, Setaria italica
  misc_feature (21)..(21): Xaa can be any naturally occurring amino acid
  Transcript Sequence Number=SeqID_19299
MATCRKMARVDVAELKQRLVXKRLGRQRAGKYFAHLTRLLNLKLTKVEFDKLCFATIG

SEQ ID NO: 85274 - protein, 137 aa, Setaria italica
  misc_feature (45)..(45): Xaa can be any naturally occurring amino acid
  Transcript Sequence Number=SeqID_19300
  Gene Ontology: Mol. function=hydrolase activity; Biological process =metabolic process
  Homolog annotation: Hit_ID=B6UI33; Match level="QueryCoverage=60%, HitCoverage=22%, E-value=3e-23, Identity=66%"; Hit description =Gibberellin receptor GID1L2
  Pfam annotation: Domain name=Abhydrolase_3; Domain location=2-117; Score=-80.2; E_value=0.02; Accession=PF07859.5; Description =alphabeta hydrolase fold
GWGASPPTPPIIAGCILLWPYFCGERRTASEASCPSDVFLTLPLXDQMWRLALPAGATRDHPLANPFGPGSPALDSVALPPVLVAAGDSDMLVDRIGEQARRARRVRGAGPRVLPLRGRRRAAPRRAAAVRARRRGG

SEQ ID NO: 85275 - protein, 270 aa, Setaria italica
  Transcript Sequence Number=SeqID_19301
  Homolog annotation: Hit_ID=Q6YRM5; Match level="QueryCoverage=99%, HitCoverage=54%, E-value=1e-110, Identity=72%"; Hit description=Zinc finger (C3HC4-type RING finger) protein family-like
GADTVLPSVQIRHAVAFPDRVLLILKNGSSLPAPEQFECLYSPANSSELRHQALLAVSLPDGSSVVHCPAEPSGVDVSLSLSLSPPVAPLQWDRLVYTALVDSRDNSTVVFAKGMNLRPGRLGVASRYQCVFGRDLSKPKHVLTSPVISAAQEIFRCVTPVRIRRYLRMSMDANGNGDSDDKPMLVSIRTKGLRDSTLPSIAEPEPLPRYKRHRRQKAHSMCVCTMLRNQARFLQEWIIYHSHIGVERWFIYDNNSDDDIEQVLNTMDPS

SEQ ID NO: 85276 - protein, 173 aa, Setaria italica
  misc_feature (25)..(25): Xaa can be any naturally occurring amino acid
  Transcript Sequence Number=SeqID_19302
  Gene Ontology: Mol. function=ATP-dependent helicase activity; Cellular component=intracellular
  Homolog annotation: Hit_ID=Q10CV6; Match level="QueryCoverage=100%, HitCoverage=15%, E-value=5e-86, Identity=89%"; Hit description =Helicase associated domain family protein, expressed
DGQVLLYANSVNAKYQTIPYPWLVXFGEKVKVNAVFIRDSTGVSDSILILFGGAVAKGSMAGHLKMLDGYIDFFMDPSLSECYLQLREELDKLIQKKLEDPNFDIHKEGKYILYAAQELTAGDLCEGRFVFGRETSRAKLQSPEEEGKSSLIKDGMNPKSLLQTLLMRAGHTP

SEQ ID NO: 85277 - protein, 86 aa, Setaria italica
  Transcript Sequence Number=SeqID_19303
RCHWVWFHLPVIKYLGSLTYDASLLSRSTVFTSYPTLIKLASVDIYLFYHLAVYDILIVINYVGIDDRSVLNSPLHLNLSYPRVPN

SEQ ID NO: 85278 - protein, 132 aa, Setaria italica
  Transcript Sequence Number=SeqID_19304
  Subcellular localization annotation: CTP_CleavageSite=74; ConfidenceScore=5.61e-01
STSKDCLHSTTTRQATSSIQAKQSMPGTAISQMHTQFTQSNFIHTSKQLTLPRSPRNLRPQSRLSVPSTARKLAASSTHSPQGPKETFRISTHLSHLVHDLAPKLACAARDGRALPQASSHRRWWRVHGGPG

SEQ ID NO: 85279 - protein, 156 aa, Setaria italica
  Transcript Sequence Number=SeqID_19305
NKGSLEDRLCSPCTFSIRKSMGALPRSCLKTALSSKQQFSPIPEGSSKEDIDSNGPTQGYKRSESSDEVSKDLASRYDIYGLNQTTKNTYRTRNAQDTLQWYLSPPKTCVLMDLSDDKPHPTPARSNTKGKHDVSDDKPIQTPAVHSKALLVPLER

SEQ ID NO: 85280 - protein, 159 aa, Setaria italica
  Transcript Sequence Number=SeqID_19306
ILTIHSTPSLQENGPSLQERVWTKFTSVEHPGSKSLYANIHLNHRNLKFPSIATLKSLGSTVCLYIPSRSMSTIKWVQFTQPRHCKRMEHMRVWTKFNLVEHPGSNQFICKYPSEPQDSEVSIHRHIEIFGKHRVHQVSIALSYGSSPETFWAFASVVN

SEQ ID NO: 85281 - protein, 225 aa, Setaria italica
  misc_feature (59)..(59): Xaa can be any naturally occurring amino acid
  Transcript Sequence Number=SeqID_19307
  Gene Ontology: Mol. function=nucleic acid binding
  Homolog annotation: Hit_ID=B6SYE3; Match level="QueryCoverage=92%, HitCoverage=35%, E-value=1e-61, Identity=59%"; Hit description=Zinc finger C-x8-C-x5-C-x3-H type family protein
PALLSSSSLDPSIISAGPLSPIKDEVWETSVPFVPSFSFPTPPGSPYDPFVDCIEPPKXVGNTDNLKSSLDDFSISSQHTNPDVITDKSLNRDDKLTRNMSAIGANGPACLIASDRGRSSSLDVNNRVKACDRKNNVGSSDEKARDFRFHLAEHIKDLIKPIWKEGNLSKDAHKQVVKKSVEKVVDSIEPNQVPTTKEMIAKYITTNGSKIEKLVKAYVDRHRTA

SEQ ID NO: 85282 - protein, 406 aa, Setaria italica
  misc_feature (179)..(179): Xaa can be any naturally occurring amino acid
  Transcript Sequence Number=SeqID_19308
  Gene Ontology: Mol. function=tryptophan-tRNA ligase activity; Cellular component=cytoplasm; Biological process=tRNA aminoacylation for protein translation
  Homolog annotation: Hit_ID=B9RS09; Match level="QueryCoverage=85%, HitCoverage=83%, E-value=1e-163, Identity=81%"; Hit description =Tryptophanyl-tRNA synthetase, putative
  Pfam annotation: Domain name=tRNA-synt_1b; Domain location=60-359; Score=369.2; E_value=7.7e-108; Accession=PF00579.17; Description =tRNA synthetases class I (W and Y)
MSRALLAHVLHRPPLLSSRSGAGARGLLASRIHPLRRLNCSAVEAAADPTEEAPAPPARKKRVVSGVQPTGMVHLGNYLGAIKNWVALQDLYETFFFIVDLHAITLPYDAPELSKATRSTAAIYLACGIDSSKASIFVQSHVRAHVELMWLLSSSTPIGWLNRMIQFKEKSRKAVRHSXGDENVGVALLTYPVLMASDILLYQSDLVPVGEDQTQHLELTREIAERVNNLYGGRKWKKLGGRGGSLFKVPEALIPPAGARVMSLTDGLSKMSKSAPSDQSRINLLDPKDVIVNKIKRCKTDSFPGLEFDNPERPECRNLLSIYQIITGKTKEEVVSECQDMNWGTFKTTLTDALIEHLQPIQARYEEIMSDPGYLDNVLLKGAGKASEIADITLNNVYQAMGFLRR

SEQ ID NO: 85283 - protein, 83 aa, Setaria italica
  Transcript Sequence Number=SeqID_19309
SFPVPARAGHLVERERELRSLAREPSTAPFVSPFTSILPIPSLPHYLTAVAAYTHQNALHLLSSVPTWNRIASSLRSRMANQG

SEQ ID NO: 85284 - protein, 446 aa, Setaria italica
  Transcript Sequence Number=SeqID_19310
  Gene Ontology: Mol. function=transferase activity, transferring nitrogenous groups; Biological process=biosynthetic process
  Homolog annotation: Hit_ID=Q6JN58; Match level="QueryCoverage=99%, HitCoverage=91%, E-value=0.0, Identity=84%"; Hit description=Acc synthase
  Pfam annotation: Domain name=Aminotran_1_2; Domain location=20-402; Score=457.8; E_value=1.6e-134; Accession=PF00155.13; Description =Aminotransferase class I and II
DGWKAYDMNPFDLDHNRDGVIQMGLAENQLSLDLIEEWSLNHPEASICTAQGASQFRRIANFQDYHGLPEFREAMAKFMGQVRGGKVTFDPDRVVMSGGATGAQDTLAFCLADPGDAYLVPTPYYAAFDRDCCWRSGIKLLPIECHSSNGFALTREALVSAYEGARGQGIRVKGILITNPSNPLGTIMGRDTLAMLAEFATEHRVHLICDEIYAGSVFAKPDFVSIAEVVERDVPGCNRDLIHIAYSLSKDFGLPGFRVGIIYSYNDAVVACARKMSSFGLVSSQTQYFLARMLSDTDFMARFLAESKRRLAARHERFTSGLRDVGIGCLPGNAGLFSWMDLRGMLRDKTPEAELELWRVIIHKVKLNVSPGTSFHCGEPGWFRVCHANMDDETMEVALGRIRSFVQQQKQKAKAKSWAARGRLHLSLPRRGGAVASHLALSSPIR

SEQ ID NO: 85285 - protein, 93 aa, Setaria italica
  Transcript Sequence Number=SeqID_19311
  Gene Ontology: Mol. function=microtubule motor activity; Cellular component=nuclear chromosome, telomeric region; Biological process =microtubule-based movement
  Homolog annotation: Hit_ID=Q7XJW0; Match level="QueryCoverage=95%, HitCoverage=6%, E-value=2e-20, Identity=59%"; Hit description =OSJNBa0016O02.10 protein
MRAAGAHDVGMALRKAEEAASRRCEAARWLRQMEPAAVETLPERPSEEEFCVALRNGLVLCKVLNRVNPGAVPKVVENPVVTVQTFDGPAQSA

SEQ ID NO: 85286 - protein, 281 aa, Setaria italica
  Transcript Sequence Number=SeqID_19312
  Homolog annotation: Hit_ID=B9SMP5; Match level="QueryCoverage=98%, HitCoverage=45%, E-value=2e-46, Identity=37%"; Hit description =Ribonuclease, putative
MMHSKFVAPLPPNMHEFMCSLKMVFSNVVDISHLWRQIGPLRKAKNIQAALSYLQRQYFVPMEIKIPQQDVTSSVTKNEQNVLRITKLFAKLSNLLKISPECQLQSGEQCAAVEEYCNIFYPSCMVEDSDDVDFANEPDTAKTVSTDNIIFLWGFREKSAKELKSYLPGLHQVFSEDFEVKLLDRTCSALIFRNSDTAMQLLEEISLESSSLNSFFSEGLKAAGFEVYRKACRLGLWDSDLAEALEGVSSEIAASTLSECNSSPIYWNSSLMLDLKEYLEC

SEQ ID NO: 85287 - protein, 75 aa, Setaria italica
  Transcript Sequence Number=SeqID_19313
  Homolog annotation: Hit_ID=Q6Z535; Match level="QueryCoverage=80%, HitCoverage=20%, E-value=1e-10, Identity=63%"; Hit description =Putative typical P-type R2R3 Myb protein
LKLRLRYVRTDETTAAHTPECSTETSKMASSGAAGAGAGPAFSMLESWLLDDGMGHSEVELMADVVPLGDPSEFF

SEQ ID NO: 85288 - protein, 82 aa, Setaria italica
  Transcript Sequence Number=SeqID_19314
RRCSTMVRSLGGHMCNMEEGCYEVIFFFICHGLGLSRNPEGRGSRQCEREEVAAKAWRIQWRQRDMRSDWIPSFKDGPNIGS

SEQ ID NO: 85289 - protein, 390 aa, Setaria italica
  Transcript Sequence Number=SeqID_19315
  Gene Ontology: Mol. function=metalloexopeptidase activity; Cellular component=cytoplasm; Biological process=cellular process
  Homolog annotation: Hit_ID=B6TDI9; Match level="QueryCoverage=99%, HitCoverage=99%, E-value=0.0, Identity=93%"; Hit description =Methionine aminopeptidase
  Pfam annotation: Domain name=Peptidase_M24; Domain location=140-376; Score=304.8; E_value=1.9e-88; Accession=PF00557.16; Description =metallopeptidase family M24
  Pfam annotation: Domain name=zf-MYND; Domain location=12-55; Score= -0.6; E_value=0.062; Accession=PF01753.10; Description=MYND finger
  Pfam module annotation: Pfam domain module=Peptidase_M24::zf-MYND; Domain location=140-376::12-55
MEKGASESSLSCARCGKPALLQCPKCAELKLPRDGAAFCTQDCFKAAWSSHKSVHPKPNAPASQQPPEGWKYCLKKGRSRSLQLPRFEWTGPLRPYPISKTRVVPDEIEKPDWALDGIPKIEPDSDLQKRVEIKTPEQIERMRETCRIAREVLDAAARVIKPGITTDEIDRVVHEETIARGGYPSPLNYHFFPKSCCTSVNEVICHGIPDARKLEDGDIVNVDVTVYYKGVHGDLNETYFVGNVDEASKQLVRCTYECLEKAIAIVKPGVRFREVGEIINRHASMSGLSVVKSYCGHGIGELFHCAPNIPHYSRNKAVGIMKAGQTFTIEPMINAGVWNDRLWPDDWTAVTADGKRSAQFEHTLLVTETGCEVLTARLPSSPDVFPWLKP

SEQ ID NO: 85290 - protein, 84 aa, Setaria italica
  Transcript Sequence Number=SeqID_19316
  Subcellular localization annotation: CTP_CleavageSite=39; ConfidenceScore=5.50e-01
LEPCMARPSSTAAASVCLGVALVALLFPASSLSLRTTVGAADVSSELANEARGRGSTGVRRLGGPEGRCHYPAAASDPGRSYPR

SEQ ID NO: 85291 - protein, 77 aa, Setaria italica
  Transcript Sequence Number=SeqID_19317
MPARLAAEIAALPEPRGPMRRLCGDLARRIRLLAPLLQQDQLQDALPLADALGAARDLLRAVHDGSKIYQAMRGDGM

SEQ ID NO: 85292 - protein, 121 aa, Setaria italica
  Transcript Sequence Number=SeqID_19318
  Gene Ontology: Cellular component=proton-transporting two-sector ATPase complex; Biological process=ATP synthesis coupled proton transport
  Homolog annotation: Hit_ID=B6TC18; Match level="QueryCoverage=100%, HitCoverage=96%, E-value=1e-59, Identity=89%"; Hit description =Hydrogen-transporting ATP synthase, rotational mechanism
  Pfam annotation: Domain name=ATP-synt_G; Domain location=11-121; Score=175.9; E_value=1.2e-49; Accession=PF04718.7; Description =Mitochondrial ATP synthase g subunit
GSKLAQLQSKACEATRFAAKHGCAYHKTLMEKNKHYVVDPPTIQKCQELSKQLFYTRLASLPARYESFWKELDSAKLLWKNRSSLKVEDAGVAALFGIELYAWSCLGEIVGRGFTLTGYHV

SEQ ID NO: 85293 - protein, 122 aa, Setaria italica
  Transcript Sequence Number=SeqID_19319
  Gene Ontology: Cellular component=proton-transporting two-sector ATPase complex; Biological process=ATP synthesis coupled proton transport
  Homolog annotation: Hit_ID=B4FJB5; Match level="QueryCoverage=84%, HitCoverage=84%, E-value=3e-51, Identity=93%"; Hit description =Hydrogen-transporting ATP synthase, rotational mechanism
  Pfam annotation: Domain name=ATP-synt_G; Domain location=12-122; Score=187.8; E_value=2.9e-53; Accession=PF04718.7; Description =Mitochondrial ATP synthase g subunit
MAARLAQLRAQAARAAELASKHGGSYYKELMEKNKQYVVQPPTVEKCQELSKQLFYTRLASLPGRYEAFWKELDGVKQVWKNRKDLKVEDLGIATLFGVELYAWFCVGEIVGRGFTITGYKV

SEQ ID NO: 85294 - protein, 177 aa, Setaria italica
  misc_feature (30)..(30): Xaa can be any naturally occurring amino acid
  Transcript Sequence Number=SeqID_19320
  Gene Ontology: Mol. function=phosphotransferase activity, alcohol group as acceptor; Cellular component=chromosome
  Homolog annotation: Hit_ID=Q9M3G7; Match level="QueryCoverage=98%, HitCoverage=4%, E-value=2e-42, Identity=48%"; Hit description =Serine/threonine-protein kinase ATM
KFSNQASSKDESFRCTLTLHVLLENPPGDXPDIMREEVINGFCAIFSHIREEEGKLTRKLMECINTFLLKDGPNLGYKSVEIHHVVQEFIFHCWPATLDQALKSLFITYAKVQLKLARAIPEILEKLVDIIIKELDKNVNTGPGFLWCEAPRDEKAGSLRCFQEECMDLSATVFLSG

SEQ ID NO: 85295 - protein, 124 aa, Setaria italica
  Transcript Sequence Number=SeqID_19321
  Subcellular localization annotation: CTP_CleavageSite=37; ConfidenceScore=5.65e-01
AVSSSHFPPTAKLSPVSSPPSQLKNLSARRPRLRSPRADHQSHHVPLPLSLLLEASVGGFLQAPRGSSLARRASPGGPSRALRAWASRSGDRTGEVFRSPAREVLKRRTPQNSSVLEFGGIPGH

SEQ ID NO: 85296 - protein, 215 aa, Setaria italica
  Transcript Sequence Number=SeqID_19322
TSLVDLADEQEESQPSPETNRGHRASLSSSDSTFGDPYDGKTTGMKGAVGSSTSLQSSLVESAKRHANGTKVHQPIENLAQSPGGCQDLEGTSQGPKKAINIAAEKIHVVITSNQHGDLQIPPKLESSTSSVDANGSKLEYIMEQNTSERKPFIPNGEELNQGSVLCSSCLLSTSQGTKPSEIYTTTKHVNNCNTTGTLPLGGILELQLFVFLFV

SEQ ID NO: 85297 - protein, 173 aa, Setaria italica
  misc_feature (151)..(151): Xaa can be any naturally occurring amino acid
  misc_feature (173)..(173): Xaa can be any naturally occurring amino acid
  Transcript Sequence Number=SeqID_19323
  Gene Ontology: Mol. function=phosphopantetheine binding; Biological process=metabolic process
  Homolog annotation: Hit_ID=B9SDD9; Match level="QueryCoverage=94%, HitCoverage=14%, E-value=8e-48, Identity=56%"; Hit description=AMP dependent ligase, putative
  Pfam annotation: Domain name=PQQ; Domain location=48-85; Score=17.3; E_value=0.064; Accession=PF01011.13; Description=PQQ enzyme repeat
  Pfam annotation: Domain name=PQQ; Domain location=6-42; Score=6.2; E _value=2.5; Accession=PF01011.13; Description=PQQ enzyme repeat
  Pfam module annotation: Pfam domain module=PQQ::PQQ; Domain location =48-85::6-42
LLHLQHAVICCLVNGLVIALNSQGTVIWKAAVGGPIFAGACLSPTLPYQVLIPYRDGSLYSFDIASGALLWVYNVGDPITASAFVDELLTSESFGPSERFACVCTSSGKVHVIRIRADAKQEQAGRGVKYEQLVQGLASIDLPGDIFSSPXMIGGRIFVGCRDDRLHCLTVTX

SEQ ID NO: 85298 - protein, 63 aa, Setaria italica
  Transcript Sequence Number=SeqID_19324
SPHDISCNPACLSSPGLCSQLAMILALFLVLFETPSGFEISSMLEEDLKGPDALQVLALTFPP

SEQ ID NO: 85299 - protein, 82 aa, Setaria italica
  Transcript Sequence Number=SeqID_19325
  Gene Ontology: Mol. function=2-amino-4-hydroxy-6-hydroxymethyldihydrop teridine diphosphokinase activity; Cellular component=mitochondrion; Biological process=folic acid and derivative biosynthetic process
  Homolog annotation: Hit_ID=A4UIY8; Match level="QueryCoverage=74%, HitCoverage=11%, E-value=2e-15, Identity=67%"; Hit description =HPPK/DHPS
KELPWRAAPSTFIFRASRHAIPFKARSFTKCSLERCSADQEIVIAMGSNVGDRVSTFDRALQLMKNSGVSITRHANLYETAP

SEQ ID NO: 85300 - protein, 321 aa, Setaria italica
  Transcript Sequence Number=SeqID_19326
  Gene Ontology: Mol. function=2-amino-4-hydroxy-6-hydroxymethyldihydrop teridine diphosphokinase activity; Cellular component=mitochondrion; Biological process=folic acid and derivative biosynthetic process
  Homolog annotation: Hit_ID=A4UIY8; Match level="QueryCoverage=99%, HitCoverage=60%, E-value=1e-131, Identity=72%"; Hit description =HPPK/DHPS
  Pfam annotation: Domain name=HPPK; Domain location=71-197; Score =212.9; E_value=8.2e-61; Accession=PF01288.12; Description=7,8 -dihydro-6-hydroxymethylpterin-pyrophosphokinase (HPPK)
  Subcellular localization annotation: CTP_CleavageSite=71; ConfidenceScore=5.09e-01
MLLHAKESLKKMYPVAKNYLGGLLPAHSFSVSDLVYPSRSSNRASRHAIPFKARLFTKCSLERCSADQEIVIAMGSNVGDRVSTFDRALQLMKNSGVSITRHANLYETAPAYVTDQPRFLNSAIRGTTRLSAHELLKRLKEIEKDIGRTSGIRYGPRPIDLDILLYGNYEINSETLIVPHERIHERPFVLAPLVDLLGASGDDGIETSWHSLSKCSGGFFKLWNKLGGESIIGTDCIKRVLPVGNRLWDWYERTLVMGVLNLTPDSFSDGGKFQQVKAAISQAKLLISEGADIIDIGAQSTRPFAKRLSPNEELERLVPVL

SEQ ID NO: 85301 - protein, 768 aa, Setaria italica
  Transcript Sequence Number=SeqID_19327
  Gene Ontology: Mol. function=nucleoside-triphosphatase activity; Cellular component=cytoskeleton; Biological process=protein transport
  Homolog annotation: Hit_ID=B9S9N8; Match level="QueryCoverage=84%, HitCoverage=78%, E-value=0.0, Identity=63%"; Hit description=Protein cdcH, putative
  Pfam annotation: Domain name=AAA; Domain location=225-426; Score =268.9; E_value=1.2e-77; Accession=PF00004.21; Description=ATPase family associated with various cellular activities (AAA)
  Pfam annotation: Domain name=AAA; Domain location=529-715; Score =290.1; E_value=4.8e-84; Accession=PF00004.21; Description=ATPase family associated with various cellular activities (AAA)
  Pfam annotation: Domain name=AAA_2; Domain location=221-399; Score= -45.2; E_value=0.035; Accession=PF07724.6; Description=ATPase family associated with various
  Pfam annotation: Domain name=AAA_5; Domain location=225-372; Score =1.6; E_value=0.0007; Accession=PF07728.6; Description=ATPase family associated with various
  Pfam annotation: Domain name=AAA_5; Domain location=529-660; Score =7.0; E_value=0.00025; Accession=PF07728.6; Description=ATPase family associated with various
  Pfam module annotation: Pfam domain module=AAA::AAA::AAA_2::AAA _5::AAA_5; Domain location=225-426::529-715::221-399::225-372::529-660
PRPGGAGNFEKRIRRRILNGGLAGAGASAEDVASTLRVHYPELRRQKPDPFTALVRRVLSSIPSPSSPSGSDGGDYDDAEDSSASRHRHRHRHRHDAHASTSSSTSVSDEVAHPPPAPAYDVTKSVIRSNYAAQTAKRNPASNQQLEIEETAEKARRLITSDGGAGGDAKPEAMASEGIVRGDKGPRFADLGGMEAVIEELMMEVVVPLCHPELPQRLGVRPVAGLLLHGPPGCGKTTLAHAIANETGVPFYKISAPEVVSGVSGASEENIRGLFQKAYRTAPSIVFIDEIDAIASKRENLQREMERRIVTQLMTCMDQFHQNIGPGGGDLDAESSEKKPGYVIVIGATNRPDAVDQALRRPGRFDREISLGVPDENARKQILKMLIQNLRLEGNFDLFKIARATPGFVGADLKALVDKAGNLAMKRIIDKRRAQYYHEHNGNSKHDWWRQPWDAGEVEGLHITMYDFEEATKMVQPSLRREGFSSVPDVTWDDVGGLNSLRKEFDRCIIRCIKHPEDYEVFGVNMQAGFLLFGPPGCGKTLIAKAVAHEAGANFIHIKGPELLNKYVGESESEVRKIFTRARTNSPCILFFDEVDALTTKRGKEGGWVVERLLNQLLIELDGADQRQGVYVIGATNRIDVIDDAVLRPGRFGKKHYVPLPGADERVSILKAHARSKPISSDVDLEALARREECNNLTGADLASLVNEAAMAALEERLDFVEHGTSSMSSSCLIELSHFERALSKVKPSVSEQLIKYYEALSKRYSSN

SEQ ID NO: 85302 - protein, 120 aa, Setaria italica
  Transcript Sequence Number=SeqID_19328
  Gene Ontology: Mol. function=nucleotide binding; Biological process =defense response
  Homolog annotation: Hit_ID=B9V0H5; Match level="QueryCoverage=92%, HitCoverage=8%, E-value=2e-15, Identity=39%"; Hit description=NBS -LRR disease resistance protein family-3
MVEHADASVDKSVLEKLVPPRNLRHLGLDGYMSVDFSRWMLDLPSYPPHLTTIVLLNLKGCSHLPPLGRLPNLRALCLASMPNLKREFYGDHGSCWKLRMILLEGMDNLAGWWTTRTSNE

SEQ ID NO: 85303 - protein, 108 aa, Setaria italica
  Transcript Sequence Number=SeqID_19329
KWLKILERKTQEINKEAEELNKKLALVPSRQRLHVPRTVQLYEAHCVEASNLHVNLRLVLEALENFAANSLQALQEVSKCGEGARLPRENVRREQRSSNRSSNYKSSS

SEQ ID NO: 85304 - protein, 219 aa, Setaria italica
  Transcript Sequence Number=SeqID_19330
  Homolog annotation: Hit_ID=O64555; Match level="QueryCoverage=94%, HitCoverage=36%, E-value=9e-63, Identity=54%"; Hit description =YUP8H12R.46 protein
  Pfam annotation: Domain name=mTERF; Domain location=2-200; Score =59.6; E_value=1.2e-14; Accession=PF02536.6; Description=mTERF
QFDDLGITKKMVAPVITSSPQLLLRKPNEFLQIVFFFREMGFDKETVGKILCRSPEIFASNVESTLKKKIDFLIDFGVSKHHLPRIIRKYPEILLLDINDTLLPRMNYLLEAGLSKKDVRSMIFRFSPLLGYSIELVMKPKLEFLLRIMKKPLKAVVEYPRYFSYSLEGRIKPRFWVLQSRNIDCSLTDMLAKNDELFAEEYLGTGGLLQKPLQSSKVS

SEQ ID NO: 85305 - protein, 62 aa, Setaria italica
  Transcript Sequence Number=SeqID_19331
VLDTCNFNFNVYRMNYLLEAGLSKKDVRSMIFRFSPLLGYSIELVMKPKLEFLLRIMKSHFK

SEQ ID NO: 85306 - protein, 39 aa, Setaria italica
  Transcript Sequence Number=SeqID_19332
RKKLMQQRIVVYELVSWSNEFYFILLIQPSSPRDSVVTG

SEQ ID NO: 85307 - protein, 193 aa, Setaria italica
  Transcript Sequence Number=SeqID_19333
  Gene Ontology: Mol. function=nucleic acid binding
  Homolog annotation: Hit_ID=B6SH26; Match level="QueryCoverage=89%, HitCoverage=77%, E-value=2e-73, Identity=80%"; Hit description =Nucleic acid binding protein
PYLLPSPSSSPRDPAAWSRRCKPMDAEDCEPYTDVFFIKFSQVSNARFAKRKLDESVFLGNRLQVTYAPHFESLLDTKEKLEVRRKEVLGRIKSSAGRPEGTSQYSLAQGSSSGNHHQMNFNKREYLKTNHASHIEDPRFSHVPSNKDYFPSESMNATVKLVREKLDKIQSGDDNSNAAAASKKPRVDNRRRI

SEQ ID NO: 85308 - protein, 133 aa, Setaria italica
  misc_feature (9)..(9): Xaa can be any naturally occurring amino acid
  Transcript Sequence Number=SeqID_19334
  Gene Ontology: Mol. function=nucleoside-triphosphatase activity; Cellular component=integral to membrane; Biological process=transport
  Homolog annotation: Hit_ID=B8XSN5; Match level="QueryCoverage=100%, HitCoverage=9%, E-value=5e-54, Identity=71%"; Hit description=PDR -like ABC transporter
  Pfam annotation: Domain name=ABC2_membrane; Domain location=1-133; Score=-26.5; E_value=0.053; Accession=PF01061.16; Description=ABC-2 type transporter
KQNIIYWRXPQYNLNRMVMTVMLALIFGALFWRRAKILNNEQDLFNVLGAMYMGVIQLGVYNEHSIISFSTTERIVMYREKFAGMYSSWAYSLAQAAIEIPYVFIQAILYTFITYPTIGYYWTAYKLLWFFYT

SEQ ID NO: 85309 - protein, 199 aa, Setaria italica
  Transcript Sequence Number=SeqID_19335
  Gene Ontology: Mol. function=nucleoside-triphosphatase activity; Cellular component=integral to membrane; Biological process=transport
  Homolog annotation: Hit_ID=B8XSN5; Match level="QueryCoverage=100%, HitCoverage=14%, E-value=1e-79, Identity=68%"; Hit description=PDR -like ABC transporter
TIHQPSTDIFEAFDELILMKNGGKIIYNGPIGKQSCKVIEYFEKISGVPKVERNRNPATWMMDITSPSMEVQFNIDFASTYQESPLHRDRQELVKQLSSPLQNSDGLYFTYRFPQNGWGQFKACLWKQNIIYWRSPQYNLNRMVMTVMLALIFGALFWRRAKILNNEQDLFNVLGAMYMGVIQLGVYNEQLRINNTITK

SEQ ID NO: 85310 - protein, 102 aa, Setaria italica
  Transcript Sequence Number=SeqID_19336
  Gene Ontology: Cellular component=integral to membrane
  Homolog annotation: Hit_ID=B6SZU6; Match level="QueryCoverage=97%, HitCoverage=61%, E-value=4e-42, Identity=85%"; Hit description =UPF0497 membrane protein 6
  Pfam annotation: Domain name=DUF588; Domain location=1-82; Score= -1.8; E_value=0.00028; Accession=PF04535.4; Description=Domain of unknown function (DUF588)
ASAYSLLVLLVRPGSTVSRLVLLTDVIVGMLLTGAVAATGAISDVGKNGNAHAGWLPICAQVQAYCGHVAGALISGFVSLVVYFLIIMYSLHAVAEPMCSCH

SEQ ID NO: 85311 - protein, 49 aa, Setaria italica
  Transcript Sequence Number=SeqID_19337
LNYGWLGRISGGWVNHTAHKPSTTYWYGEKKGFRISFLRVTAKNSFNPR

SEQ ID NO: 85312 - protein, 116 aa, Setaria italica
  Transcript Sequence Number=SeqID_19338
  Gene Ontology: Mol. function=protein serine/threonine kinase activity; Biological process=protein amino acid phosphorylation
  Homolog annotation: Hit_ID=Q00RM8; Match level="QueryCoverage=100%, HitCoverage=12%, E-value=4e-22, Identity=51%"; Hit description =H0814G11.12 protein
GSDDNVALSVCRNAVFVTLATQEGILSYDDIVTCFFGVQGITTFPGPSSVTSTPASSPNVTVDSPPAPKIKSLPQKRQQHYRITVIPGIGIGVILLAVLLQIVLVVLIRRKSRELK

SEQ ID NO: 85313 - protein, 477 aa, Setaria italica
  Transcript Sequence Number=SeqID_19339
  Pfam annotation: Domain name=DUF1618; Domain location=248-381; Score =8.7; E_value=4.6e-06; Accession=PF07762.6; Description=Protein of unknown function (DUF1618)
MDPNPRSPSFLWAPARPSWLILDRFMHRTDRDVEDEADGTESEISYTCTDRPIRASIRVADSPAVSRLYLDWPSRPEFEGRLREACVIAADNHSILFRAIVPLEDPMTCKDTASFPIDMFVYSAFSSPPSLHRLRTCFIGGVSTPDVDIYYKPYQRLQQRIMAEDQIGLLCHGSEGGFTVVDFTNLDPEGELCLLHHPALPAPASHKNTEEEEADWMIKKVRVPPGPNFRRWITDAIIPLHGRFLCLVDNYQGILVVDVLRASVKSTTNQLLHYIPLPDEALQSDRRPHPDGDCPDRARCVCVTADFTLKLVCVTTRKANRARSPFTIRSWTLPNFYRSGQWYRGHTMEAAEFWGLYNGQSLPRVKPWYPLVSLVNPNEFCFLLKEDHTTYWIIEVDMGNKMLKLSAIYINEEEEGCTTDGPRARRIIFDGHSFIPSGLSDYLGMDAIKSRELSEMMQKAKQRRVAQKKSQLEVEQA

SEQ ID NO: 85314 - protein, 83 aa, Setaria italica
  Transcript Sequence Number=SeqID_19340
  Subcellular localization annotation: CTP_CleavageSite=39; ConfidenceScore=5.35e-01
ILDGSASSPRPAPPPLLNRIAALPRLHQIEVLFRYFHRSCSSFSPSRRRLGAVAVLSAPPGPAWSRGTQPVHALIPSLSKKID

SEQ ID NO: 85315 - protein, 77 aa, Setaria italica
  misc_feature (1)..(11): Xaa can be any naturally occurring amino acid
  Transcript Sequence Number=SeqID_19341
XXXXXXXXXXXSICVFAKIQQHLRNCCLNINEFKHEDGYEYSSQTSSTTVTTEDKAPEQQGHDDDQMVLLHCHKNKI

SEQ ID NO: 85316 - protein, 89 aa, Setaria italica
  Transcript Sequence Number=SeqID_19342
MAAGSSSMASEDDYETEQKKQAAADVLFHYSQFVMVCIGEDVRPTDLRLHLMKEVSGMPTSLKEPQQAAASPDSSGEPSSSGTMKTEIS

SEQ ID NO: 85317 - protein, 83 aa, Setaria italica
  Transcript Sequence Number=SeqID_19343
ALKVASRSIILSRKIRRNQKFLYRICGSDGVSLIGSLDMRSVPWLSGELFVALLSSLACDIAQLLWSFCSLSLGWNGLDGREV

SEQ ID NO: 85318 - protein, 50 aa, Setaria italica
  misc_feature (26)..(26): Xaa can be any naturally occurring amino acid
  Transcript Sequence Number=SeqID_19344
  Gene Ontology: Mol. function=acyltransferase activity
MPSGMEGILNSGSVKVIIHRPIQGKXAETLCSEARNVIADTLLLHGYGVH

SEQ ID NO: 85319 - protein, 91 aa, Setaria italica
  Transcript Sequence Number=SeqID_19345
  Subcellular localization annotation: CTP_CleavageSite=55; ConfidenceScore=5.15e-01
LWPCAGGHWGGLHSGAVPLRQLATPPLPPALAYPSSGLWSGVEQITASRQPQAVRARDRADRVLARAYFEVGVFTIYSLVRSLLLARSSFS

SEQ ID NO: 85320 - protein, 847 aa, Setaria italica
  Transcript Sequence Number=SeqID_19346
  Gene Ontology: Mol. function=protein serine/threonine kinase activity; Cellular component=integral to membrane; Biological process=protein amino acid phosphorylation
  Homolog annotation: Hit_ID=Q53MD2; Match level="QueryCoverage=98%, HitCoverage=89%, E-value=0.0, Identity=45%"; Hit description=Leucine Rich Repeat family protein, expressed
  Pfam annotation: Domain name=LRR_1; Domain location=1-22; Score=15.2; E_value=0.27; Accession=PF00560.25; Description=Leucine Rich Repeat
  Pfam annotation: Domain name=LRR_1; Domain location=121-143; Score =10.5; E_value=3; Accession=PF00560.25; Description=Leucine Rich Repeat
  Pfam annotation: Domain name=LRR_1; Domain location=145-167; Score =10.0; E_value=3.7; Accession=PF00560.25; Description=Leucine Rich Repeat
  Pfam annotation: Domain name=LRR_1; Domain location=169-191; Score =11.2; E_value=2.1; Accession=PF00560.25; Description=Leucine Rich Repeat
  Pfam annotation: Domain name=LRR_1; Domain location=217-240; Score =4.7; E_value=38; Accession=PF00560.25; Description=Leucine Rich Repeat
  Pfam annotation: Domain name=LRR_1; Domain location=24-46; Score =11.3; E_value=2.1; Accession=PF00560.25; Description=Leucine Rich Repeat
  Pfam annotation: Domain name=LRR_1; Domain location=265-287; Score =13.4; E_value=0.83; Accession=PF00560.25; Description=Leucine Rich Repeat
  Pfam annotation: Domain name=LRR_1; Domain location=289-311; Score =2.7; E_value=94; Accession=PF00560.25; Description=Leucine Rich Repeat
  Pfam annotation: Domain name=LRR_1; Domain location=313-335; Score =10.7; E_value=2.7; Accession=PF00560.25; Description=Leucine Rich Repeat
  Pfam annotation: Domain name=LRR_1; Domain location=337-359; Score =14.5; E_value=0.43; Accession=PF00560.25; Description=Leucine Rich Repeat
  Pfam annotation: Domain name=LRR_1; Domain location=361-383; Score =14.4; E_value=0.48; Accession=PF00560.25; Description=Leucine Rich Repeat
  Pfam annotation: Domain name=LRR_1; Domain location=385-407; Score =7.3; E_value=12; Accession=PF00560.25; Description=Leucine Rich Repeat
  Pfam annotation: Domain name=LRR_1; Domain location=409-431; Score =16.2; E_value=0.14; Accession=PF00560.25; Description=Leucine Rich Repeat
  Pfam annotation: Domain name=LRR_1; Domain location=432-454; Score =9.3; E_value=5; Accession=PF00560.25; Description=Leucine Rich Repeat
  Pfam annotation: Domain name=LRR_1; Domain location=48-71; Score=6.4; E_value=18; Accession=PF00560.25; Description=Leucine Rich Repeat
  Pfam annotation: Domain name=LRR_1; Domain location=73-95; Score =10.2; E_value=3.4; Accession=PF00560.25; Description=Leucine Rich Repeat
  Pfam annotation: Domain name=LRR_1; Domain location=97-119; Score =9.0; E_value=5.7; Accession=PF00560.25; Description=Leucine Rich Repeat
  Pfam annotation: Domain name=Pkinase; Domain location=563-829; Score =142.9; E_value=1e-39; Accession=PF00069.17; Description=Protein kinase domain
  Pfam annotation: Domain name=Pkinase_Tyr; Domain location=563-829; Score=76.7; E_value=8.5e-20; Accession=PF07714.9; Description =Protein tyrosine kinase
  Pfam module annotation: Pfam domain module=LRR_1::LRR_1::LRR_1::LRR _1::LRR_1::LRR_1::LRR_1::LRR_1::LRR_1::LRR_1::LRR_1::LRR_1::LRR _1::LRR_1::LRR_1::LRR_1::LRR_1::Pkinase::Pkinase_Tyr; Domain location= 1-22::121-143::...
  Pfam module annotation: Domain location=145-167::169-191::217-240::24- 46::265-287::289-311::313-335::337-359::361-383::385-407::409 -431::432-454::48-71::73-95::97-119::563-829::563-829
  Subcellular localization annotation: CTP_CleavageSite=42; ConfidenceScore=5.17e-01
NLQVLNLSMNSLTGQLPDLSALLNLQVLDVSTNSFNGAFPVWVSKLSGLTELGLGENSFDEGNVPESIGDLKNLTWLFLGQCNLRGEIPASVFDLASLGTLDFSRNQITGVFPKAISKMRNLWKIELYQNNLTGEIPQELATLTLLSEFDVSRNQLTGMLPKEIGGLKKLRIFHIYHNNFFGELPEGLGNLQFLESFSTYENQFSGKFPANLGRFSPLNTIDISENYFSGEFPRFLCQNNKLQFLLALTNNFSGEFPGSYSSCKTLQRFRISQNQFSGSIPPGLWGLPNAVIIDVADNGFIGDISSDIGLSVTLNQLYVQNNNFIGELPVELGRLSQLQKLVASNNRFSGQIPKQIGNLKQLTYLHLEHNVLEGPIPPDIGMCSSMVDLNLAENSLTGGIPNTLVSLVTLNSLNISHNMISGNIPEGLQSLKLSDIDFSHNELSGPVPPQFLMIAGDDAFSENVGLCVADTSEEWRQSVTNLRPCQWSDNRHNFLTRRLFLVLVTVTSLVVLLSGLACLSYENYKLEEFNRKGDIESGGSTDLKWVLETFHPPELNPEEICSLDGENLIGCGGTGKVYRLELNKGRGTVAVKELWKGDDAKVLKSEINTLGKIRHRNILKLNAFLTGGASSFLVYEYVVNGNLYDAIRREFKAGQPELDWDKRCRIAVGVAKGIMYLHHDCSPAIIHRDIKSTNILLDEEYEAKLADFGIAKLVEGSPLSCFAGTHGYMAPELAYSLKATEKSDVYSFGIVLLELLTGRSPTDQQFDGEMDIVSWVSSHLTEQNPAAVVDPKVSNGASDYMIKALNIAILCTAQLPSERPTMREVVNMLIDNDPSCTTGRAKNKNDK

SEQ ID NO: 85321 - protein, 88 aa, Setaria italica
  Transcript Sequence Number=SeqID_19347
  Gene Ontology: Mol. function=hydrogen ion transporting ATP synthase activity, rotational mechanism; Cellular component=proton -transporting two-sector ATPase complex; Biological process=ATP metabolic process
  Homolog annotation: Hit_ID=B8Y6I1; Match level="QueryCoverage=97%, HitCoverage=66%, E-value=4e-37, Identity=87%"; Hit description =Vacuolar ATPase F subunit
  Pfam annotation: Domain name=ATP-synt_F; Domain location=3-73; Score =74.1; E_value=5e-19; Accession=PF01990.9; Description=ATP synthase (F14-kDa) subunit
MSLYATETTVKQIEDAFKEFTAREDIAIVLISQYVANMIRFLVDGYNKPVPAILEIPSKDHPYDPAHDSVLSRVKYLFSAESVASDRR

SEQ ID NO: 85322 - protein, 55 aa, Setaria italica
  Transcript Sequence Number=SeqID_19348
AFALCIFLQQLKCVGHFLNCLICVCQVANMIRFLVDGYNKPVPAILEIPSKDHPY

SEQ ID NO: 85323 - protein, 130 aa, Setaria italica
  Transcript Sequence Number=SeqID_19349
  Gene Ontology: Mol. function=hydrogen ion transporting ATP synthase activity, rotational mechanism; Cellular component=proton -transporting two-sector ATPase complex; Biological process=ATP metabolic process
  Homolog annotation: Hit_ID=A7LIT9; Match level="QueryCoverage=99%, HitCoverage=99%, E-value=4e-61, Identity=88%"; Hit description =Vacuolar proton pump subunit F
  Pfam annotation: Domain name=ATP-synt_F; Domain location=15-115; Score=182.5; E_value=1.2e-51; Accession=PF01990.9; Description=ATP synthase (F14-kDa) subunit
MAGRANIPTNSSALIAIIADEDTVTGFLLAGVGNVDLRKKTNYLIVDNKTTVKQIEDAFKEFTAREDIAIVLISQYVANMIRFLVDGYNKPVPAILEIPSKDHPYDPAHDSVLSRVKYLFSAESVASDRR

SEQ ID NO: 85324 - protein, 205 aa, Setaria italica
  Transcript Sequence Number=SeqID_19350
  Gene Ontology: Mol. function=oxidoreductase activity; Biological process=metabolic process
  Homolog annotation: Hit_ID=Q6ZHK4; Match level="QueryCoverage=95%, HitCoverage=44%, E-value=5e-84, Identity=78%"; Hit description =Putative monooxygenase 2
LGSQGEALRAGGTSLTLFKNGWRVLDAVGVADELRAKYLRIQGMRMRSPAAGGRDLREFSFEEEAPGQEVRAVERRVLLETLASKLPPGTISFSSKLKSIAEQGPDGTLLELEDGRQILSKIVIGCDGVNSPIARWMGFSEPRYVGHMAFRGLAEYADGQPFEPKVNYIYGRGVRAGFVPVSPTKVYWFICFNRQDPGIFTPQML

SEQ ID NO: 85325 - protein, 100 aa, Setaria italica
  Transcript Sequence Number=SeqID_19351
  Gene Ontology: Mol. function=structural constituent of ribosome; Cellular component=ribonucleoprotein complex; Biological process =translation
  Homolog annotation: Hit_ID=Q9SWI6; Match level="QueryCoverage=99%, HitCoverage=61%, E-value=2e-44, Identity=92%"; Hit description=50S ribosomal protein L29, chloroplastic
  Pfam annotation: Domain name=Ribosomal_L29; Domain location=7-64; Score=85.0; E_value=2.6e-22; Accession=PF00831.15; Description =Ribosomal L29 protein
AKREQELEEIRGMTTEQLEEEVVDLKGELFLLRLKRSARQEFKNSEFCRMRKRIARMLTVKREREIEQGINKRLSRKLDRQWKKSIVVRPPPSLREKKEE

SEQ ID NO: 85326 - protein, 491 aa, Setaria italica
  Transcript Sequence Number=SeqID_19352
  Gene Ontology: Mol. function=protein binding; Cellular component =nucleus; Biological process=ubiquitin-dependent protein catabolic process
  Homolog annotation: Hit_ID=B9S3W2; Match level="QueryCoverage=98%, HitCoverage=81%, E-value=0.0, Identity=65%"; Hit description =TRANSPORT INHIBITOR RESPONSE 1 protein, putative
  Pfam annotation: Domain name=LRR_1; Domain location=124-146; Score =4.7; E_value=38; Accession=PF00560.25; Description=Leucine Rich Repeat
  Pfam annotation: Domain name=LRR_1; Domain location=394-414; Score =6.4; E_value=18; Accession=PF00560.25; Description=Leucine Rich Repeat
  Pfam annotation: Domain name=LRR_1; Domain location=419-435; Score =1.1; E_value=1.8e+02; Accession=PF00560.25; Description=Leucine Rich Repeat
  Pfam annotation: Domain name=LRR_1; Domain location=69-91; Score =11.6; E_value=1.8; Accession=PF00560.25; Description=Leucine Rich Repeat
  Pfam module annotation: Pfam domain module=LRR_1::LRR_1::LRR_1::LRR _1; Domain location=124-146::394-414::419-435::69-91
TDRLDAPWVAAAADGWPLLEELSFKRMVVTDDCLEMIAASFRNFQVLRLVSCEGFSTAGLAAIAAGCRNLRELDLQENEIEDCSIHWLSLFPESFTSLVTLNFSCLEGDVNITVLERLVTRCRNLKTLKLNNSIPLDKLASLLRKAPQIVELGTGRFSADYHLDLFSKLEAAFAGCKNLRRLSGAWDAVPEYLPAFYCVCEGLTSLNLSYATVRGPELIKFVSRCKNLQLLWVMDLIEDHGLAAVASSCNKLQELRVFPSSPFDAAEQVSLTERGLVDVSAGCPMLESVLYFCRRMTNEALITIAKNRPNFTCFRLCIIEPHTPDYITHQPLDAGFSAIVESCKGLRRLSVSGLLTDRVFKSIGAHADRLEMLSIAFAGNSDLGLHYILSGCKSLKKLEIRDCPFGDKPLLANAAKLETMRSLWMSSCSLTLGACRQLARKMPRLSVEVMNDPRRACPLDSLTDESPAETMYVYRTIAGPRSDTPTWVQIV

SEQ ID NO: 85327 - protein, 130 aa, Setaria italica
  Transcript Sequence Number=SeqID_19353
  Gene Ontology: Mol. function=kinase activity; Cellular component =chloroplast; Biological process=D-ribose metabolic process
  Homolog annotation: Hit_ID=B6SSY8; Match level="QueryCoverage=92%, HitCoverage=23%, E-value=1e-62, Identity=95%"; Hit description =Protein kinase
LVCCFGAPRWEFVPTVRVSDRQMHPDQYSTWLHLQWEPPEFARAPGSAASNVAIAHTRLGGRAAVLGKVGDDDFGRELVYRMNCERVQTRAIKFDGKAATAMARMKVSFRDREDGKGGTKDLVGPKNGSK

SEQ ID NO: 85328 - protein, 127 aa, Setaria italica
  misc_feature (99)..(99): Xaa can be any naturally occurring amino acid
  misc_feature (111)..(111): Xaa can be any naturally occurring amino acid
  Transcript Sequence Number=SeqID_19354
  Gene Ontology: Mol. function=RNA binding
  Homolog annotation: Hit_ID=B6U1B3; Match level="QueryCoverage=100%, HitCoverage=36%, E-value=4e-35, Identity=51%"; Hit description =Agenet domain containing protein
  Pfam annotation: Domain name=Agenet; Domain location=7-88; Score =22.0; E_value=0.0017; Accession=PF05641.4; Description=Agenet domain
MDIMLPFKVGDRAESRSFSLGFRGAWFRSKISLMCIRQGHLECLLEYLDFPDEKKTWTRLYKVPPGSRKRKSSESRMIMVRPTFPQWYLEHEKPKELPXANVVAIVSSPWXVGDLVEWWYTDCYWTG

SEQ ID NO: 85329 - protein, 127 aa, Setaria italica
  Transcript Sequence Number=SeqID_19355
SSEARNSNLLANTHRFRQIMQYLSFSLNKRYTPKSFNMIVLVKLDQLISKLIDRGHCNRWKTFVKLNYVSAQFSSWYCSIYLIAQLLVHYPCHDGAPSNGPEKSNLNIDNHQCMYQAHGPVPCQLVS

SEQ ID NO: 85330 - protein, 71 aa, Setaria italica
  Transcript Sequence Number=SeqID_19356
  Gene Ontology: Mol. function=transporter activity; Cellular component= integral to membrane; Biological process=transport
  Homolog annotation: Hit_ID=Q9ATM2; Match level="QueryCoverage=80%, HitCoverage=23%, E-value=3e-10, Identity=61%"; Hit description =Aquaporin SIP1-2
MAIGAALRAAAADAVVTFLWVLCVSTLGASTAAVTSYLKLQGVQYALLITVSLVSVLLFVFNILCDALGGA

SEQ ID NO: 85331 - protein, 245 aa, Setaria italica
  Transcript Sequence Number=SeqID_19357
  Gene Ontology: Mol. function=transporter activity; Cellular component= integral to membrane; Biological process=transport
  Homolog annotation: Hit_ID=Q9ATM2; Match level="QueryCoverage=86%, HitCoverage=87%, E-value=1e-88, Identity=77%"; Hit description =Aquaporin SIP1-2
  Pfam annotation: Domain name=MIP; Domain location=3-229; Score=4.0; E_ value=5e-10; Accession=PF00230.12; Description=Major intrinsic protein
CADGDRAALRAAAADAVVTFLWVLCVSTLGASTAAVTSYLKLQGVQYALLITVSLVSVLLFVFNILCDALGGASFNPTGIAAFYAAGVTSPSLFAVALRFPAQAAGAVCGALAISELMPAQYKHMLGGPSLKVDPHTGAVAELVLTFVITMAVLWIIVKGPRNPIVKTLMISISTVCLVLSGAAYTGPSMNPANAFGWAYVNNRHNTWEQFYVYWISPFIGAVLAAWIFKALFLAPPPKPKAKKA

SEQ ID NO: 85332 - protein, 249 aa, Setaria italica
  Transcript Sequence Number=SeqID_19358
  Gene Ontology: Mol. function=binding
  Pfam annotation: Domain name=Sel1; Domain location=129-164; Score =33.3; E_value=9.6e-07; Accession=PF08238.4; Description=Sel1 repeat
  Pfam annotation: Domain name=Sel1; Domain location=57-92; Score=4.9; E_value=4.9; Accession=PF08238.4; Description=Sel1 repeat
  Pfam annotation: Domain name=Sel1; Domain location=93-128; Score =16.3; E_value=0.13; Accession=PF08238.4; Description=Sel1 repeat
  Pfam module annotation: Pfam domain module=Sel1::Sel1::Sel1; Domain location=129-164::57-92::93-128
HDRNKKAMELIAKGWSALQEVDRVIDYADHNDKRLIPLLRGAKENFELALEIDNDNTHARYWLGKMHFKYHVPGACKAVGAALLVEAANMGDPDAQYELGCRLRIENDHVQSDQQAFHYIEQAVDQLHPGALYLLGAVYLTGDCVKRDIASAMWCFHRASEKGHAGAAIAYGSLLLKGAEVPEVITRFNSGKSPSTGKMRKRTAQQDPIKLAKEQFQIAAEAGCDLGLRWLKRLEDFEIQEEKLKQIQQ

SEQ ID NO: 85333 - protein, 224 aa, Setaria italica
  Transcript Sequence Number=SeqID_19359
  Gene Ontology: Mol. function=hydrolase activity, acting on glycosyl bonds; Cellular component=vacuole; Biological process=cell wall organization and biogenesis
  Homolog annotation: Hit_ID=B6TX01; Match level="QueryCoverage=95%, HitCoverage=46%, E-value=1e-115, Identity=92%"; Hit description =Glycoside hydrolase, family 28
  Pfam annotation: Domain name=Glyco_hydro_28; Domain location=2-224; Score=-89.9; E_value=0.00013; Accession=PF00295.9; Description =Glycosyl hydrolases family 28
IRLPLPSYGRGRDEPGPRYSNFIAGSNLTDVIITGKNGTINGQGQVWWDKYHAKELQFTRGYLLELLYSNNIIISNVTFVDSPSWNLHPTYCTNVTISGVTILAPVHSPNTDGIDPDSSSHVKIEDCYIVSGDDCIAVKSGWDEYGIKFNMPSQHIIIRRLTCISPTSAMIALGSEMSGGIRDVRAEDNIAINTESAVRVKSGVGRGGFVKDIFVRGLRPTNNQ

SEQ ID NO: 85334 - protein, 374 aa, Setaria italica
  misc_feature (141)..(141): Xaa can be any naturally occurring amino acid
  misc_feature (237)..(237): Xaa can be any naturally occurring amino acid
  Transcript Sequence Number=SeqID_19360
  Gene Ontology: Mol. function=hydrolase activity, acting on glycosyl bonds; Cellular component=vacuole; Biological process=cell wall organization and biogenesis
  Homolog annotation: Hit_ID=B6TX01; Match level="QueryCoverage=100%, HitCoverage=73%, E-value=1e-175, Identity=80%"; Hit description =Glycoside hydrolase, family 28
  Pfam annotation: Domain name=Glyco_hydro_28; Domain location=3-345; Score=-63.7; E_value=6.2e-06; Accession=PF00295.9; Description =Glycosyl hydrolases family 28
PLPSYGRGRDEPGPRYSNFIAGSNLTDVIITGKNGTINGQGQVWWDKYHAKELQFTRGYLLELLYSNNIIISNVTFVDSPSWNLHPTYCTNVTISGVTILAPVHSPNTDGIDPGISVCNCILFSVALCAYESIICPENVVXSCVVFADSSSHVKIEDCYIVSGDDCIAVKSGWDEYGIKFNMPSQHIIIRRLTCISPTSAMIALGSEMSGGIRDVRAEDNIAINTESAVRVKSGVGXGGFVKDIFVRGLSLHTMKWVFWMTGNYGQHPDNSSDPNAMPEVTGINYSDVFAENVTMAGRMEGIPNDPYTGICISNVTARLAPDAKKLQWNCTDVKGVTYDVTPKPCPELGAEGKPCAFPEEELIIGPHELPKCTY

SEQ ID NO: 85335 - protein, 175 aa, Setaria italica
  misc_feature (26)..(26): Xaa can be any naturally occurring amino acid
  Transcript Sequence Number=SeqID_19361
  Gene Ontology: Mol. function=nucleotide binding; Cellular component =cytosol; Biological process=translational termination
  Homolog annotation: Hit_ID=A4ZCD1; Match level="QueryCoverage=80%, HitCoverage=26%, E-value=3e-69, Identity=87%"; Hit description=GTP -binding protein
  Pfam annotation: Domain name=GTP_EFTU_D2; Domain location=88-155; Score=56.8; E_value=8.3e-14; Accession=PF03144.17; Description =Elongation factor Tu domain 2
VKLSGTFSAGPARRTFLKSSGYNVKXDVQFLPISGLLGSNMKDRMDKSTCSWWDGPCLFEVLDRIEVPLRDPKGPVRMPIIDKYKDMGTVVMGKMESGTIREGDSLLVMPNKSHVKVIGISLDESKVRRAGPAENVRVKLSGIEEEDIMAGFVLSSCWLIPVWLSLFYFVNFLNV

SEQ ID NO: 85336 - protein, 71 aa, Setaria italica
  misc_feature (18)..(18): Xaa can be any naturally occurring amino acid
  misc_feature (39)..(39): Xaa can be any naturally occurring amino acid
  misc_feature (57)..(57): Xaa can be any naturally occurring amino acid
  misc_feature (64)..(64): Xaa can be any naturally occurring amino acid
  misc_feature (71)..(71): Xaa can be any naturally occurring amino acid
  Transcript Sequence Number=SeqID_19362
  Gene Ontology: Mol. function=nucleotide binding; Cellular component =cytoplasm; Biological process=translational termination
  Homolog annotation: Hit_ID=A4ZCD1; Match level="QueryCoverage=97%, HitCoverage=12%, E-value=4e-29, Identity=91%"; Hit description=GTP -binding protein
IVDDRTIQKYEKEAKDKXRESWYMAYIMDTNEEERVKGXTVEVGRAHFETEHTRFTXILDAPGXKSYVPNX

SEQ ID NO: 85337 - protein, 166 aa, Setaria italica
  Transcript Sequence Number=SeqID_19363
  Gene Ontology: Mol. function=nucleotide binding; Cellular component =cytoplasm; Biological process=translational termination
  Homolog annotation: Hit_ID=A4ZCD1; Match level="QueryCoverage=92%, HitCoverage=28%, E-value=2e-51, Identity=66%"; Hit description=GTP -binding protein
  Pfam annotation: Domain name=GTP_EFTU_D3; Domain location=42-159; Score=107.9; E_value=3.4e-29; Accession=PF03143.9; Description =Elongation factor Tu C-terminal domain
GAVTESTKPAIISSSSIRVKLSGIEEEDIMAGFVLSSVGNPVGAVTEFNAQLQILELLDNAIFTAGYKAVLHVHSVVEECEIVELIEEIDMKKKKEADPKKKKPKRKPLFVKNGAVVVCRIQVNNLICVEKFSDFPQLGRFTLRTEGKTVAVGKVVEVPPAGSPTF

SEQ ID NO: 85338 - protein, 536 aa, Setaria italica
  Transcript Sequence Number=SeqID_19364
  Gene Ontology: Mol. function=nucleotide binding; Cellular component =intracellular; Biological process=nuclear-transcribed mRNA catabolic process, nonsense-mediated decay
  Homolog annotation: Hit_ID=A4ZCD1; Match level="QueryCoverage=100%, HitCoverage=99%, E-value=0.0, Identity=74%"; Hit description=GTP -binding protein
  Pfam annotation: Domain name=GTP_EFTU; Domain location=95-318; Score =304.9; E_value=1.7e-88; Accession=PF00009.19; Description=Elongation factor Tu GTP binding domain
  Pfam annotation: Domain name=GTP_EFTU_D2; Domain location=339-406; Score=56.8; E_value=8.3e-14; Accession=PF03144.17; Description =Elongation factor Tu domain 2
  Pfam annotation: Domain name=GTP_EFTU_D3; Domain location=412-529; Score=107.9; E_value=3.4e-29; Accession=PF03143.9; Description =Elongation factor Tu C-terminal domain
  Pfam annotation: Domain name=MMR_HSR1; Domain location=98-246; Score=- 7.8; E_value=0.0053; Accession=PF01926.15; Description=GTPase of unknown function
  Pfam module annotation: Pfam domain module=GTP_EFTU::GTP_EFTU_D2::GTP_ EFTU_D3::MMR_HSR1; Domain location=95-318::339-406::412-529::98-246
MEHDAHTEAPPHAVPPPEDATVDDWAREDAEPMDSGAAPTDVAAADSAADGPPAPASEAEGVKDIQSSLQSLELKANVAAQEDAQDVEDEVEETKRHLNVVFIGHVDAGKSTSGGQILFLSGQVDDRTIQKYEKEAKDKSRESWYMAYIMDTNEEERVKGKTVEVGRAHFETEHTRFTILDAPGHKSYVPNMISGASQADIGVLVISARKGEFETGYEKGGQTREHVLLAKTLGVAKLVVVINKMDDPTVKWSKERYDEIEAKMVPFLKSSGYNVKKDVQFLPISGLLGSNMKDRMDKSTCSWWDGPCLFEVLDRIEVPLRDPKGPVRMPIIDKYKDMGTVVMGKMESGTIREGDSLLVMPNKSHVKVIGISLDESKVRRAGPAENVRVKLSGIEEEDIMAGFVLSSVGNPVGAVTEFNAQLQILELLDNAIFTAGYKAVLHVHSVVEECEIVELIEEIDMKKKKEADPKKKKPKRKPLFVKNGAVVVCRIQVNNLICVEKFSDFPQLGRFTLRTEGKTVAVGKVVEVPPAGSPTF

SEQ ID NO: 85339 - protein, 196 aa, Setaria italica
  Transcript Sequence Number=SeqID_19365
  Gene Ontology: Mol. function=receptor activity; Cellular component =late endosome membrane; Biological process=protein transport
  Homolog annotation: Hit_ID=Q8W338; Match level="QueryCoverage=100%, HitCoverage=21%, E-value=2e-71, Identity=64%"; Hit description=TGF beta receptor associated protein-like protein
MVHSAYDAVELVAGVPGRIEAVASHAGKLLVAASDSEGFLRGSDCSLRIYSAPGSSTEGGGEIRRDGPYALERHEQRFWRRPPLAMEVSASRDLLLSLSEWVALHRLPGLETVAVVSNKTKGANVFAWDDRRGLLAVGRQKRLTVFRLDSGREFVEVKEFGVPDILKSMAWCGDNICLGIRREYMIINSMTGALTE

SEQ ID NO: 85340 - protein, 124 aa, Setaria italica
  misc_feature (21)..(21): Xaa can be any naturally occurring amino acid
  Transcript Sequence Number=SeqID_19366
  Gene Ontology: Mol. function=helicase activity
  Homolog annotation: Hit_ID=Q01JY3; Match level="QueryCoverage=87%, HitCoverage=62%, E-value=1e-49, Identity=48%"; Hit description =OSIGBa0116M22.5 protein
  Pfam annotation: Domain name=PPR; Domain location=30-64; Score=46.5; E_value=1e-10; Accession=PF01535.12; Description=PPR repeat
  Pfam annotation: Domain name=PPR; Domain location=65-99; Score=54.3; E_value=4.7e-13; Accession=PF01535.12; Description=PPR repeat
  Pfam module annotation: Pfam domain module=PPR::PPR; Domain location =30-64::65-99
GGWCLLGRLDEARGIIDKMTXGRGIQPDLVSYNTLISGYSMKGDIKDALRVRDEMMNKGFNPTLLTYNALIQGLCKNGQGDDAENLMKEMVEKGITPDDSTYISLIEGLTTEDERTAAADAAEA

SEQ ID NO: 85341 - protein, 107 aa, Setaria italica
  Transcript Sequence Number=SeqID_19367
GAACFLNIGGNLKECHGAPLLPLLYITLNMAFNISALNLVKMSTAVVASLTSTLAVPLTIYVLSLPLPFLPEGTNLSTPFVIGAATLVLGLLLYNLPQKSADQVKKD

SEQ ID NO: 85342 - protein, 295 aa, Setaria italica
  misc_feature (276)..(276): Xaa can be any naturally occurring amino acid
  Transcript Sequence Number=SeqID_19368
  Gene Ontology: Mol. function=ribonuclease activity; Cellular component=cytoplasm; Biological process=carbohydrate metabolic process
  Homolog annotation: Hit_ID=B0LV36; Match level="QueryCoverage=97%, HitCoverage=31%, E-value=4e-98, Identity=62%"; Hit description =Ribonuclease E
  Pfam annotation: Domain name=RNase_E_G; Domain location=2-148; Score =124.7; E_value=3e-34; Accession=PF10150.1; Description=Ribonuclease EG family
VAPELCSRVDLYEKRKPIFDEYNIEKEIDNILCKRVPLQNGGSLVIEQTEALVSIDVNGGHSMFGQGTSQEKAILEVNLEAAKQIARELRLRDIGGIIVVDFIDMTDDSNKRLVYEEMKKAVEKDRSTVGVSELSKLGLMEITRKRVRPSVTFMISEPCTCCHGTGRVEALDTSFSKIEREICRRLAASRRKSDPEKPKSWPRFVLRVDHEMCTYLTSGKKTKLGLLSSSLKVWILLKIARGFSRGAFELLPYSEEKENGEEKETSSESPQKEGSXPKLSVFPIKKWMSRAKRAK

SEQ ID NO: 85343 - protein, 328 aa, Setaria italica
  misc_feature (149)..(149): Xaa can be any naturally occurring amino acid
  Transcript Sequence Number=SeqID_19369
ADLPDEHYAYRARERLRKAALVPLRRALKLPEVFISARAWESVVYTRVASVAMKNYKDLFLKHDADRFNAYLADVKSGKKRIAAGALLPHEIIASLGDDDGEENDGGVADLQWQRMVDDMRALGRLSNCVAVCDVSGSMSGVPMDVCVXLGLLVSELSDDPWRGRVITFSERPELHRIAGETLAEKISFVRTMDWGMNTNFQAVFDKILEVAVEARLAPERMVKRVLVFSDMEFDQASAEPWETDHEAIVRKFTEAGYGGAVPEVVFWNLRDSKAVPVEAGQKGVALVSGFSKNLLKLFLDGGGVVSPRAVMEKAIAGPEYDKLAVFD

SEQ ID NO: 85344 - protein, 272 aa, Setaria italica
  Transcript Sequence Number=SeqID_19370
  Gene Ontology: Cellular component=mitochondrion
  Homolog annotation: Hit_ID=B9S2P6; Match level="QueryCoverage=99%, HitCoverage=58%, E-value=2e-68, Identity=35%"; Hit description =Pentatricopeptide repeat-containing protein, putative
  Pfam annotation: Domain name=PPR; Domain location=127-161; Score =16.3; E_value=0.1; Accession=PF01535.12; Description=PPR repeat
  Pfam annotation: Domain name=PPR; Domain location=163-197; Score=4.2; E_value=2.9; Accession=PF01535.12; Description=PPR repeat
  Pfam annotation: Domain name=PPR; Domain location=230-264; Score=2.2; E_value=4.9; Accession=PF01535.12; Description=PPR repeat
  Pfam annotation: Domain name=PPR; Domain location=92-126; Score=42.6; E_value=1.6e-09; Accession=PF01535.12; Description=PPR repeat
  Pfam module annotation: Pfam domain module=PPR::PPR::PPR::PPR; Domain location=127-161::163-197::230-264::92-126
AKNGHALDAMELFCEMHQLGLWLDKVAIASVLSASSSICSISFGEQIFGLAIALGLQSDHIVASSLIDLYCKCGNLANGCRIFDGIDNPDEVLWNSMLIGYASNGYGYEALELLKLMQSRGVKPSERTFVGVLSACCHSGLVEEGLRWFDRMKEDFGVSPSAEHYACVTDLLVRAGRLDEAVEFIENMPFKADAISWTSIIGGCKAQGNEALLHKVAKKLMETEVSPHSSLYVQLSSTLAAQGDWAKSAEIRNMMRDRRISKNAGYSWIDSA

SEQ ID NO: 85345 - protein, 126 aa, Setaria italica
  Transcript Sequence Number=SeqID_19371
  Gene Ontology: Mol. function=microtubule motor activity; Cellular component=microtubule associated complex; Biological process =microtubule-based movement
  Homolog annotation: Hit_ID=B6U113; Match level="QueryCoverage=99%, HitCoverage=12%, E-value=4e-19, Identity=46%"; Hit description =Kinesin-4
DDEERGALECADPASLDRCTAGGDSKTDAPPSPMPATPQPSPQQPAGEDAAASCEVEKEQEQQQQEVVVPGVGEALRNFMEEFGDQGENSLVLSPRLKEIATPDRPAALRFLGEKYNSLIVEYYQQ

SEQ ID NO: 85346 - protein, 156 aa, Setaria italica
  Transcript Sequence Number=SeqID_19372
  Gene Ontology: Mol. function=metal ion binding; Cellular component =chloroplast
  Homolog annotation: Hit_ID=B9RUE7; Match level="QueryCoverage=55%, HitCoverage=39%, E-value=5e-26, Identity=66%"; Hit description=Metal ion binding protein, putative
  Pfam annotation: Domain name=HMA; Domain location=64-133; Score=13.5; E_value=0.071; Accession=PF00403.18; Description=Heavy-metal -associated domain
  Subcellular localization annotation: CTP_CleavageSite=45; ConfidenceScore=5.56e-01
MMSLPASTHLLPSAAAVSLLPRRVSLQLSYATGWRAGSRRPAVVRAATAEAAAPAYTSDSLILYFKAEGTMEERAIPKITESLEGMEGVKDLEVLIEEGIASVVLTKETTVQATGVASNLVEAIQGAGFKLQTLSLSFNDFDEATAGVGGGVQSSE

SEQ ID NO: 85347 - protein, 63 aa, Setaria italica
  Transcript Sequence Number=SeqID_19373
  Gene Ontology: Mol. function=serine-type carboxypeptidase activity; Cellular component=extracellular region; Biological process =proteolysis
  Homolog annotation: Hit_ID=B6T4S1; Match level="QueryCoverage=95%, HitCoverage=12%, E-value=3e-19, Identity=66%"; Hit description=SCPL33
PIKSQWQPWYLNNQVAGRFIEYEGLTLATVRGAGHDVPQDKPAEALVLISSFLSDRKLPTKNN

SEQ ID NO: 85348 - protein, 66 aa, Setaria italica
  Transcript Sequence Number=SeqID_19374
  Gene Ontology: Mol. function=RNA binding; Cellular component =intracellular
  Homolog annotation: Hit_ID=Q7XB75; Match level="QueryCoverage=83%, HitCoverage=3%, E-value=5e-17, Identity=81%"; Hit description =Putative pre-rRNA processing protein RRP5
  Pfam annotation: Domain name=S1; Domain location=1-65; Score=7.0; E _value=0.082; Accession=PF00575.15; Description=S1 RNA binding domain
IIDGQVKRVESYGLFVTIRSSELVGLCHVSELSDEPVLDINSRYKAGDMVKAKTLPCTSIPTGKSF

SEQ ID NO: 85349 - protein, 619 aa, Setaria italica
  Transcript Sequence Number=SeqID_19375
  Gene Ontology: Mol. function=RNA binding; Cellular component =intracellular; Biological process=RNA processing
  Homolog annotation: Hit_ID=Q7XB75; Match level="QueryCoverage=99%, HitCoverage=36%, E-value=0.0, Identity=77%"; Hit description =Putative pre-rRNA processing protein RRP5
  Pfam annotation: Domain name=S1; Domain location=160-234; Score=75.4; E_value=2e-19; Accession=PF00575.15; Description=S1 RNA binding domain
  Pfam annotation: Domain name=S1; Domain location=70-143; Score=21.2; E_value=0.0042; Accession=PF00575.15; Description=S1 RNA binding domain
  Pfam module annotation: Pfam domain module=S1::S1; Domain location =160-234::70-143
  Subcellular localization annotation: CTP_CleavageSite=27; ConfidenceScore=5.13e-01
IVDSWVADPLSGFHEGQFVKCKVLSVSRSSEGSLRVDLSLRSSNIRTDSSNSRLFDEGATCIPRIEKIEDLLPGTEIKGYVKNVNPKGCFIMLSRMVEARITLSNLSDEYVENPQKDFPVGMLVHGRVLSTDPSSGRVEASLRKNTGSKLEKPDDINYSDLHVGDIIDGQVKRVESYGLFVTIRSSELVGLCHVSELSDEPVLDINSRYKAGDMVKAKILKIDEKRHRVSLGMKKSYFDCGLTAGTNDDDEIAPMDISIASQVAGYHNKVHSAAEPRASVLPLQVSLDESEGSDLEDNSNEGHEIANGSEANAKKSDKRLKKEARKQRELEISALEERALQGDIPRTPDDFEKLVRSSPNSSFVWIKYMACLLDLADVEKARAIAERALKTIIPREEEERLNVWVAYFNLENEYGSPREDAVKKVFQRALQYCDHKKLHLALLAVYERTEQYELADELLDRMTKRFKTSCKIWLCRIQFALKQGKDVEYIKAVVNRALLSLPQRKRIKFLSKTAILEFKCGAPEEGRSRFELILREYPKRTDLWSVYLDQEIRLGDIEIIRGLFDKATCLTLPPKKMQFLFKKYLKFEKSLGEDNERIQHVQQIAMKYVQSSLPSESHP

SEQ ID NO: 85350 - protein, 545 aa, Setaria italica
  Transcript Sequence Number=SeqID_19376
  Gene Ontology: Mol. function=RNA binding; Cellular component =intracellular; Biological process=RNA processing
  Homolog annotation: Hit_ID=Q7XB75; Match level="QueryCoverage=99%, HitCoverage=44%, E-value=0.0, Identity=49%"; Hit description =Putative pre-rRNA processing protein RRP5
  Pfam annotation: Domain name=S1; Domain location=243-323; Score=8.6; E_value=0.06; Accession=PF00575.15; Description=S1 RNA binding domain
  Pfam annotation: Domain name=S1; Domain location=439-517; Score=28.1; E_value=3.6e-05; Accession=PF00575.15; Description=S1 RNA binding domain
  Pfam annotation: Domain name=S1; Domain location=60-126; Score=7.5; E_ value=0.074; Accession=PF00575.15; Description=S1 RNA binding domain
  Pfam module annotation: Pfam domain module=S1::S1::S1; Domain location=243-323::439-517::60-126
KCCQSVRSHILSVNAETARVKLSLQQSMCSSTDSSFIQGYFLLDQKISALKYSSHDWAHAFGIGSLVEGEVGAIEEYGIVLNFNDHPDVVGLIEHHQLSDSTLEVGSSVKGLVLDLSDGVVNLSLKPELISSVRIGGTKKKRQRPTVADLELHEEVNAVVEIVKESYVVLSIPEYNYAIGFASLMDYNSQLLATHRYDNGQRITVVVGNIPSSDPSGRLILLPKASAQDSGLSGSKRAKKKSEYKVGSLVEAEIIDIKPLELILKFGANLHGRIHITEVLEEDSAERPFSKLRIGQKLTARIVAEAEPSGKNGKNFKWELSIRPSMLKGEFEESTAHKEEFNHTTNVVVCGYVVRVDKEWVWLTVSRNVMAHLFILDSSSDPSELKQFQQRFSVGQAVKGCVISVNREKRLLRVKALDNQCAQHNIDKIQQSESSLVEQTKQGDVIGGRVQKILPGVGGLVVQIGPHLHGRVHYTEIVDSWVADPLSGFHEGQFVKCKVLSVSRSSEGSLRVDLSLRSSNIRTDSSNSRLFDEGATCIPRIRRKN

SEQ ID NO: 85351 - protein, 71 aa, Setaria italica
  Transcript Sequence Number=SeqID_19377
  Subcellular localization annotation: CTP_CleavageSite=60; ConfidenceScore=5.06e-01
KHAFKIRKSGALNNKNDDNYFKHACPQIFRSLARLLLARPASPPPPAILLSLARSPYFAAAATNARHPPLL

SEQ ID NO: 85352 - protein, 35 aa, Setaria italica
  Transcript Sequence Number=SeqID_19378
DGWAKFTGGFFFGGISGVVWAYFLLYVLDLPYYFK

SEQ ID NO: 85353 - protein, 208 aa, Setaria italica
  Transcript Sequence Number=SeqID_19379
  Gene Ontology: Mol. function=chlorophyll binding; Cellular component =photosystem I reaction center; Biological process=photosynthesis
  Homolog annotation: Hit_ID=B6STG2; Match level="QueryCoverage=99%, HitCoverage=98%, E-value=5e-94, Identity=84%"; Hit description =Photosystem I reaction center subunit XI
  Pfam annotation: Domain name=PsaL; Domain location=48-206; Score =373.2; E_value=4.6e-109; Accession=PF02605.7; Description =Photosystem I reaction centre subunit XI
  Subcellular localization annotation: CTP_CleavageSite=26; ConfidenceScore=5.44e-01
MATAYAPMASQVMKSGLVHSRPRGLSGAALTRRPRFTVKAIQPEKTTYQVVQPINGDPFIGSLETPITSSPLIAWYLSNLPAYRTAVSPLLRGIEVGLAHGYLLVGPFALTGPLRNTPVHGQAGALGAAGLVTILSVCLTMYGVASFNEGDPSTAPTLTLTGRKKEADKLQTADGWAKFTGGFFFGGISGVVWAYFLLYVLDLPYYFK

SEQ ID NO: 85354 - protein, 97 aa, Setaria italica
  Transcript Sequence Number=SeqID_19380
  Gene Ontology: Cellular component=mitochondrion; Biological process =nodulation
  Homolog annotation: Hit_ID=B4FNN2; Match level="QueryCoverage=100%, HitCoverage=100%, E-value=2e-47, Identity=95%"; Hit description =Early nodulin 93
  Pfam annotation: Domain name=ENOD93; Domain location=11-89; Score =168.0; E_value=2.8e-47; Accession=PF03386.6; Description=Early nodulin 93 ENOD93 protein
MAGRSFLIRSPKEEESDAAVREAVFLGARNAAIAGSVVAVPTLIGCRVLPWAKANLNYTAQALIISAACIAGFFITADKTILRNARQNTIGKLDKST

SEQ ID NO: 85355 - protein, 119 aa, Setaria italica
  Transcript Sequence Number=SeqID_19381
GGQRVAVLRRLPQHGGHGLEEAILGDAGADARVPHRGGRADRRRIFTGRLAGIGSKEQLPTPPRWLRSRHVVDIHASSSDIRKWANGPLFWAADQQSRGKPRKAEIESELSESTGGKER

SEQ ID NO: 85356 - protein, 242 aa, Setaria italica
  Transcript Sequence Number=SeqID_19382
  Gene Ontology: Mol. function=receptor activity; Cellular component =integral to membrane
  Homolog annotation: Hit_ID=B6T5N6; Match level="QueryCoverage=100%, HitCoverage=100%, E-value=1e-119, Identity=91%"; Hit description =Transmembrane BAX inhibitor motif-containing protein 4
  Pfam annotation: Domain name=UPF0005; Domain location=25-241; Score =47.9; E_value=3.9e-11; Accession=PF01027.12; Description =Uncharacterised protein family UPF0005
MWGYQKAPDLEAGGSELLYPGMTESPDLRWAFVRKIYVILSVQLAMTALVSAFVVKVPAISLFFVSSNAGIALYIFLLILPFIVLCPLHYYHQKHPVNLLLLGLFTVAISFAVGMTCAFTSGKVILEAAILTAVVVISLTAYTFWAAKRGHDFNFLGPFLFAALMVLMVFSLVQIFFPLGKISVMIYGGLASLIFSGYIIYDTDNIIKRYTYDEYIWAAVSLYLDVINLFLSLLQVLRAADS

SEQ ID NO: 85357 - protein, 150 aa, Setaria italica
  Transcript Sequence Number=SeqID_19383
  Gene Ontology: Mol. function=electron carrier activity; Cellular component=extracellular region; Biological process=response to oxidative stress
  Homolog annotation: Hit_ID=B6THG0; Match level="QueryCoverage=100%, HitCoverage=41%, E-value=1e-69, Identity=84%"; Hit description =Peroxidase 12
  Pfam annotation: Domain name=peroxidase; Domain location=1-150; Score= 90.9; E_value=4.5e-24; Accession=PF00141.15; Description=Peroxidase
RVVSCADIVTLAARDSVVLGGGPAYKVPLGRRDGLAPASEDAILGALPPPTSKVPTLVSFLAKINLDVTDLVALSGGHTVGIAHCGSFEKRLFPTQDPTLNQWFAGQLRLTCPVEGATNTTVNDIRTPNTFDNKYYVDLLNREGLFTSDH

SEQ ID NO: 85358 - protein, 270 aa, Setaria italica
  Transcript Sequence Number=SeqID_19384
  Gene Ontology: Mol. function=sequence-specific DNA binding; Cellular component=nucleus; Biological process=regulation of transcription, DNA-dependent
  Homolog annotation: Hit_ID=Q5QMQ5; Match level="QueryCoverage=74%, HitCoverage=83%, E-value=1e-70, Identity=70%"; Hit description =Homeobox transcription factor-like
  Pfam annotation: Domain name=Homeobox; Domain location=57-113; Score =71.5; E_value=3.1e-18; Accession=PF00046.21; Description=Homeobox domain
  Subcellular localization annotation: CTP_CleavageSite=59; ConfidenceScore=5.30e-01
TLRGGLRKVGSFCALLWRSRKVLGSRFPGPGSLPWTPPAPASASGAGVETSGSAEKPVKRMMKTPYQLEVLEKTYAVEQYPSEAMRLELSEKIGLSDRQLQMWFCHRRLKDRKPPSKRQRREEEAALAPVMPPLPVLPTPAIPLASSDLMVGTPGMYNEPLHPAHSRRGAGRSSAVPRISMPDIGRRYYEPTPIMMAQPVVPSVQLTPSELHVIHSVESQLGEPLREDGPVLGTDFDPVPPGAFGAPIVPEQQSSLCDLMIQDISRHDPK

SEQ ID NO: 85359 - protein, 82 aa, Setaria italica
  Transcript Sequence Number=SeqID_19385
  Gene Ontology: Mol. function=binding; Cellular component=chloroplast
  Homolog annotation: Hit_ID=B6TRK0; Match level="QueryCoverage=100%, HitCoverage=48%, E-value=3e-34, Identity=80%"; Hit description =Mitochondria fission 1 protein
MDTHIGKFMDSVGSIFRGGDVLPWCDSDIIAGFEREIADATNEEQKNDSLMRFSWALVHSRQPEDVNRGIAMLQASLDRPST

SEQ ID NO: 85360 - protein, 132 aa, Setaria italica
  Transcript Sequence Number=SeqID_19386
  Gene Ontology: Mol. function=binding; Cellular component=chloroplast; Biological process=mitochondrial fission
  Homolog annotation: Hit_ID=B6TRK0; Match level="QueryCoverage=79%, HitCoverage=61%, E-value=2e-46, Identity=85%"; Hit description =Mitochondria fission 1 protein
  Pfam annotation: Domain name=TPR_2; Domain location=46-79; Score =27.2; E_value=6.5e-05; Accession=PF07719.9; Description =Tetratricopeptide repeat
KETRKNDSLMRFSWALVHSRQPEDVNRGIAMLQASLDRPSSPLQTREKLYLLAVGHYRTGDYTRSRQLLERCLEIQPDWRQALTLQRLVEEKTRRDGMIGMAIITGAFGLVGLVAGGIIAAASSSSSSSRKK

SEQ ID NO: 85361 - protein, 258 aa, Setaria italica
  Transcript Sequence Number=SeqID_19387
  Homolog annotation: Hit_ID=B9RJE4; Match level="QueryCoverage=76%, HitCoverage=10%, E-value=8e-37, Identity=43%"; Hit description=ATP binding protein, putative
RSHDPAEVAAASSDIGTDKVNARIKLKETSLGYPSVEDSAGSTEDYENSSHTSDGIFTEKNDPYGSHEISSFRSSGDLPLCPTSQSPTPEKGAHRGKHLSPQGSSDWTHGWSPEYSADKDLAAAHDENNRLRTRLEVAESAFSQLKTEATSLEHVTDKLGTETQGLAQQVAVELMSRNQLTTEVSLLRTECSNLKQELEEIKSSKLLQKKSDAEATDSAHHLQTEWLQGLLLLESKLQQTRNNALHGLQASDLDFLLT

SEQ ID NO: 85362 - protein, 115 aa, Setaria italica
  misc_feature (25)..(25): Xaa can be any naturally occurring amino acid
  Transcript Sequence Number=SeqID_19388
  Subcellular localization annotation: CTP_CleavageSite=65; ConfidenceScore=5.47e-01
RRKHAQQPEQRAGPRQCSSGWRAKXRTWPRQGSSRLGASRQPSRSQRPRPACWSQQPSLLPKQLAAQGVRDRRPAGHFSFLAHQVARHSHQIVLAQVNSAAHKQVRQLWSSSSVN

SEQ ID NO: 85363 - protein, 69 aa, Setaria italica
  Transcript Sequence Number=SeqID_19389
KYIYMYTNRIELVALPELALAADAIAELLVLVLEQAQLLVLVLEQAQHVVEEIIHLVLQLSDRHLHRVR

SEQ ID NO: 85364 - protein, 204 aa, Setaria italica
  misc_feature (8)..(8): Xaa can be any naturally occurring amino acid
  misc_feature (34)..(34): Xaa can be any naturally occurring amino acid
  misc_feature (58)..(58): Xaa can be any naturally occurring amino acid
  Transcript Sequence Number=SeqID_19390
  Gene Ontology: Cellular component=endoplasmic reticulum
  Homolog annotation: Hit_ID=B6SS42; Match level="QueryCoverage=100%, HitCoverage=72%, E-value=5e-54, Identity=59%"; Hit description=Seed maturation protein
  Pfam annotation: Domain name=Reticulon; Domain location=1-189; Score =112.6; E_value=1.3e-30; Accession=PF02453.9; Description=Reticulon
DVLLWRNXKISSSVLGVATLVWVFFEWLDYHFLXTIVSFAIVVGMAAQFGWSMFASNXPRVELPEELFANAGKAAGAQVNKALGMLQDISSERDLSRFLIVIAALFAAAIVGSFCNFLTVIYIGNAESPVISRFTLIRHFGSEDSRRFTFCVSGFVSAHTLPVLYEKYQDQVDDFFYNMLGLLQNQYQKLGNGVRSKGKFRKSD

SEQ ID NO: 85365 - protein, 243 aa, Setaria italica
  Transcript Sequence Number=SeqID_19391
  Gene Ontology: Cellular component=endoplasmic reticulum
  Homolog annotation: Hit_ID=B6SS42; Match level="QueryCoverage=100%, HitCoverage=100%, E-value=1e-88, Identity=69%"; Hit description=Seed maturation protein
  Pfam annotation: Domain name=Reticulon; Domain location=69-228; Score= 183.1; E_value=7.7e-52; Accession=PF02453.9; Description=Reticulon
MAERSENASGDMMSNIMEAIAENLPNKKSVKFDDGEGSISDQARKLFGGGGGGQGNKKSLHHFFGGGKSADVLLWRNKKISSSVLGVATLVWVFFEWLDYHFLTIVSFAIVVGMAAQFGWSMFASNPPRVELPEELFANAGKAAGAQVNKALGMLQDISCGRDLRRFLIVIAALFAAAIVGSFCNFLTVIYIGFVSAHTLPVLYEKYQDQVDDFFYNMLGLLQNQYQKLGNGVRSKGKFRKSD

SEQ ID NO: 85366 - protein, 246 aa, Setaria italica
  Transcript Sequence Number=SeqID_19392
  Homolog annotation: Hit_ID=B6T568; Match level="QueryCoverage=99%, HitCoverage=99%, E-value=1e-111, Identity=80%"; Hit description =Cupin, RmlC-type
  Pfam annotation: Domain name=DUF1637; Domain location=32-244; Score =381.9; E_value=1.1e-111; Accession=PF07847.4; Description=Protein of unknown function (DUF1637)
MPKIKNLSNACKVSFSPDGPISEEALERVRALLEEIRPLDVGLDNEAQIARNWNSSTRSSNGRRGRNGANQFATPIKYLHIHECESFSMGIFCMPPSSVIPLHNHPGMTVLSKLLYGRLHAESYDWIDVPDHPIDQLQARPAKLVRDREMTAPETSILYPNRGGNIHTFRAITPCALFDVLSPPYSAEDGRHCSYFRKSLVNQPPVVLPAEIDSSQVVWLEELEDHQPPDGFVVARGLYKGPVIRI

SEQ ID NO: 85367 - protein, 102 aa, Setaria italica
  Transcript Sequence Number=SeqID_19393
  Homolog annotation: Hit_ID=C3SAD5; Match level="QueryCoverage=89%, HitCoverage=37%, E-value=6e-45, Identity=91%"; Hit description =DUF614 containing protein
  Pfam annotation: Domain name=PLAC8; Domain location=1-101; Score =36.0; E_value=1.5e-07; Accession=PF04749.9; Description=PLAC8 family
LSNCLFIVTLGRTGLFCPCVLFGRNVEALREDIPWTTPCVCHAVFVEGGITLAILTAIFHGADPRASFLIGEGLVFSWWLCATYTGIFRQELQRKYHLKNSP

SEQ ID NO: 85368 - protein, 250 aa, Setaria italica
  Transcript Sequence Number=SeqID_19394
  Homolog annotation: Hit_ID=C3SAD5; Match level="QueryCoverage=98%, HitCoverage=99%, E-value=1e-123, Identity=85%"; Hit description =DUF614 containing protein
  Pfam annotation: Domain name=PLAC8; Domain location=65-192; Score =177.0; E_value=5.5e-50; Accession=PF04749.9; Description=PLAC8 family
MAEDATSSHPSRYVKLTKDQDAPTEDIRPGELNQPVHVPQLEGRRCSECGQVLPESYEPPADEPWTTGIFGCTDDPETCRTGLFCPCVLFGRNVEALREDIPWTTPCVCHAVFVEGGITLAILTAIFHGADPRASFLIGEGLVFSWWLCATYTGIFRQELQRKYHLKNSPCDPCMVHCCLHWCANCQEHRERRGRLAENNAVPMTVVNPPPVQEMSMSENRAPAVPENGAANAEHEAAKTEHDDIEVIPL

SEQ ID NO: 85369 - protein, 56 aa, Setaria italica
  Transcript Sequence Number=SeqID_19395
  Homolog annotation: Hit_ID=UPI000034F1A9; Match level="QueryCoverage =91%, HitCoverage=6%, E-value=2e-09, Identity=58%"; Hit description =NOL1/NOP2/sun family protein
LVGQVQQIVRKEEWDVFMSFLRKPLPATFRINASCQFYKDICSKLENDFRQSLESE

SEQ ID NO: 85370 - protein, 697 aa, Setaria italica
  misc_feature (57)..(57): Xaa can be any naturally occurring amino acid
  misc_feature (93)..(93): Xaa can be any naturally occurring amino acid
  misc_feature (221)..(221): Xaa can be any naturally occurring amino acid
  misc_feature (225)..(225): Xaa can be any naturally occurring amino acid
  Transcript Sequence Number=SeqID_19396
  Gene Ontology: Mol. function=tRNA (cytosine-5-)-methyltransferase activity; Cellular component=cytoplasm; Biological process=tRNA processing
  Homolog annotation: Hit_ID=UPI000034F1A9; Match level="QueryCoverage =98%, HitCoverage=87%, E-value=1e-177, Identity=46%"; Hit description= NOL1/NOP2/sun family protein
  Pfam annotation: Domain name=Nol1_Nop2_Fmu; Domain location=17-315; Score=27.9; E_value=1.8e-09; Accession=PF01189.9; Description =NOL1NOP2sun family
LGKRLLAFSTDGEWDVFMSFLRKPLPATFRINASCQFYKDICSKLENDFRQSLESEXEYGEDAIRPLPWYPGNLAWHLNFSRKELRKNLALEXVPPLFLNVQPDHHILDMCAAPGSKTFQLLEMIHQSKEPGLLPGALVMANDLNVQRCDLLIHNTKRMCTANLIVTNHEAQNFPNCSLAKDYSEAYKDNCKSQRLEFDRVLCDVPCSGDGTIRKGHDMYXATEXGEGNQLHLLQVNIAMRGIALLKVGGRMVYSTCSMNPVENEAVIAELLRRNGKSVELLDVSSELPELVRRPGLSTWKVQDRGSWFQTHDDVPHDRKNVVLPSMFPSSNITEESHAVCGYVEINTDNRGSFSRNCDIEETSNINHDMDGVSTDPTRNLDCTSNIVNSKFPLHRCMRIVPHDQNSGAFFIAVLHKLSPLNGSQIQGTKVQHTLGKGRIKQLHKEPEPETRPCETILTCQQNNVLEVDDAELLGRRQNLSGDNQTSKDKNSTEVEMVFNDVKSGREESGDIMKLQKQSRRKGVDPVLFFKDELVIKSIKSFFGIKESFPLEGHLVTRSTDNARRMYYISKSVKEIVELNEEVGEQLKIASLGVKMFERHRSKDGCSCAYRLSYEGLSLLLPYISTRILYASPLDFHRLLQYRTINFAHFVDSRFGEEAASMMPGCCVVVLLEGHENADSILKDPTTIAIVCWRGKG

SEQ ID NO: 85371 - protein, 109 aa, Setaria italica
  Transcript Sequence Number=SeqID_19397
  Homolog annotation: Hit_ID=Q9SMQ5; Match level="QueryCoverage=88%, HitCoverage=14%, E-value=1e-12, Identity=38%"; Hit description =Proliferating-cell nucleolar antigen-like protein
DNLYASPLDFHRLLQYRTINFAHFVDSRFGEEAASMMPGCCVVVLLEGHENADSILKDPTTIAIVCWRGKGTMNVMVSPPDRTDLLERMAYRFGIKASAVEDEKLLSQG

SEQ ID NO: 85372 - protein, 74 aa, Setaria italica
  Transcript Sequence Number=SeqID_19398
  Subcellular localization annotation: CTP_CleavageSite=46; ConfidenceScore=5.00e-01
EVATNGNVLLIRYKGKPGNPTSPSPASSLDVRLLLPSGYENPTTMEAELTFGALLVTVAKPKQAPSPIPIRTSD

SEQ ID NO: 85373 - protein, 161 aa, Setaria italica
  misc_feature (9)..(9): Xaa can be any naturally occurring amino acid
  misc_feature (26)..(26): Xaa can be any naturally occurring amino acid
  misc_feature (47)..(47): Xaa can be any naturally occurring amino acid
  misc_feature (98)..(98): Xaa can be any naturally occurring amino acid
  Transcript Sequence Number=SeqID_19399
  Gene Ontology: Mol. function=protein kinase activity; Cellular component=integral to membrane; Biological process=protein amino acid phosphorylation
  Homolog annotation: Hit_ID=O81106; Match level="QueryCoverage=98%, HitCoverage=17%, E-value=4e-45, Identity=64%"; Hit description =Leucine-rich repeat transmembrane protein kinase 2
  Pfam annotation: Domain name=LRR_1; Domain location=123-145; Score =6.4; E_value=18; Accession=PF00560.25; Description=Leucine Rich Repeat
  Pfam annotation: Domain name=LRR_1; Domain location=22-44; Score=6.3; E_value=19; Accession=PF00560.25; Description=Leucine Rich Repeat
  Pfam annotation: Domain name=LRR_1; Domain location=47-69; Score =13.5; E_value=0.78; Accession=PF00560.25; Description=Leucine Rich Repeat
  Pfam module annotation: Pfam domain module=LRR_1::LRR_1::LRR_1; Domain location=123-145::22-44::47-69
ERLNLAGNXQFVELPTRLTMTNLKYXNLNHNQLQGNISDVFSSLYSXLTDVDLSFNSLTGDLPQSFTGLSSLKHLYERMPVHLFSSPIHISLELFLHXPILFFLRYLQNNQFTGYINVLANLPLEALNVANNRFTGWIPSQLKKINSIQTDGNSWSTGPAP

SEQ ID NO: 85374 - protein, 154 aa, Setaria italica
  Transcript Sequence Number=SeqID_19400
  Gene Ontology: Mol. function=protein kinase activity; Cellular component=integral to membrane; Biological process=protein amino acid phosphorylation
  Homolog annotation: Hit_ID=O81106; Match level="QueryCoverage=96%, HitCoverage=20%, E-value=4e-70, Identity=86%"; Hit description =Leucine-rich repeat transmembrane protein kinase 2
  Pfam annotation: Domain name=Pkinase_Tyr; Domain location=14-153; Score=-121.1; E_value=1.1e-05; Accession=PF07714.9; Description =Protein tyrosine kinase
FNSVADLQVATDSFSFDNLVGEGTFGRVYRAQFNDGKVLAIKKLDSTVMPFQSSDDFAELVSNISKLHHPNLNELVGYCMEHGQHLLVYDFHRNGSLHDLLHLSDDYSKPLSWNSRVKIALGSARALEYLHEICSPSIIHKNFKSSNIFVLVLR

SEQ ID NO: 85375 - protein, 97 aa, Setaria italica
  Transcript Sequence Number=SeqID_19401
  Gene Ontology: Mol. function=protein kinase activity; Cellular component=integral to membrane; Biological process=protein amino acid phosphorylation
  Homolog annotation: Hit_ID=O81106; Match level="QueryCoverage=98%, HitCoverage=13%, E-value=6e-48, Identity=95%"; Hit description =Leucine-rich repeat transmembrane protein kinase 2
EPRSEQSLVRWATPQLHDIDALDRMVDPALKGLYPAKSLSRFADVLALCVQPEPEFRPPMSEVVQALVRLVQRANMTKRMLDGDTSRRPDDQDQDFI

SEQ ID NO: 85376 - protein, 722 aa, Setaria italica
  Transcript Sequence Number=SeqID_19402
  Gene Ontology: Mol. function=protein kinase activity; Cellular component=integral to membrane; Biological process=protein amino acid phosphorylation
  Homolog annotation: Hit_ID=O81106; Match level="QueryCoverage=95%, HitCoverage=96%, E-value=0.0, Identity=78%"; Hit description=Leucine- rich repeat transmembrane protein kinase 2
  Pfam annotation: Domain name=LRRNT_2; Domain location=43-84; Score =34.1; E_value=5.7e-07; Accession=PF08263.4; Description=Leucine rich repeat N-terminal domain
  Pfam annotation: Domain name=LRR_1; Domain location=111-135; Score =8.1; E_value=8.6; Accession=PF00560.25; Description=Leucine Rich Repeat
  Pfam annotation: Domain name=LRR_1; Domain location=136-158; Score =10.8; E_value=2.6; Accession=PF00560.25; Description=Leucine Rich Repeat
  Pfam annotation: Domain name=LRR_1; Domain location=160-182; Score =16.9; E_value=0.083; Accession=PF00560.25; Description=Leucine Rich Repeat
  Pfam annotation: Domain name=LRR_1; Domain location=184-206; Score =15.5; E_value=0.22; Accession=PF00560.25; Description=Leucine Rich Repeat
  Pfam annotation: Domain name=LRR_1; Domain location=208-229; Score =15.0; E_value=0.32; Accession=PF00560.25; Description=Leucine Rich Repeat
  Pfam annotation: Domain name=LRR_1; Domain location=230-252; Score =6.4; E_value=18; Accession=PF00560.25; Description=Leucine Rich Repeat
  Pfam annotation: Domain name=LRR_1; Domain location=87-109; Score =2.0; E_value=1.3e+02; Accession=PF00560.25; Description=Leucine Rich Repeat
  Pfam annotation: Domain name=Pkinase; Domain location=421-692; Score =82.4; E_value=1.6e-21; Accession=PF00069.17; Description=Protein kinase domain
  Pfam annotation: Domain name=Pkinase_Tyr; Domain location=421-692; Score=77.6; E_value=4.5e-20; Accession=PF07714.9; Description =Protein tyrosine kinase
  Pfam module annotation: Pfam domain module=LRRNT_2::LRR_1::LRR_1::LRR_ 1::LRR_1::LRR_1::LRR_1::LRR_1::Pkinase::Pkinase_Tyr; Domain location =43-84::111-135::136-158::160-182::184-206::208-229::230-252::87 -109::421-692::421-692
MARRRRGGGGGTVGAPWLVLLLLGCCGGGIWPRGRIFAAADTDPSDLNVLNTLFTSLNSPGQLNGWQANGGDPCGQSWKGITCSGSGVTKILLSNLGLSGNLAYNMNNLGSLVELDMSQNSLGGGSQIQYNLPYMKLERLNLAGNQFGGNLPYSISTMTNLKYLNLNHNQLQGNISDVFSSLYSLTDVDLSFNSLTGDLPQSFTGLSSLKHLYLQNNQFTGYINVLANLPLEALNVANNRFTGWIPSQLKKINSIQTDGNSWSTGPAPPPPPYTAPPPPNRRNSPDGSSSSGGKSGIGGGGVAGIIISLLVVGAVVAFFLIKRRKRKAAKAEHYEQHQPFTSFPSNEIKDMKPIDESTTVDIESLASPASISLKPPPKIERHKSFDDDDFSNRPVAKKSNITPIKATVYSVADLQVATDSFSFDNLVGEGTFGRVYRAQFNDGKVLAIKKLDSTVMPFQSSDDFAELVSNISKLHHPNLNELVGYCMEHGQHLLVYDFHRNGSLHDLLHLSDDYSKPLSWNSRVKIALGSARALEYLHEICSPSIIHKNFKSSNILLDSEFNPHVSDAGLASFIPDAEFQAAEQSAGYTAPEVDMTGQYTLKSDVYSFGVVMLELLTGRRPFDSSRPRSEQSLVRWATPQLHDIDALDRMVDPALKGLYPAKSLSRFADVLALCVQPEPEFRPPMSEVVQALVRLVQRANMTKRMLDGDTSRRPDDQDQDFI

SEQ ID NO: 85377 - protein, 496 aa, Setaria italica
  misc_feature (60)..(60): Xaa can be any naturally occurring amino acid
  misc_feature (302)..(302): Xaa can be any naturally occurring amino acid
  misc_feature (472)..(472): Xaa can be any naturally occurring amino acid
  Transcript Sequence Number=SeqID_19403
  Gene Ontology: Mol. function=phosphotransferase activity, alcohol group as acceptor
  Homolog annotation: Hit_ID=Q10D72; Match level="QueryCoverage=100%, HitCoverage=13%, E-value=0.0, Identity=69%"; Hit description =Phosphatidylinositol 3-and 4-kinase family protein, expressed
CGVAFSWHIEGSCFFVWELSLLDSILDLCMHEMSSSVEHSINANQLYLTLKKKLAIHVEXQVFRYITERIAPSLILSLDEEISALLQLGQGRRESDQPKRDFAAVGRVALMLEEYCNAHETARTTRTAVSLMKKQLNELTEALRKTILETVQVEWLHDLSSPHVQKAKVLSQNILSDDKFISLILNLSRSNMLDKIQSSVSLITRSIEFLQACESISISAEGQLERAMGWACAGTNTSGAGGSTAKGSGIPPEFHGHLLKRRKLLQVVQKEASDLVKLCTSVLEFEASRDGLYFIPEDKASXQSMDKGRAWQQSFVNLLTRLDAAYHSFICAEQEWKVGQVNLETAGKGLFSANNQVSVVSVKAKSALVNLQDALVAMYEHACEVSALLSGFKHVSQDRTALTSECGSLLDEVLAIADGLHDVYALGKEAAAVHSSLMTNLSKANATLFPLEACLSADVTIMSEAISKEREXNNASMPLIHGKALFQSYNIKIREA

SEQ ID NO: 85378 - protein, 340 aa, Setaria italica
  Transcript Sequence Number=SeqID_19404
  Gene Ontology: Mol. function=nucleotide binding; Cellular component =cytoplasm; Biological process=defense response
  Homolog annotation: Hit_ID=B9RK93; Match level="QueryCoverage=88%, HitCoverage=33%, E-value=5e-25, Identity=31%"; Hit description =Leucine-rich repeat-containing protein 2, lrrc2, putative
  Pfam annotation: Domain name=LRR_1; Domain location=10-31; Score =16.3; E_value=0.12; Accession=PF00560.25; Description=Leucine Rich Repeat
  Pfam annotation: Domain name=LRR_1; Domain location=260-282; Score =4.6; E_value=39; Accession=PF00560.25; Description=Leucine Rich Repeat
  Pfam annotation: Domain name=LRR_1; Domain location=286-308; Score =0.2; E_value=2.8e+02; Accession=PF00560.25; Description=Leucine Rich Repeat
  Pfam annotation: Domain name=LRR_1; Domain location=33-55; Score =10.5; E_value=2.9; Accession=PF00560.25; Description=Leucine Rich Repeat
  Pfam module annotation: Pfam domain module=LRR_1::LRR_1::LRR_1::LRR _1; Domain location=10-31::260-282::286-308::33-55
LPSGISSLVQLQYLDLYNTNIRSLPRELGSLATLRFLLLSHMPLEMIPSGVICSLTMLQVLYMDLSYGDWKVGTSGNGVDFQELENLRRLRALDITIQSPEALERLSRSFRLAGSTRNLLIKTCSSMTKIELPMSHLWKNMTNLKRVWIVSCSNLAEVIIDVTKETVGSNALPRAILQARAELVDEEQPILPTLHDIILQGLHKVKIIYKGGCIQNLSSLFIWYCHGLEELITVGEEQDIAAGDGEQASGASRVITPFPNLRELYLHGLAKFRRLSSNTCTLHFPALESLKIIECPNLKKLKLSAGGLNVIQCSREWWDGLEWDDEEVRASYEDLFRPLH

SEQ ID NO: 85379 - protein, 178 aa, Setaria italica
  misc_feature (167)..(167): Xaa can be any naturally occurring amino acid
  Transcript Sequence Number=SeqID_19405
  Gene Ontology: Mol. function=DNA binding; Cellular component=nucleus; Biological process=regulation of transcription, DNA-dependent
  Homolog annotation: Hit_ID=B9SGW6; Match level="QueryCoverage=100%, HitCoverage=82%, E-value=4e-54, Identity=55%"; Hit description=snRNA- activating protein complex subunit, putative
FYNDSRHRSATDYSKPILDWLQNSGDEVAEKWDAITSGVLKKRQKDLLRGLNISNVPEFKSERMQTTRFSDLHFRPGAGYLYCHQGSCNHRIVIRDMRLIHQDDSQDQADYPLQTFQLQKRLQKCSVCQIYPATKMTVDDKWALNNPCYFCIKCYYLLHYKEDNTLXYEHTVYDFIQE

SEQ ID NO: 85380 - protein, 80 aa, Setaria italica
  Transcript Sequence Number=SeqID_19406
TLRYSLCVQRITKKQDKVATQLLALLFKQPPKWNKLHHSWHTLFKISHMLHLYMTICYLHFYYVACCKRKSPRTELALLS

SEQ ID NO: 85381 - protein, 511 aa, Setaria italica
  Transcript Sequence Number=SeqID_19407
  Gene Ontology: Cellular component=plasma membrane
  Homolog annotation: Hit_ID=B6U2C6; Match level="QueryCoverage=100%, HitCoverage=100%, E-value=0.0, Identity=79%"; Hit description =ATMAP70-2
  Pfam annotation: Domain name=Myosin_HC-like; Domain location=181-508; Score=203.9; E_value=4.3e-58; Accession=PF07058.3; Description=Myosin II heavy chain-like
MGSLGEVDHGKEMFHGHCHSDPVVDELNRLENLLREKERELGHAYSEIKGLKVTEALKDKAIAELSKELKKQDEKMRSLEKQLEQKNLDVKRLSNERKEALSAQFAAEATLRRIHSSQKDEESVPFDAIIAPLESDIRKYRHEIAVLQDDKKALERHVKLKEVALVEAGNILRSALERALIVEDVQNQNIELKKQMEIYHEENKLLEKANRQKVLEVEKLTHTISELEESILETGEVANAVHFYQNQAAKLNEEKKTLERELARAKVYVNRVASTAANEWKDDSDKLMPVKRWLEERRLLQGEIQRLRDKITIAEKSAKIEAQLNDKLKRRLKSLEHDMRNEISNSSTKDINKKVTTKRSTSQPRQPNTARVSPQPSSPEAIDRRRPISQPRPSIAGKVLKQPNSEAESAEKTRVAKRFDSPRARTVIAKGERPTKNHLWAPRIKMPSDAGKENKEQNPNPKAHLNVSHSQGQSDTKVFDGNDECGVQCSEHQEAMENERNANSSSAERSP

SEQ ID NO: 85382 - protein, 64 aa, Setaria italica
  Transcript Sequence Number=SeqID_19408
  Gene Ontology: Mol. function=nucleic acid binding
  Homolog annotation: Hit_ID=B6SK91; Match level="QueryCoverage=100%, HitCoverage=10%, E-value=2e-18, Identity=75%"; Hit description =Nucleic acid binding protein
  Subcellular localization annotation: CTP_CleavageSite=34; ConfidenceScore=5.16e-01
VAGAWPQPNVPALCLPGSAGNLHLSRLRTSLSARSMAADELLASADYDGLVGSPASVRSARGKT

SEQ ID NO: 85383 - protein, 80 aa, Setaria italica
  Transcript Sequence Number=SeqID_19409
ALTGLGNVQDVEEDSQGYPLPPIISCISGIKSLCTDISMSDFVLHCLYYDTFLLLLHFNLQDLESGLYLVATPIGNLEDY

SEQ ID NO: 85384 - protein, 171 aa, Setaria italica
  Transcript Sequence Number=SeqID_19410
  Homolog annotation: Hit_ID=B6TBI6; Match level="QueryCoverage=98%, HitCoverage=31%, E-value=3e-53, Identity=65%"; Hit description=HGA4
MASSTAYSRPSKPPGPVAGDRRGPRLAKELGRIEPKKLGIGLVAGCCLALLTYLSFARLFAIYSPVFDSSALVLKNAPPATTTVPATEAPPVQPKTEVEQKDVTDPEVDPNLANLPEATRKEELKEAPATKPAAAATEAKITCDENGVDEGFPYARPPVCELAGDIRISPK

SEQ ID NO: 85385 - protein, 112 aa, Setaria italica
  Transcript Sequence Number=SeqID_19411
  Homolog annotation: Hit_ID=B6TBI6; Match level="QueryCoverage=75%, HitCoverage=16%, E-value=8e-41, Identity=95%"; Hit description=HGA4
LVRIPYVLIKTHTHESSVLVFSSAAAATEAKITCDENGVDEGFPYARPPVCELAGDIRISPKEKTMYFVNPSGAGPFDANGEKKIRPFARKDAFLLPGVVEVTIKSVSSAEA

SEQ ID NO: 85386 - protein, 96 aa, Setaria italica
  Transcript Sequence Number=SeqID_19412
  Homolog annotation: Hit_ID=B6TD26; Match level="QueryCoverage=100%, HitCoverage=17%, E-value=2e-33, Identity=79%"; Hit description=HGA4
MTSTAYSRPSKLPGGVERRLPPRLMRGLTSKIEPKKLGVGLIAGCCLALLTYVSLAKLFAIYSPVFASTANTSAMLQNSPPSSPKPSVPETEAIPP

SEQ ID NO: 85387 - protein, 148 aa, Setaria italica
  misc_feature (40)..(40): Xaa can be any naturally occurring amino acid
  Transcript Sequence Number=SeqID_19413
  Gene Ontology: Mol. function=transferase activity
  Homolog annotation: Hit_ID=B6TBI6; Match level="QueryCoverage=77%, HitCoverage=22%, E-value=2e-52, Identity=83%"; Hit description=HGA4
  Subcellular localization annotation: CTP_CleavageSite=22; ConfidenceScore=5.33e-01
AGTSAPASATVTLNPSSVAAVPAFAAQVNAADVLLAVHGXGLTNQIFLPTNGVVVQIVPWGKMDWMATNFYGQPARDMRLRYVEYYVSEEETTLKDKYPRDHYVFKDPMRIHGQGWPAIAEIIMKQDVMVNMTRFKPFLLKALDELQE

SEQ ID NO: 85388 - protein, 173 aa, Setaria italica
  misc_feature (167)..(167): Xaa can be any naturally occurring amino acid
  Transcript Sequence Number=SeqID_19414
  Gene Ontology: Mol. function=transferase activity
  Homolog annotation: Hit_ID=B6TBI6; Match level="QueryCoverage=92%, HitCoverage=30%, E-value=5e-82, Identity=90%"; Hit description=HGA4
  Pfam annotation: Domain name=DUF563; Domain location=1-122; Score= -71.2; E_value=0.00011; Accession=PF04577.6; Description=Protein of unknown function (DUF563)
TKFTTTTPLLKKLSNYDVINFDKDEEVHCFRAGHLGMYRDRDLIISPHPTRNPHNYTMVDYNRFLRRAFGLPRDAPAVLGEETAAKPKMLIIERKGTRKLLNLREVSSMCEALGFAVTVAEAGADVRRFAERVNAADVLLAVHGAGLTNQIFLPTGAVLVQIVPWGXMDWMAT

SEQ ID NO: 85389 - protein, 532 aa, Setaria italica
  misc_feature (15)..(15): Xaa can be any naturally occurring amino acid
  Transcript Sequence Number=SeqID_19415
  Gene Ontology: Mol. function=transferase activity
  Homolog annotation: Hit_ID=B6TD26; Match level="QueryCoverage=99%, HitCoverage=90%, E-value=0.0, Identity=79%"; Hit description=HGA4
  Pfam annotation: Domain name=DUF563; Domain location=144-401; Score =283.6; E_value=4.5e-82; Accession=PF04577.6; Description=Protein of unknown function (DUF563)
  Subcellular localization annotation: CTP_CleavageSite=48; ConfidenceScore=5.38e-01
TKTSVSLAKLFAIYXPVFASTANTSAMLQNSPPSSPKPSVPETEAIPPQETLAGGGSRGDAVDLPEVAGSEEPGLPEAVTRKEMSAGAGSDEPGLPEALSRKGDGENAAAASEPKPSPKKEEGEQRPNGGAAAAAAASSGEGKMTCDENGVDEGFPYARPTVCELSGDIRVSPKQKTVYLVNPSSAGGFDESGEKRLRPYARKDEFLLPAVTEVTVKSVPSAAAAPECTKRHAVPAVVFSNAGYTDNFFHDMTDAMVPLFLTAGHLKGEVQLLITNYKPWWVQKYTPLLQKLSNYDPINFDEDDGVHCFPAGFVGLYRDRDLILSPHPTRNPRNYTMVDFNRFVRGALALPRERPAVLGEEPGMRPRMLIISRAGTRKLLNLDEVAAAATELGFNVTVAEAGADVPAFAAQVNAADVLLAVHGAGLTNQIFLPTNGVVVQIVPWGKMDWMATNFYGQPAKDMKLRYLEYYVGEEETSLKDKYPRDHTVFKDPMALHKQGWQALAGIVMKQDVSVNLTRFRPFLLQALDKLQE

SEQ ID NO: 85390 - protein, 82 aa, Setaria italica
  Transcript Sequence Number=SeqID_19416
  Gene Ontology: Mol. function=binding
  Homolog annotation: Hit_ID=B9RGS4; Match level="QueryCoverage=100%, HitCoverage=8%, E-value=2e-17, Identity=51%"; Hit description =Transportin-3, putative
EVRMYALSMVADTILQDESSFDFSMIMHFVNILSSRTPVELDGSLFLVYKSFGDVIGSYSKWLSSCQSNIKPLLLFCASGIS

SEQ ID NO: 85391 - protein, 57 aa, Setaria italica
  Transcript Sequence Number=SeqID_19417
LATCSAEHCYLSLIARRHDRRGLRIYVHKLGPCCCAVHGARCLRLLRLLPSWGRRPT

SEQ ID NO: 85392 - protein, 80 aa, Setaria italica
  Transcript Sequence Number=SeqID_19418
  Gene Ontology: Cellular component=exocyst
GNLSSALASSRRCVRLLALAARANAHLQAGNHGLYLALRAVDAIDRDLASGPEPLPLPTLRRMLLSVVPAVRAHAEREIS

SEQ ID NO: 85393 - protein, 295 aa, Setaria italica
  Transcript Sequence Number=SeqID_19419
  Gene Ontology: Mol. function=binding; Cellular component=mitochondrion
  Homolog annotation: Hit_ID=Q7XBT9; Match level="QueryCoverage=100%, HitCoverage=46%, E-value=1e-101, Identity=60%"; Hit description =Pentatricopeptide, putative, expressed
  Pfam annotation: Domain name=PPR; Domain location=165-199; Score =39.3; E_value=1.5e-08; Accession=PF01535.12; Description=PPR repeat
  Pfam annotation: Domain name=PPR; Domain location=200-234; Score=8.9; E_value=0.8; Accession=PF01535.12; Description=PPR repeat
  Pfam annotation: Domain name=PPR; Domain location=235-269; Score=9.8; E_value=0.62; Accession=PF01535.12; Description=PPR repeat
  Pfam annotation: Domain name=PPR; Domain location=25-59; Score=35.2; E_value=2.7e-07; Accession=PF01535.12; Description=PPR repeat
  Pfam annotation: Domain name=PPR; Domain location=60-94; Score=37.9; E_value=4e-08; Accession=PF01535.12; Description=PPR repeat
  Pfam annotation: Domain name=PPR; Domain location=95-129; Score=31.6; E_value=3.1e-06; Accession=PF01535.12; Description=PPR repeat
  Pfam module annotation: Pfam domain module=PPR::PPR::PPR::PPR::PPR::PP R; Domain location=165-199::200-234::235-269::25-59::60-94::95-129
KVGTMSELRRLLSFAHVSGCQLTSAMWTCMIARLCREGRLDDAYRILAKMVGSGSPPTVITYTPLLKGFLRAGMHDLASELLGSMVSAGCSPDIVMYNVLMDCMVKARRYDDALDIYMQIHGRQIQPDAYTLSSLVRVLQLSSYERLLPRIPSLIRHSDTSYDLVVCNSVLSALCKSGFPTDAIQFYFDMIEKNIRPDSYTYVSLLHSLCQLEMVNHAINFYRSTAMRDPESNSYVHATILCILVRQGRNLMALRILREAVRENCALDAVCYTTVLHGLFQARLVEEACRLFDQM

SEQ ID NO: 85394 - protein, 80 aa, Setaria italica
  Transcript Sequence Number=SeqID_19420
  Gene Ontology: Mol. function=diacylglycerol kinase activity; Cellular component=plasma membrane; Biological process=activation of protein kinase C activity
  Homolog annotation: Hit_ID=Q9LRB0; Match level="QueryCoverage=83%, HitCoverage=8%, E-value=3e-25, Identity=80%"; Hit description =Sphingoid long-chain bases kinase 1
CSASVPIGIIPAGSDNSLVWTVLGVKDPISAALSIVRGGLTPIDVFSVEWIQSGIMHYGTTVSYFGFVSDGNIFNTSDHF

SEQ ID NO: 85395 - protein, 82 aa, Setaria italica
  misc_feature (40)..(40): Xaa can be any naturally occurring amino acid
  Transcript Sequence Number=SeqID_19421
  Gene Ontology: Mol. function=diacylglycerol kinase activity; Cellular component=plasma membrane; Biological process=activation of protein kinase C activity
  Homolog annotation: Hit_ID=Q5KR50; Match level="QueryCoverage=74%, HitCoverage=7%, E-value=5e-18, Identity=68%"; Hit description =Sphingosine kinase
PQLAGFKMEVIKTTHAGHAKSLVSTIDFSTCPDGICNFTXVCVGGDGIVNEVLNGLLCRDDQNVSASVPIDNAADIGSLTPK

SEQ ID NO: 85396 - protein, 758 aa, Setaria italica
  Transcript Sequence Number=SeqID_19422
  Gene Ontology: Mol. function=diacylglycerol kinase activity; Cellular component=plasma membrane; Biological process=activation of protein kinase C activity
  Homolog annotation: Hit_ID=Q9LRB0; Match level="QueryCoverage=94%, HitCoverage=94%, E-value=0.0, Identity=54%"; Hit description =Sphingoid long-chain bases kinase 1
  Pfam annotation: Domain name=DAGK_cat; Domain location=235-368; Score= 143.9; E_value=5.1e-40; Accession=PF00781.16; Description =Diacylglycerol kinase catalytic domain
KSEMQKSDHHEQKLTSPRGLIHKILRRTNSRRSPTAAEQQTSPVSPETSNAIFSKQKDPDDVINDPEKASTHSIRIEDEKSDLLGYEVYSGKLTLDNRARSASSEQSGSGSSGNCFDARLSTEALIWGSNVLKLEDIVSVSYNSGLRYFTVHSCPLEKRSSGLSCFMKPRRTQKDLKFLSPSPHEAFRWVNSFADQQCYVNLLPHPMASSKKHSSELIPFDAMLDPYVKSRSPPRILVILNPRSGHGRSSKVFHGKVEPIFKLAGFKMEVIKTTHAGHAKSLVSTIDFSTCPDGIVCVGGDGIVNEVLNGLLCRDDQNVSASVPIGIIPAGSDNSLVWTVLGVKDPISAALSIVRGGLTPIDVFSVEWIQSGIMHYGTTVSYFGFVSDVLALSEKYQKRFGPLRYFVAGFLKFLCLPKYSFEVEYLPISDANGAEHKILVGQEKVDASDLYDDVVRRSRAECLPRASSLSSIDSIMSTGIMSGAELEVCSPRANNEPSELVRALDPKSKRLSLGRASTFKEPEEVLHPQSHGTSTPSWRRSKSKSRTEKAWPGLTSTNDAKSSKVNTAHDKEDTSSTISDPGPVWDSGPKWDAEPKWDNQPNWEPETSIELHSPQEDIELGLTKELVPSLDERWTVRKGRYLGVLVCNHSCKTVQSLSSQVVAPKAEYDDNCLDLLLVGGSGRLRLLRFFVLLQFGKHISLPNVEYVKVKSVRLKAGPNTHDGCGIDGELLHVKGQVRCSLLPQQCQLIGRPAKNPVQ

SEQ ID NO: 85397 - protein, 358 aa, Setaria italica
  misc_feature (223)..(223): Xaa can be any naturally occurring amino acid
  Transcript Sequence Number=SeqID_19423
  Gene Ontology: Mol. function=protein tyrosine phosphatase activity; Cellular component=microtubule; Biological process=protein amino acid dephosphorylation
  Homolog annotation: Hit_ID=B6TAK5; Match level="QueryCoverage=83%, HitCoverage=84%, E-value=1e-131, Identity=76%"; Hit description =Receptor-type tyrosine-protein phosphatase S
  Pfam annotation: Domain name=Y_phosphatase; Domain location=113-348; Score=311.6; E_value=1.6e-90; Accession=PF00102.19; Description =Protein-tyrosine phosphatase
  Subcellular localization annotation: CTP_CleavageSite=22; ConfidenceScore=5.54e-01
MASRASTASGGGGGGGVLAKVRAAASLSSRSQPRQELGSSSRAPAPGAAFDPFDVDADPPSQLELTPEQVGHCSDALAHFEKRKRRSDLSEEFGSLSDMGLMKRISVAHYPVNREKNRYIDVLPFDDTGVKLKSTTTSLTSNNDYINASFIKATEGNRRVATFICTQGPLVNTFEDFWEMVYQYQCPAIVMVTQFDSVKCDKYLPLHNGRGAYGKYNVKIMKXRKDNHQLWLRNVQVQNKESGKVHSVLHIEYPDWPDHGVPTNTDAVRQIWKRLHHIPTEHPIVVHCSAGIGRTGTYITIHTAIERILLGDKRSYDIVETVKNFRSQRPGMVQTEQQYKFCYQVIADELKYLLNSDH

SEQ ID NO: 85398 - protein, 62 aa, Setaria italica
  Transcript Sequence Number=SeqID_19424
HGYPTPLIDSLTTIVNPVTRKWSRQEPSRTPVDVCDQIRAADGQSPAEQHCFFFFSHAPFLS

SEQ ID NO: 85399 - protein, 79 aa, Setaria italica
  Transcript Sequence Number=SeqID_19425
FLRTNSQPTFRYEHSAPGIEFEFESTDGEFELHARTGDRYRKFGATTFICTYIYITIHRHVPAELTDPSRTDRSATATA

SEQ ID NO: 85400 - protein, 146 aa, Setaria italica
  Transcript Sequence Number=SeqID_19426
  Gene Ontology: Mol. function=racemase and epimerase activity, acting on amino acids and derivatives; Cellular component=chloroplast; Biological process=metabolic process
  Homolog annotation: Hit_ID=B6TUV7; Match level="QueryCoverage=98%, HitCoverage=44%, E-value=3e-57, Identity=73%"; Hit description =Asp/Glu racemase
  Subcellular localization annotation: CTP_CleavageSite=33; ConfidenceScore=5.50e-01
DPSEPKNLDASSSASRSGPYSATCHPSGTAGVMGASSTSSLRFLEKFVCWSTRDGEEAPPFVICNDPFIKKELLSSGNLLTSDSSITLGKLRQKRLFLEQSGACCIVMPCQFLHAWHDEISQGCSVPFLHIGDCVAKELKAASLTL

SEQ ID NO: 85401 - protein, 102 aa, Setaria italica
  Transcript Sequence Number=SeqID_19427
RGIDGTQKSVSEPVAIGDGVGRWRRIDAVAIWDGVGRWRQRGSKRGEAALRERSEEKPGRIQEPRIASNFREMFVGGIYQSIVGRSIFPHRLLTLTDGANSV

SEQ ID NO: 85402 - protein, 45 aa, Setaria italica
  Transcript Sequence Number=SeqID_19428
WIAFSRNLLFGSSHVYGVWTIGLHDLIVSEVMSNSWVKKVGGRSA

SEQ ID NO: 85403 - protein, 611 aa, Setaria italica
  Transcript Sequence Number=SeqID_19429
  Gene Ontology: Mol. function=protein serine/threonine kinase activity; Biological process=protein amino acid phosphorylation
  Homolog annotation: Hit_ID=B6UH40; Match level="QueryCoverage=99%, HitCoverage=99%, E-value=0.0, Identity=87%"; Hit description=WNK6
  Pfam annotation: Domain name=Pkinase; Domain location=25-282; Score =188.9; E_value=1.4e-53; Accession=PF00069.17; Description=Protein kinase domain
  Pfam annotation: Domain name=Pkinase_Tyr; Domain location=25-280; Score=38.4; E_value=2.8e-16; Accession=PF07714.9; Description =Protein tyrosine kinase
  Pfam module annotation: Pfam domain module=Pkinase::Pkinase_Tyr; Domain location=25-282::25-280
MEVFGGGDEVLDAEYAEVDPTGRYMRYNVILGRGAFKTVYKAFDEVEGIEVAWNQINIDEVMQCPDNLDRLYTEVHLLKSLKHGNVMKFYYSWIDDHNKTINVITELFTSGSLRHYRQKHPRVNLKAIKNWARQILHGLDYLHSHQPPIIHRDLKCDNIFVNGNHGEVKIGDLGLATVMQTTRARSVIGTPEFMAPELYDESYDELVDIYSFGMCLLEIFTLEYPYSECTNPAQIFKKVSTGVKPAALAKIADPQVKQFIEKCLVRASERSSAKQLLQDPFLCPDTTHGPASTKFSSPAPKAVDIPLLSLQMDVDTCESTSASSGKENGCVAPHTPVLEFTRTNKNTELKLKGEKLDNNSVSLVLRIADLSGHARNIHFLFYLDSDTAMSVAAEMVEQLELADCDVTFIADFIDLLVANLVPGWRPVNDAAPNLYVCRQSESELVITSHQELSELVPDYALVDGMMHPKDVNVSSNGYLDSVSSATNLGGSQGSEGSVISVQLPGSSKSVSDYGAEDYVTMDCGGYKEGINKLEFSHVLGDGSRSIFHIDQASPCLELASSGSSISNADNQDVLNGELVLIEAQYKHLVDELTRMREEAIEGARKKWLPDK

SEQ ID NO: 85404 - protein, 129 aa, Setaria italica
  Transcript Sequence Number=SeqID_19430
  Gene Ontology: Mol. function=catalytic activity; Cellular component =chloroplast
  Homolog annotation: Hit_ID=P42856; Match level="QueryCoverage=100%, HitCoverage=100%, E-value=2e-63, Identity=92%"; Hit description=14 kDa zinc-binding protein
  Pfam annotation: Domain name=HIT; Domain location=25-124; Score =170.8; E_value=3.9e-48; Accession=PF01230.15; Description=HIT domain
MSSEKEAALAAVPNDSPTIFDKIIKKEIPSTVVYEDEKVLAFRDINPQAPTHILIIPKVKDGLTGLSKAEERHVEILGYLLYVAKVIAKQEGLEDGYRVVINDGPKGCQSVYHIHVHLLGGRQMNWPAG

SEQ ID NO: 85405 - protein, 66 aa, Setaria italica
  Transcript Sequence Number=SeqID_19431
  Gene Ontology: Cellular component=membrane
  Homolog annotation: Hit_ID=B6TKU2; Match level="QueryCoverage=96%, HitCoverage=41%, E-value=1e-19, Identity=76%"; Hit description =Protein kinase
  Pfam annotation: Domain name=Tmemb_14; Domain location=1-61; Score= -0.3; E_value=0.001; Accession=PF03647.5; Description=Transmembrane proteins 14C
MAYYLMQTPETKAAGDAVGFGSAFLFACVFGIRLYNSRKLVPSGLLLALSLGALGVFYSAYLQDKV

SEQ ID NO: 85406 - protein, 106 aa, Setaria italica
  misc_feature (82)..(82): Xaa can be any naturally occurring amino acid
  Transcript Sequence Number=SeqID_19432
LRYSTMKLHFLSEYLRGNLCNALVKHDSSVNKQMGQIIVSEAVSEYAEVNSSSSSQSVSDFLCNASIPMNIFEIACQRILNXLPSNILHATFSRYKDMLACSAEKS

SEQ ID NO: 85407 - protein, 330 aa, Setaria italica
  Transcript Sequence Number=SeqID_19433
  Gene Ontology: Mol. function=protein binding
  Homolog annotation: Hit_ID=B6TM43; Match level="QueryCoverage=100%, HitCoverage=100%, E-value=1e-162, Identity=82%"; Hit description =BTB/POZ domain containing protein
  Pfam annotation: Domain name=BTB; Domain location=155-263; Score =94.3; E_value=4.3e-25; Accession=PF00651.23; Description=BTBPOZ domain
MTDGARVEAAPRLAQWRVDALPCYTYRKSLPFRIGLWNWYLSVERNNKQTCVKLFAENSNSAKNGHSAPIASFVTKLLISLPPNQQTIIHPGIFDKQLKHEGFVWAIDSSVTGRFVIEIEFLDLKIADPSGGEPASIWASQQIKQSSDNTALSALARMLHDDILTDITINAADGSVRAHRAILAARSPVFRSMFSHDLREKELSAVDIPDMSLDACHAFLNYIYGDLRSEEFLANRLALLRAADKYDMADLKETCHESLLEDIDTGNVLERLQTAHLYRLPRLKGGCLRFLVDFRKVYEMHDDLSAFLQTAERDLVAEVFHGVLAAWSGR

SEQ ID NO: 85408 - protein, 89 aa, Setaria italica
  Transcript Sequence Number=SeqID_19434
MSDESPPPAQAAEKSQPAEQATGGWGGWGLNIFSEISRNAVEVAKSAIADIQQPPEQDTGTRQPGEKDKGEGNPGGRRRRERRKAALEK

SEQ ID NO: 85409 - protein, 59 aa, Setaria italica
  Transcript Sequence Number=SeqID_19435
DPPGYSSWSRGSSDLGINYGIMIELHNKLVSPLCHILTCKQNSHNSNADTARRNQRCSF

SEQ ID NO: 85410 - protein, 95 aa, Setaria italica
  Transcript Sequence Number=SeqID_19436
  Gene Ontology: Mol. function=voltage-gated anion channel activity; Cellular component=mitochondrial outer membrane; Biological process =anion transport
  Homolog annotation: Hit_ID=B6TEP3; Match level="QueryCoverage=100%, HitCoverage=28%, E-value=4e-51, Identity=98%"; Hit description =Mitochondrial import receptor subunit TOM40
LMLIGRVMTDGRLNARVKCDLTENLTLKVNAQLTQEAHYSQGMFNFDYKGSDYRAQFQIGNNAFYGANYIQSVTPNLSMGTEMFWLGHQRKSGIG

SEQ ID NO: 85411 - protein, 333 aa, Setaria italica
  Transcript Sequence Number=SeqID_19437
  Gene Ontology: Mol. function=voltage-gated anion channel activity; Cellular component=mitochondrial outer membrane; Biological process =anion transport
  Homolog annotation: Hit_ID=B6TEP3; Match level="QueryCoverage=88%, HitCoverage=88%, E-value=1e-170, Identity=96%"; Hit description =Mitochondrial import receptor subunit TOM40
  Pfam annotation: Domain name=Porin_3; Domain location=54-326; Score =286.3; E_value=6.7e-83; Accession=PF01459.14; Description=Eukaryotic porin
MGSAASAAVPPPPPPAQAQAGAPPYGPGLAGILPPKPDGEEKKVEKVDYLNLPCPVPFEEIQREALMSLKPELFEGLRFDFTKGLNQKFSLSHSVLMGSIEVPAQSTETIKVPTAHYEFGANFLDPKLMLIGRVMTDGRLNARVKCDLTENLTLKVNAQLTQEAHYSQGMFNFDYKGSDYRAQFQIGNNAFYGANYIQSVTPNLSMGTEMFWLGHQRKSGIGFASRYNTDKMVGTLQVASTGIVALSYVQKVSEKVSLASDFMYNHMSKDVTTSFGYDYLLRQCRLRGKIDSNGVVAAYLEERLNMGVNFLLSAEIDHCKKNYKFGFGMTVGE

SEQ ID NO: 85412 - protein, 146 aa, Setaria italica
  misc_feature (90)..(90): Xaa can be any naturally occurring amino acid
  Transcript Sequence Number=SeqID_19438
  Gene Ontology: Mol. function=transferase activity, transferring glycosyl groups
  Homolog annotation: Hit_ID=B9I693; Match level="QueryCoverage=99%, HitCoverage=26%, E-value=1e-68, Identity=79%"; Hit description =Glycosyltransferase, CAZy family GT8
  Pfam annotation: Domain name=Glyco_transf_8; Domain location=3-140; Score=-22.0; E_value=0.00013; Accession=PF01501.12; Description =Glycosyl transferase family 8
SELFTTNLNGNVMGAVETCMETFHRFHKYLNHSHPLIRAHFDPDACGWAFGMNVLDLIEWRNKNVTGIYHYWQERNADHTLWKLGSLPPXGLLAFYGLVEALDPKWHVLGLGYTTVDPATIKEGAVLHYNGNMKPWLKIGMEKYKG

SEQ ID NO: 85413 - protein, 408 aa, Setaria italica
  misc_feature (313)..(313): Xaa can be any naturally occurring amino acid
  Transcript Sequence Number=SeqID_19439
  Gene Ontology: Mol. function=transferase activity, transferring glycosyl groups; Cellular component=integral to membrane
  Homolog annotation: Hit_ID=B9I693; Match level="QueryCoverage=95%, HitCoverage=80%, E-value=1e-150, Identity=61%"; Hit description =Glycosyltransferase, CAZy family GT8
  Pfam annotation: Domain name=Glyco_transf_8; Domain location=110-383; Score=217.9; E_value=2.7e-62; Accession=PF01501.12; Description =Glycosyl transferase family 8
LYTTDLQKEGPNKPSKFAAELSAQVRRAQSILAHAAAHGGKVMEQEAEKAIRDMSVLLFQAQQLRYDSGITIMKLKGQIQSLEEKSKAEAEKSTKYGQIAAEELPKGLYCLGVRLTMEWFKSPELQRKFSDRSPAVQRNLRDNSLYHFCVFSDNILAVSVVVNSTAINSKHPEKIVFHLVTDELNYAPMRAWFAMNDYRGVTVEIQKVEDFTWLNASYVPVLKQLQNAATQKFYFSGSGSRGTPIKFRNPKYLSMLNHLRFYIPEIYPELQKVVFLDDDIVVQKDLSELFTTNLNGNVMGAVETCMETFHRLXHYWQERNADHTLWKLGSLPPGLLAFYGLVEALDPKWHVLGLGYTTVDPATIKEGAVLHYNGNMKPWLKIGMEKYKGFWDSYVDYSHPLIQQCFMR

SEQ ID NO: 85414 - protein, 153 aa, Setaria italica
  misc_feature (34)..(34): Xaa can be any naturally occurring amino acid
  misc_feature (82)..(82): Xaa can be any naturally occurring amino acid
  misc_feature (96)..(96): Xaa can be any naturally occurring amino acid
  Transcript Sequence Number=SeqID_19440
  Gene Ontology: Mol. function=protein transporter activity; Cellular component=nuclear pore; Biological process=protein import into nucleus, docking
  Homolog annotation: Hit_ID=Q84NP8; Match level="QueryCoverage=100%, HitCoverage=20%, E-value=9e-71, Identity=68%"; Hit description =Putative Ran binding protein 11-like
CAEALFIVIFEKYREDAAYTAAGHVYYELSNYLXFNEWFHGSLSIEVSNRHPNMRIIRRKIALLLGQWISEIKGDTRKLVYXALVGLLQDNDIAVXDLFECLPTCWTMSFKLIEDVQEFDSKVQVLNFISVLLEHAGDKIIPFASQLSTIFPR

SEQ ID NO: 85415 - protein, 168 aa, Setaria italica
  misc_feature (125)..(125): Xaa can be any naturally occurring amino acid
  misc_feature (140)..(140): Xaa can be any naturally occurring amino acid
  misc_feature (146)..(146): Xaa can be any naturally occurring amino acid
  misc_feature (167)..(167): Xaa can be any naturally occurring amino acid
  Transcript Sequence Number=SeqID_19441
  Gene Ontology: Mol. function=binding; Cellular component=nuclear pore; Biological process=protein import into nucleus, docking
  Homolog annotation: Hit_ID=Q84NP8; Match level="QueryCoverage=97%, HitCoverage=13%, E-value=2e-63, Identity=76%"; Hit description =Putative Ran binding protein 11-like
  Pfam annotation: Domain name=HEAT; Domain location=4-40; Score=23.0; E_value=0.0012; Accession=PF02985.14; Description=HEAT repeat
TKGRTTRKLVYHALVGLLQDNDIAVRLAACSSLCYLFQESSFSELDLFECLPTCWTMSFKLIEDVQEFDSKVQVLNFISVLLEHAGDKIIPFASQLSQFFQMIWDESAGESLLQIQLLTALRTFXSSLGFQSPLSYHVLXPILQSXINIDSPDALNLLEDSVLLWEXT

SEQ ID NO: 85416 - protein, 198 aa, Setaria italica
  Transcript Sequence Number=SeqID_19442
  Gene Ontology: Mol. function=protein transporter activity; Cellular component=nuclear pore; Biological process=protein import into nucleus, docking
  Homolog annotation: Hit_ID=Q84NP8; Match level="QueryCoverage=97%, HitCoverage=20%, E-value=5e-97, Identity=82%"; Hit description =Putative Ran binding protein 11-like
PGDRVVLLCNILVRRYFIYTSKDLEEWSENPESFHHEQNLVQWTEKKRPCAEALFIVIFEKYRELLAPVVVSVLREAMAVSPPQETDVTAGMLLKDAAYTAAGHVYYELSNYLNFNEWFHGSLSIEVSNRHPNMRIIRRKIALLLGQWISEIKGDTRKLVYHALVGLLQDNDIAVRVCSTSASVIPWRYECVPVRLLF

SEQ ID NO: 85417 - protein, 382 aa, Setaria italica
  misc_feature (27)..(27): Xaa can be any naturally occurring amino acid
  Transcript Sequence Number=SeqID_19443
  Gene Ontology: Mol. function=catalytic activity; Biological process =metabolic process
  Homolog annotation: Hit_ID=B6SJX5; Match level="QueryCoverage=100%, HitCoverage=100%, E-value=1e-179, Identity=81%"; Hit description =Genetic modifier
  Pfam annotation: Domain name=Hydrolase; Domain location=131-319; Score=80.2; E_value=7.4e-21; Accession=PF00702.18; Description =haloacid dehalogenase-like hydrolase
  Subcellular localization annotation: CTP_CleavageSite=70; ConfidenceScore=5.50e-01
MVVDTVSASTSIIAPHLFDQRSRGPHXPLRRTFHVVACRPLPTAFAGRRLVARGTRQPSPRLADWSVKALAMGVTKEASPRREYRGIPGDGGDMGDVGVTNPAPSLPPRNRADDPKLHNPLLRLERMGCGWLGVIFEWEGVIVEDDAELERQAWLTLSQEEGKSPPPAFVLKRVEGMKNEQAISEVLCWSRDPSELRRLASRKEEIHSSLRGGSFYQMRNGSREFMSTLANYKIPIAVATTRPRKVIEEAIEAVGARSFFDAVVAAEDVYRGKPDPEMFLYAAQLLSFIPERCIVFGNSNSTVEAAHDARMKCVAVASRHKIYELSAADLVVKQLDELSVVDLKNLTDIESPEFGMEPEPEMEEEEEVSRPSSSVGVDDIFW

SEQ ID NO: 85418 - protein, 73 aa, Setaria italica
  Transcript Sequence Number=SeqID_19444
  Gene Ontology: Mol. function=phosphoglycerate kinase activity; Cellular component=chloroplast; Biological process=reductive pentose- phosphate cycle
  Homolog annotation: Hit_ID=B6STH5; Match level="QueryCoverage=86%, HitCoverage=13%, E-value=9e-24, Identity=88%"; Hit description =Phosphoglycerate kinase
VPTWKVVISYFWVGWLLIFTFYKAQGLSVGASLVEEDKLELATSLLAKAKEKGVSLMLPTDVVIADKFAPDAN

SEQ ID NO: 85419 - protein, 121 aa, Setaria italica
  misc_feature (14)..(14): Xaa can be any naturally occurring amino acid
  misc_feature (23)..(23): Xaa can be any naturally occurring amino acid
  Transcript Sequence Number=SeqID_19445
  Gene Ontology: Mol. function=phosphoglycerate kinase activity; Cellular component=chloroplast; Biological process=glycolysis
  Homolog annotation: Hit_ID=B6STH5; Match level="QueryCoverage=95%, HitCoverage=23%, E-value=2e-51, Identity=90%"; Hit description =Phosphoglycerate kinase
  Pfam annotation: Domain name=PGK; Domain location=1-121; Score= -214.0; E_value=1e-06; Accession=PF00162.11; Description =Phosphoglycerate kinase
SPYLESSDILLLGXGGMIFTFYXKHKDVSVGASLVEEDKLELATSLLAKAKEKGVSLMLPTDVVIADKFAPDANSQIVPASAIPDGWMGLDIGPDSVASFNAALDTTQTVIWNGPMGCFCN

SEQ ID NO: 85420 - protein, 203 aa, Setaria italica
  Transcript Sequence Number=SeqID_19446
  Gene Ontology: Mol. function=phosphoglycerate kinase activity; Cellular component=chloroplast; Biological process=reductive pentose- phosphate cycle
  Homolog annotation: Hit_ID=A2Y650; Match level="QueryCoverage=100%, HitCoverage=71%, E-value=1e-103, Identity=92%"; Hit description =Phosphoglycerate kinase
  Pfam annotation: Domain name=PGK; Domain location=1-203; Score=140.8; E_value=4.2e-39; Accession=PF00162.11; Description=Phosphoglycerate kinase
KSVGDLAAADLEGKRVLVRADLNVPLDDRQNITDDTRVRAAIPTIKHLVTNGAKVILCSHLGRPKGVTAKFSLAPLVPRLSELLGIQVQKADDVIGPEVEKLVSELPNGSILLLENVRFYKEEEKNDPEFAKKLASLADLYVNDAFGTAHRAHASTEGVTKFLKPSVAGFLLQKELDYLVGAVSNPKPPFAAIVGGSKVSSKI

SEQ ID NO: 85421 - protein, 366 aa, Setaria italica
  Transcript Sequence Number=SeqID_19447
  Gene Ontology: Mol. function=oxidoreductase activity; Cellular component=extracellular space; Biological process=oxidation reduction
  Homolog annotation: Hit_ID=Q0QWI2; Match level="QueryCoverage=100%, HitCoverage=100%, E-value=0.0, Identity=89%"; Hit description =Sorbitol dehydrogenase
  Pfam annotation: Domain name=ADH_N; Domain location=42-153; Score =166.4; E_value=8.6e-47; Accession=PF08240.4; Description=Alcohol dehydrogenase GroES-like doma
  Pfam annotation: Domain name=ADH_zinc_N; Domain location=182-326; Score=126.2; E_value=1e-34; Accession=PF00107.18; Description=Zinc -binding dehydrogenase
  Pfam annotation: Domain name=Methyltransf_11; Domain location=187 -285; Score=2.5; E_value=0.054; Accession=PF08241.4; Description =Methyltransferase domain
  Pfam module annotation: Pfam domain module=ADH_N::ADH_zinc _N::Methyltransf_11; Domain location=42-153::182-326::187-285
MGKGCQGSGVAAAGEVEENMAAWLVAKNTLKIMPFKLPPLGPHDVRVRMKAVGICGSDVHYLREMRIAHFVVKEPMVIGHECAGVIEEVGAGVKHLSAGDRVALEPGVSCWRCRHCRGGRYNLCEDMKFFATPPVHGSLAHQIVHPADLCFKLPDSVSLEEGAMCEPLSVGVHACRRAGVGPETAVLVMGAGPIGLVALLAARAFGAPRVAIVDVDEHRLSVARSLGADAAVRVSPRPDDVGEEVERIRAALGGAEIDVTLDCAGFSKTVATALGATRPGGKVCLVGMGHNEMTVPLTSAAVREVDVVGVFRYKDTWPLCIEFLRSGKVDVKPLITHRFGFSQREVEEAFEVSARGRDAIKVMFNL

SEQ ID NO: 85422 - protein, 35 aa, Setaria italica
  Transcript Sequence Number=SeqID_19448
MSQFHPTQHAGENDFQMWQQQMMFKQLQEFQRQQQ

SEQ ID NO: 85423 - protein, 122 aa, Setaria italica
  misc_feature (103)..(103): Xaa can be any naturally occurring amino acid
  Transcript Sequence Number=SeqID_19449
  Gene Ontology: Mol. function=nucleic acid binding
  Homolog annotation: Hit_ID=Q8L414; Match level="QueryCoverage=98%, HitCoverage=25%, E-value=7e-56, Identity=75%"; Hit description =Transcription factor R18-like protein
  Pfam annotation: Domain name=SAP; Domain location=3-37; Score=12.9; E_ value=0.065; Accession=PF02037.19; Description=SAP domain
RSLEGIKLVECKAYLRKNGLSQVGDLATCVDRIVLHWRFKDGDPERIYPRSSFCINCKGDVCRGDAVLFKQKVYEKSGKRHAKCIGKRIVAGKVIKESYGKEXQQHTFTIQVFWSKRFGENL

SEQ ID NO: 85424 - protein, 51 aa, Setaria italica
  Transcript Sequence Number=SeqID_19450
VCRLFLCIIDHLASEPFIILSFLHEEMNMLQTVKRVTVRLLSTHASSDLKR

SEQ ID NO: 85425 - protein, 187 aa, Setaria italica
  Transcript Sequence Number=SeqID_19451
  Gene Ontology: Mol. function=protein dimerization activity; Cellular component=nucleus; Biological process=regulation of transcription, DNA-dependent
  Homolog annotation: Hit_ID=B6SJA9; Match level="QueryCoverage=100%, HitCoverage=100%, E-value=3e-76, Identity=80%"; Hit description =IAA24-auxin-responsive Aux/IAA family member
  Pfam annotation: Domain name=AUX_IAA; Domain location=7-187; Score =251.2; E_value=2.5e-72; Accession=PF02309.8; Description=AUXIAA family
MEIDADNLSATELRLGLPGTSSSDDRPKKASPSVGAKRALDDTRSEDSGTSPAATGDDHDAAAPAKAQVVGWPPVRAYRKNTFQAAAVKKAEQQQQGGGLYVKVSMDGAPYLRKVDLRMYKGYRELREALDALFTKSFAAAEGGGDHQHALAYEDKDGDLMLVGDVPWDMFISSCKKLRIMKGSEAR

SEQ ID NO: 85426 - protein, 217 aa, Setaria italica
  Transcript Sequence Number=SeqID_19452
  Gene Ontology: Mol. function=protein dimerization activity; Cellular component=nucleus; Biological process=regulation of transcription, DNA-dependent
  Homolog annotation: Hit_ID=B6SMA4; Match level="QueryCoverage=100%, HitCoverage=100%, E-value=5e-56, Identity=55%"; Hit description =IAA12-auxin-responsive Aux/IAA family member
  Pfam annotation: Domain name=AUX_IAA; Domain location=7-216; Score =254.3; E_value=2.9e-73; Accession=PF02309.8; Description=AUXIAA family
METVVGDLMATELRLGLPGTADDSQPQMMKAAVPSAPSTPRGKKRTTTDAVEDAAAAEEASKHDAEAAPPAAKAPVVGWPPVRSYRKSCFKASSKQISKATKEEAAPASSNAAAPSAAASTTTGSFVKVSMDGAPYLRKVDLRMYKGYRELREALEAMFVSSNSGGANLSEFAVTYEDKDGDLMLVGDVPFEMFTSTCKKLRIMKRSEATGLGSARQ

SEQ ID NO: 85427 - protein, 209 aa, Setaria italica
  Transcript Sequence Number=SeqID_19453
  Gene Ontology: Mol. function=protein dimerization activity; Cellular component=nucleus; Biological process=regulation of transcription, DNA-dependent
  Homolog annotation: Hit_ID=B6SI38; Match level="QueryCoverage=100%, HitCoverage=100%, E-value=3e-67, Identity=68%"; Hit description =IAA31-auxin-responsive Aux/IAA family member
  Pfam annotation: Domain name=AUX_IAA; Domain location=12-206; Score =274.8; E_value=1.9e-79; Accession=PF02309.8; Description=AUXIAA family
MEVVAADVDSCLKATELRLGLPGTEEKALPTPPSTPRGKKREGNTGAEEAAKKRDGETAPPAAKAQVVGWPPVRSYRKSCFQQSSSSATKTKPAPAPEEKAPPAAGAGSALFVKVSMDGAPYLRKVDLKMYKGYRELREALEAMFLGFSGGAADAPAVNPSDFAVTYEDKDGDLMLVGDVPFDMFISTCKRLRIMKGSEARGLGSVKNN

SEQ ID NO: 85428 - protein, 218 aa, Setaria italica
  misc_feature (129)..(129): Xaa can be any naturally occurring amino acid
  Transcript Sequence Number=SeqID_19454
  Gene Ontology: Mol. function=transcription factor activity; Cellular component=nucleus; Biological process=regulation of transcription, DNA-dependent
  Homolog annotation: Hit_ID=Q6SA75; Match level="QueryCoverage=77%, HitCoverage=26%, E-value=8e-89, Identity=92%"; Hit description=ANT -like protein
  Pfam annotation: Domain name=AP2; Domain location=2-39; Score=9.8; E _value=0.28; Accession=PF00847.12; Description=AP2 domain
  Pfam annotation: Domain name=AP2; Domain location=81-133; Score=52.8; E_value=1.3e-12; Accession=PF00847.12; Description=AP2 domain
  Pfam module annotation: Pfam domain module=AP2::AP2; Domain location =2-39::81-133
SCKKEGQTRKGRQVYLGGYDMEEKAARAYDLAALKYWGPSTHINFPLEDYQEELEEMKNMTRQEYVAHLRRKSSGFSRGASMYRGVTRHHQHGRWQARIGRVSGNKDLYLGTFSTQEEAAEAYDVAAIXKFRGLNAVTNFDITRYDVDKIMASNTLLPGELARRKKDDEVAAIAPADGGAGGVTTAALAAAAHQAANGSAAAADTWKVAAALAAAEHG

SEQ ID NO: 85429 - protein, 86 aa, Setaria italica
  Transcript Sequence Number=SeqID_19455
  Subcellular localization annotation: CTP_CleavageSite=28; ConfidenceScore=5.04e-01
GALRSTAARALQGQRTTAPRRPDPLTARSAEDARGGGRVRRGETRVCGGGGRQRLRAGDARVAAAARRRGEQRRKLRCGGGGEWAR

SEQ ID NO: 85430 - protein, 143 aa, Setaria italica
  Transcript Sequence Number=SeqID_19456
  Gene Ontology: Mol. function=nucleic acid binding
  Homolog annotation: Hit_ID=Q6ZK57; Match level="QueryCoverage=99%, HitCoverage=22%, E-value=3e-37, Identity=58%"; Hit description=Zinc finger CCCH domain-containing protein 54
FENPETVSTILMRRNPHFICGSRVLVKPYREKSKCIERMHVDKMKPMHYCPTRFFEIDPDFYPDEYEASSRMVRKQLAEKRERLIELERKRFGGVRLKPLPHQFAYFDCSIEDVNPLNCLPADSKDADLIVPDSLEIVSRAKL

SEQ ID NO: 85431 - protein, 74 aa, Setaria italica
  Transcript Sequence Number=SeqID_19457
QLLPWGVSNCGFQHLSSLEYQLVWRISKCYKYPLKIIFSIHETLKKCLIFSGVNISMVLCSTSEEIFCCCESCR

SEQ ID NO: 85432 - protein, 105 aa, Setaria italica
  Transcript Sequence Number=SeqID_19458
  Gene Ontology: Mol. function=carbon-nitrogen ligase activity, with glutamine as amido-N-donor; Cellular component=chloroplast
  Homolog annotation: Hit_ID=Q01ML1; Match level="QueryCoverage=92%, HitCoverage=22%, E-value=4e-31, Identity=67%"; Hit description =H0613H07.2 protein
SNFSKSESPSVPALSAISYVVGCLQRSEFKANHAEWVNTVKPNLGPGIRERVHGAITSEAGPMEEFHVLRTEFKAALDALVKDDGILVIPTVPGSPPNCARSCCA

SEQ ID NO: 85433 - protein, 322 aa, Setaria italica
  misc_feature (6)..(6): Xaa can be any naturally occurring amino acid
  misc_feature (13)..(13): Xaa can be any naturally occurring amino acid
  misc_feature (309)..(309): Xaa can be any naturally occurring amino acid
  Transcript Sequence Number=SeqID_19459
  Gene Ontology: Mol. function=glycerophosphodiester phosphodiesterase activity; Cellular component=anchored to membrane; Biological process=glycerol metabolic process
  Homolog annotation: Hit_ID=Q9FZI0; Match level="QueryCoverage=99%, HitCoverage=29%, E-value=3e-91, Identity=51%"; Hit description =F1O19.6 protein
PAIVAXGGFSGLXPDSSPDAYGFVQYSSSPDTVLYCDVRLTKDEVGLCLPDIKMDNCTNIADIYAQGQKSYLVNGVPTSGWFSVDYNNTELGQVSLIQSIASRSPRFDSNFYPPLAVEDVRSKFKPPGIWLNVQHDRFYSQFNLSMRNYIISVSKRVVVNYISSPEVSFLTSVLGRVSKKTKLVFRYLDESTLEPSMNQTYGSMLLFLTFVKTFASGILVPKSYIWPTSADNYLQPHTSVVNDAHKAGLEIYAADFANDFMISYNYSYDPLAECLTFIDNGVFSVDGVLTDFPVTPSEAIGCFTNLNKXSNTDHGKPLIIPQ

SEQ ID NO: 85434 - protein, 48 aa, Setaria italica
  Transcript Sequence Number=SeqID_19460
  Gene Ontology: Cellular component=integral to membrane
  Homolog annotation: Hit_ID=B6UE85; Match level="QueryCoverage=100%, HitCoverage=18%, E-value=2e-18, Identity=91%"; Hit description =Transcription regulator
MDLLASLVAEERWLFPAFLVMYAAIYCVGQLVVFRRWAPRQRLDGASC

SEQ ID NO: 85435 - protein, 87 aa, Setaria italica
  Transcript Sequence Number=SeqID_19461
  Subcellular localization annotation: CTP_CleavageSite=67; ConfidenceScore=5.26e-01
RPSLAPYPIVPATRRATSGAADAPHLPGGHLARFRFPWAPLAVPSHIFGASSSAPLSSRTADTTESAAEHKQQASDPWRLRLSSPAG

SEQ ID NO: 85436 - protein, 219 aa, Setaria italica
  Transcript Sequence Number=SeqID_19462
  Homolog annotation: Hit_ID=B6TUW3; Match level="QueryCoverage=100%, HitCoverage=100%, E-value=2e-83, Identity=71%"; Hit description=VAMP protein SEC22
  Pfam annotation: Domain name=Hin1; Domain location=42-183; Score =159.2; E_value=1.3e-44; Accession=PF07320.5; Description=Harpin -induced protein 1 (Hin1)
MTVKDCGGHKGCECDRHRLYRKLCGALLAFVLLVLFVVLIVWLVLRPHKPRFYLQDLSVLCLNVTPPASTYLFTTMQATVAARNVNDRVGVYYDEVDVYAQYKDVAITVPTRLPVGYQGHGDQSVWSPFLQSMDSVQLPQPLAVALAQDETAGYVLIDVRVDGWVRWKVGSWISGHYHLRVNCPALLTVNEGKGSYGANTGGGTGYFRFQQAAACAVDV

SEQ ID NO: 85437 - protein, 115 aa, Setaria italica
  Transcript Sequence Number=SeqID_19463
LGTLSFLSNLHVCVGHLFLGKWKSCTRLVLTCYCFIDCGGAPFLPLLFIVVNMAFNIALLNLVKLSSALVASLTSTSAVPISIYILSLPLPYIPHGAELSTPFIIGAVVLLMGLI

SEQ ID NO: 85438 - protein, 77 aa, Setaria italica
  Transcript Sequence Number=SeqID_19464
  Subcellular localization annotation: CTP_CleavageSite=32; ConfidenceScore=5.18e-01
FIDCGGAPFLPLLFIVVNMAFNIALLNLVKLSSALVASLTSTSAELSTPFIIGAVVLLMGLILYNLPQLSLKQSKAD

SEQ ID NO: 85439 - protein, 310 aa, Setaria italica
  Transcript Sequence Number=SeqID_19465
  Gene Ontology: Cellular component=integral to membrane
  Homolog annotation: Hit_ID=Q9GSB0; Match level="QueryCoverage=76%, HitCoverage=54%, E-value=7e-09, Identity=23%"; Hit description =Putative transmembrane protein
AYPFFLAQLTTFGYVAVYFSILYARHRAGVVTRDMLALPKRRFVAIGLLEALGVASGMSAGAMLPGPAIPILSQSFLVWQLIFSAMLLGRTYTVRQIIGCLLVISGVILAVASGANEGQFLSGVQLIWPTLMITSSAFQAGASILKEAVFIDGAKRLKGKRPDIFVVNSFGSGFQALFVFLLLPFLSNLRGIKFAELPGYLNGGAECFLNVGESPIDCGGAPFLPLLFIVVNMAFNIALLNLVKLSSALVASLTSTSAVPISIYILSLPLPYIPHGAELSTPFIIGAVVLLMGLILYNLPELSLKQSKAD

SEQ ID NO: 85440 - protein, 175 aa, Setaria italica
  Transcript Sequence Number=SeqID_19466
  Gene Ontology: Mol. function=protein binding; Cellular component =clathrin adaptor complex; Biological process=intracellular protein transport
  Homolog annotation: Hit_ID=Q948F4; Match level="QueryCoverage=100%, HitCoverage=12%, E-value=1e-90, Identity=91%"; Hit description =Putative gamma-adaptin 1
MDTVEKIVEDFASDIAMSPFSSGTRLRDMIRAIRACKTAAEERAVVRRECAAIRTAISENEPQLRHRNMAKLMFIHMLGYPTHFAQMECLKLIAAAGFPEKRIGYLGLMLLLDERQEVLMLVTNSLKQDLNHSNQFIVGLALCALGNICSAEMARDLAPEVERLLQNRDPNTKKK

SEQ ID NO: 85441 - protein, 88 aa, Setaria italica
  Transcript Sequence Number=SeqID_19467
  Gene Ontology: Mol. function=nucleotide binding; Biological process =defense response
  Homolog annotation: Hit_ID=Q8LSK9; Match level="QueryCoverage=95%, HitCoverage=39%, E-value=1e-13, Identity=47%"; Hit description =Resistance gene analog (Fragment)
FVLVQRVGANCRGSPLAAKSLGVLLSDTNGQREQWESILSDMQILEGNRNTDIILASLQISYQHLPYHLKQCFALCSMYPPSLEFDKD

SEQ ID NO: 85442 - protein, 437 aa, Setaria italica
  Transcript Sequence Number=SeqID_19468
  Gene Ontology: Mol. function=homoserine dehydrogenase activity; Cellular component=chloroplast; Biological process=methionine biosynthetic process
  Homolog annotation: Hit_ID=P49079; Match level="QueryCoverage=99%, HitCoverage=47%, E-value=0.0, Identity=96%"; Hit description =Homoserine dehydrogenase
  Pfam annotation: Domain name=AA_kinase; Domain location=1-267; Score =156.7; E_value=6.9e-44; Accession=PF00696.20; Description=Amino acid kinase family
  Pfam annotation: Domain name=ACT; Domain location=305-366; Score =24.1; E_value=0.00057; Accession=PF01842.17; Description=ACT domain
  Pfam annotation: Domain name=ACT; Domain location=387-437; Score=8.9; E_value=0.97; Accession=PF01842.17; Description=ACT domain
  Pfam module annotation: Pfam domain module=AA_kinase::ACT::ACT; Domain location=1-267::305-366::387-437
FQNVADIVLRDPSERKLVVVSAMSKVTDMMYNLVNKAQSRDDSYITVLDEVFEKHMGTAKDLLAGEDLARFLSQLHADISNLKAMLRAIYIAGHATESFSDFVVGHGELWSAQMLSYAIKKSGTPCSWMDTREILVVNPSGSNQVDPDYLESEKRLEKWFARGPAETIIATGFIASTPDNIPTTLKRDGSDFSAAIIGSLVKARQVTIWTDVDGVFSADPRKVSEAVILSTLSYQEAWEMSYFGANVLHPRTIIPVMKYNIPIVIRNIFNTSAPGTMICQQPANENGDLDACVKAFATIDKLALVNVEGTGMAGVPGTASAIFGAVKDVGANVVMISQASSEHSVCFAVPEKEVASVSAALHVRFREALAAGRLSKVEVIHNCSILAAVGLRMASTPGVSATLFDALAKANINVRAIAQGCSEYNITVVLKQEDCVT

SEQ ID NO: 85443 - protein, 113 aa, Setaria italica
  Transcript Sequence Number=SeqID_19469
  Gene Ontology: Mol. function=nucleotide binding; Biological process =defense response
  Homolog annotation: Hit_ID=Q10I27; Match level="QueryCoverage=97%, HitCoverage=10%, E-value=3e-20, Identity=40%"; Hit description=NB -ARC domain containing protein, expressed
VVIQEHFYPRMWVCASSPVDDVRLTREILQAATDWKVDYDGILNFDRLQNLLASSVAGRRFLLILDDVWDDKEMGTWENGERWKKLLAPLQHGKQESRIIVTTRMKMVADMLG

SEQ ID NO: 85444 - protein, 109 aa, Setaria italica
  Transcript Sequence Number=SeqID_19470
MAYRRKQGAADDHRSSYPQESASSYSYTSFKTINEPKLGLWQTLASKAKGILDEDALAHKFEDFRKERPRSNSGSSSGDQAPQSRWSFENHWKTGEAAARNQGPEGLLY

SEQ ID NO: 85445 - protein, 103 aa, Setaria italica
  Transcript Sequence Number=SeqID_19471
  Gene Ontology: Mol. function=metal ion binding; Cellular component =integral to membrane
  Homolog annotation: Hit_ID=B9R8R6; Match level="QueryCoverage=88%, HitCoverage=13%, E-value=8e-36, Identity=72%"; Hit description=Zinc finger protein, putative
MARRHGWQLPAHTLQVVAITVYFLLCIAFYAFFSPFLGKDLYQYIAVGVYSFLALSVLILYVRCTAIDPADPGILISMDGTLIYKSEAHVDTQDEAGKSGLRN

SEQ ID NO: 85446 - protein, 132 aa, Setaria italica
  Transcript Sequence Number=SeqID_19472
  Gene Ontology: Mol. function=protein serine/threonine kinase activity; Cellular component=extracellular region; Biological process=protein amino acid phosphorylation
  Homolog annotation: Hit_ID=B9T487; Match level="QueryCoverage=78%, HitCoverage=37%, E-value=1e-13, Identity=41%"; Hit description=DUF26 domain-containing protein 1, putative
  Pfam annotation: Domain name=DUF26; Domain location=27-81; Score =55.5; E_value=2e-13; Accession=PF01657.9; Description=Domain of unknown function DUF26
LSSLPAAAASTSGFAENATGAAPGQQAYGLAQCRADVNASDCRVCLDGLVQDMASDINCSVQKNAMFIYDKCKLRHSNTSFFGDLDTSVVFSAWNWRNATGPEQFTSQLGSLMSSLRTKAAYESPRRFAVGS

SEQ ID NO: 85447 - protein, 131 aa, Setaria italica
  Transcript Sequence Number=SeqID_19473
  Gene Ontology: Mol. function=ARF GTPase activator activity; Biological process=regulation of ARF GTPase activity
  Homolog annotation: Hit_ID=B9SY84; Match level="QueryCoverage=100%, HitCoverage=18%, E-value=6e-54, Identity=70%"; Hit description=HIV-1 rev binding protein, hrbl, putative
  Pfam annotation: Domain name=ArfGap; Domain location=3-89; Score =17.4; E_value=9.5e-07; Accession=PF01412.10; Description=Putative GTPase activating protein for Arf
FWTFVCVSCSGIHREFTHRVKSVSMSTFSTQEVEALQKGGNQRARESFLKDFDTQKMRLPDSSNIGNLREFIKAVYVERRYAGGRFSERPPRDKQNQKAHEEEHRRASSYHSFSQSPPYDYQYEEQRNGKQ

SEQ ID NO: 85448 - protein, 34 aa, Setaria italica
  Transcript Sequence Number=SeqID_19474
GERGRLPDSSNIGNLREFIKAAYVERRYAGGRFS

SEQ ID NO: 85449 - protein, 105 aa, Setaria italica
  Transcript Sequence Number=SeqID_19475
  Gene Ontology: Mol. function=nucleoside-triphosphatase activity; Cellular component=mitochondrion
  Homolog annotation: Hit_ID=Q5ZDA1; Match level="QueryCoverage=100%, HitCoverage=22%, E-value=4e-51, Identity=88%"; Hit description=BCS1 protein-like
TEVNWNQTLRRLLIGMTNRSILVIEDIDCSIDLQQRADEGQDGTKSSPSEDKVTLSGLLNFVDGLWSTSGEERIIIFTTNYKERLDPALLRPGRMDMHIHMGYCC

SEQ ID NO: 85450 - protein, 293 aa, Setaria italica
  Transcript Sequence Number=SeqID_19476
  Gene Ontology: Mol. function=nucleoside-triphosphatase activity; Cellular component=mitochondrion
  Homolog annotation: Hit_ID=Q5ZDA1; Match level="QueryCoverage=99%, HitCoverage=64%, E-value=1e-146, Identity=84%"; Hit description=BCS1 protein-like
  Pfam annotation: Domain name=AAA; Domain location=55-243; Score=60.6; E_value=6.1e-15; Accession=PF00004.21; Description=ATPase family associated with various cellular activities (AAA)
  Pfam annotation: Domain name=AAA_5; Domain location=55-189; Score= -24.0; E_value=0.093; Accession=PF07728.6; Description=ATPase family associated with various
  Pfam module annotation: Pfam domain module=AAA::AAA_5; Domain location=55-243::55-189
MNEGESWFAIDLHHPSTFTTLAMDHKMKQSVMDDLERFVKRKEYYKRIGKAWKRGYLLYGPPGTGKSSLIAAMANYLKFDVYDLELTEVNWNSTLRRLLIGMTNRSILVIEDIDCSIDLQQRADEGQDGTKSSPSEDKVTLSGLLNFVDGLWSTSGEERIIIFTTNYKERLDPALLRPGRMDMHIHMGYCCPESFRILASNYHAISDHDRYPEIEELIKEVMVTPAEVAEVLMRNDDTDIALEGLIQFLKAKRSDAKDSKGENVVHEAKEDRKEMMTEQDISGDQNLNDAGKE

SEQ ID NO: 85451 - protein, 51 aa, Setaria italica
  Transcript Sequence Number=SeqID_19477
QVLRCSEQQGRRRFKRGYLCSGGDGRGDAADSAIFYLACLAVCTTATGSKQ

SEQ ID NO: 85452 - protein, 238 aa, Setaria italica
  Transcript Sequence Number=SeqID_19478
MRVAPKVLVLVRDTAGYGAAIADALRPPPGLTRESSPLELPLGKYGLDGEKASVELLSFSDSSGSPQVTIFVVPDYKPPLAACAMNEVLELISSEATSTEQVLIVPFITRSSSYHHGMENATKASPVLHGAEIGATTDFTHLFVDGTTKPPTSLQIRTEPILCLLEMVRVLKMPTVLFVASGGQQQGKSSTVSDLEILQCVGEHLARHTNLEFSKESILERGIEKSPIIQEPWRELYG

SEQ ID NO: 85453 - protein, 126 aa, Setaria italica
  Transcript Sequence Number=SeqID_19479
RLYAATVLGFLLLLWVDTGLVPEAAARGFGPKLSPEAVARVGAEARLAPGGLEHKLRVLERRVGQLVGGERAANCSSQDSVWRLHQNDQHVFHWRCTVHKSVAEEVSVWGSPLRTSGLLPATLSAR

SEQ ID NO: 85454 - protein, 84 aa, Setaria italica
  Transcript Sequence Number=SeqID_19480
  Gene Ontology: Mol. function=nucleic acid binding
  Homolog annotation: Hit_ID=Q0WMU8; Match level="QueryCoverage=100%, HitCoverage=14%, E-value=1e-26, Identity=70%"; Hit description=RNA helicase like protein
SLKSPSPIIERAGLFPTFDLLSLYSRLHGTDFFHPILERFLEKAKLSPDYFIAECEDMLKVAAIVDDLPLGLYDKYLFCISPVD

SEQ ID NO: 85455 - protein, 56 aa, Setaria italica
  Transcript Sequence Number=SeqID_19481
  Homolog annotation: Hit_ID=Q9ZWA0; Match level="QueryCoverage=100%, HitCoverage=7%, E-value=1e-10, Identity=58%"; Hit description =F11M21.29 protein
ERALKQLRRSMVPHARPLPKFDRPFRPQKSMKQVTRPKSPQLQVDERGARRHAFIR

SEQ ID NO: 85456 - protein, 112 aa, Setaria italica
  misc_feature (12)..(12): Xaa can be any naturally occurring amino acid
  Transcript Sequence Number=SeqID_19482
  Homolog annotation: Hit_ID=B9T6B6; Match level="QueryCoverage=93%, HitCoverage=15%, E-value=5e-17, Identity=42%"; Hit description =Pentatricopeptide repeat-containing protein, putative
SASTSKVLPWKXPSRETLLRKIDGALKDGNVEEALQSFGNYKKLHGLPEPRVLNSVIVSLSYMSSRRWLQRAFDLVLSVHQINSNVLNCGSLMRLALALARDQMPVPASMVL

SEQ ID NO: 85457 - protein, 129 aa, Setaria italica
  Transcript Sequence Number=SeqID_19483
  Gene Ontology: Mol. function=sequence-specific DNA binding; Cellular component=nucleus; Biological process=regulation of transcription, DNA-dependent
  Homolog annotation: Hit_ID=Q8H6W1; Match level="QueryCoverage=79%, HitCoverage=21%, E-value=1e-14, Identity=49%"; Hit description=WRKY transcription factor
HPLPPPNRRPSVPSSHVNDLQADGSENFGSKPGHNTETSRAMAPNDHFQDVHSEVLERNLSGSLTTTEIADTCVMESQEAVDVSSTLSSNEKDERATQCTIPSTYRGDDDETESKRRKMEVSLYYKTTT

SEQ ID NO: 85458 - protein, 323 aa, Setaria italica
  misc_feature (140)..(140): Xaa can be any naturally occurring amino acid
  misc_feature (177)..(177): Xaa can be any naturally occurring amino acid
  misc_feature (199)..(199): Xaa can be any naturally occurring amino acid
  misc_feature (276)..(276): Xaa can be any naturally occurring amino acid
  misc_feature (303)..(303): Xaa can be any naturally occurring amino acid
  Transcript Sequence Number=SeqID_19484
  Gene Ontology: Mol. function=hydrolase activity, hydrolyzing O -glycosyl compounds; Biological process=carbohydrate metabolic process
  Homolog annotation: Hit_ID=Q5XTZ3; Match level="QueryCoverage=99%, HitCoverage=66%, E-value=1e-117, Identity=66%"; Hit description =Glycosyl hydrolase family-like protein
  Pfam annotation: Domain name=Melibiase; Domain location=1-323; Score=- 130.8; E_value=2.4e-08; Accession=PF02065.10; Description=Melibiase
TCGINEVHCSSGMFAADALVSTGLAELGYNYVNIDDCWSNVKRGKKDQLLPDPKTFPSGIKALADYVHGKGLKLGIYSDAGKFTCQVRPGSLYHENDDAMLFASWGVDYLKYDNCYNLGIKPQKRYPPMRDALNSTGRQXIFYSLCEWGEYDPALWAGKVGNSWRTTGDITDTWKRXHALSRKKRERDNISYVDVISNXLYMYLVKTSMTDIADKNNKWASYAGPGGWNDPDMLEVGNGGMTFAEYHSHFSIWALMKAPLLIGCDVRNLTSETLEXILSNKEVIQVNQDTSWSSRKKNLGEGXYGCREVWARPLSGNRLAVAL

SEQ ID NO: 85459 - protein, 414 aa, Setaria italica
  Transcript Sequence Number=SeqID_19485
  Gene Ontology: Mol. function=hydrolase activity, hydrolyzing O -glycosyl compounds; Biological process=carbohydrate metabolic process
  Homolog annotation: Hit_ID=Q9LYL2; Match level="QueryCoverage=95%, HitCoverage=91%, E-value=1e-174, Identity=71%"; Hit description =Alpha-galactosidase-like protein
  Pfam annotation: Domain name=Melibiase; Domain location=23-351; Score= -23.3; E_value=1.9e-14; Accession=PF02065.10; Description=Melibiase
AVDARSHREHERQGARRPPRIQPLATATLRRLYDTSNYGKLQLNNGLALTPQMGWNSWNFFACNINETVIRETADALVSTGLAELGYNYVNIDDCWSNVKRGKKDQLLPDPKTFPSGIKALADYVHGKGLKLGIYSDAGKFTCQVRPGSLYHENDDAMLFASWGVDYLKYDNCYNLGIKPQKRYPPMRDALNSTGRQIFYSLCEWGEYDPALWAGKVGNSWRTTGDITDTWKSMTDIADKNNKWASYAGPGGWNDPDMLEVGNGGMTFAEYHSHFSIWALMKAPLLIGCDVRNLTSETLEILSNKEVIQVNQDPLGVQGRRILGEGKYGCREVWAGPLSGNRLAVALWNRCSEAANITMKLPAVGLDGSAAYSVRDLWKHETLSENVIGTFGAQVEVHDTKMYIFSPAVSVASI

SEQ ID NO: 85460 - protein, 145 aa, Setaria italica
  Transcript Sequence Number=SeqID_19486
  Subcellular localization annotation: CTP_CleavageSite=65; ConfidenceScore=5.81e-01
PHLRCSPRLLQSKTPNANPLRRVPLARPRSSNLGGARAAATLCANLRRRRRHTHRRMGKRKPMPSAASRGAKSRPKRPRSGKQGAELREENPQLSEHDDETIDTESIAAEAIQHEKKSNRSVQSIAQSDEDDTEDEHDSSSGDAP

SEQ ID NO: 85461 - protein, 77 aa, Setaria italica
  Transcript Sequence Number=SeqID_19487
  Gene Ontology: Mol. function=electron carrier activity; Biological process=metabolic process
  Homolog annotation: Hit_ID=B6U880; Match level="QueryCoverage=100%, HitCoverage=15%, E-value=2e-27, Identity=81%"; Hit description=NADPH adrenodoxin oxidoreductase
MARGLRLLSRAVERLRPLLVQGPPTRGFSAFVREPLHVCVVGSGPAGFYTADRMLKSHEGAQVDIIDRIPTPFGLVR

SEQ ID NO: 85462 - protein, 105 aa, Setaria italica
  misc_feature (1)..(13): Xaa can be any naturally occurring amino acid
  Transcript Sequence Number=SeqID_19488
XXXXXXXXXXXXXRPSPNVNRIKRKKQRNYSLGAQGVQSSTPDEQLQALRTHSIHRHSSITTLHLHLVFYTKQRMHTCTQPLKNLCVTVLLRFPFQNSWLRPGRP

SEQ ID NO: 85463 - protein, 70 aa, Setaria italica
  Transcript Sequence Number=SeqID_19489
  Gene Ontology: Mol. function=cysteine-type peptidase activity; Biological process=proteolysis
  Homolog annotation: Hit_ID=Q7XVP9; Match level="QueryCoverage=91%, HitCoverage=9%, E-value=2e-10, Identity=50%"; Hit description =OSJNBa0050F15.4 protein
ACSTKNKKDAVEKAGFGSLLKLKDIEIRRELCKEIADSFDLDKEEFNIQEKKVKISIKDVDHILGLPSQG

SEQ ID NO: 85464 - protein, 69 aa, Setaria italica
  Transcript Sequence Number=SeqID_19490
FKYGARGPIRSLRGALKRNCKLRGGSKMEPRKPWQDPQGTSRFSSCISVPCFTSSKNLRPQLLVTYDLV

SEQ ID NO: 85465 - protein, 186 aa, Setaria italica
  Transcript Sequence Number=SeqID_19491
MPSRAMNRLFVESSSSSSGSGGCREAAPAAAVLCAPRPRRAQVHPCSADLILGPPPFLLSSKKSKEGGKTKSAEAEVDGDEDGGWALFGGSPPARADNPLVHDPHFLLNQRHPVDSSPLELGIFDHQSRSNYSHHRPTYISSSSSNSSSSSFAPSFAPTVRIQGFDVAACRSSHSNGGGRVLSARA

SEQ ID NO: 85466 - protein, 338 aa, Setaria italica
  Transcript Sequence Number=SeqID_19492
  Gene Ontology: Mol. function=nucleoside-triphosphatase activity; Cellular component=chloroplast; Biological process=protein metabolic process
  Homolog annotation: Hit_ID=B9RNX1; Match level="QueryCoverage=100%, HitCoverage=34%, E-value=1e-161, Identity=80%"; Hit description =Chaperone clpb, putative
  Pfam annotation: Domain name=AAA; Domain location=53-242; Score= -26.5; E_value=0.0053; Accession=PF00004.21; Description=ATPase family associated with various cellular activities (AAA)
  Pfam annotation: Domain name=AAA_2; Domain location=49-219; Score =362.8; E_value=6.4e-106; Accession=PF07724.6; Description=ATPase family associated with various
  Pfam annotation: Domain name=AAA_5; Domain location=53-204; Score =24.3; E_value=9.3e-06; Accession=PF07728.6; Description=ATPase family associated with various
  Pfam annotation: Domain name=ClpB_D2-small; Domain location=225-312; Score=132.3; E_value=1.6e-36; Accession=PF10431.1; Description=C -terminal, D2-small domain, of ClpB pr
  Pfam annotation: Domain name=Torsin; Domain location=3-288; Score= -145.9; E_value=0.00034; Accession=PF06309.3; Description=Torsin
  Pfam module annotation: Pfam domain module=AAA::AAA_2::AAA_5::ClpB_D2- small::Torsin; Domain location=53-242::49-219::53-204::225-312::3-288
VSNLQQSEREKLLLLEDVLHKRVIGQDIAVKSVANAIRRSRAGLSDPNRPIASFMFMGPTGVGKTELGKTLAEFLFNTENALIRIDMSEYMEKHAVSRLVGAPPGYVGYEEGGQLTESVRRRPYSVVLFDEIEKAHQDVFNILLQLLDDGRITDSQGRTVSFTNCVIIMTSNIGSPLILDTLRNTTDSKEAVYEIMKKQVIEMARQTFRPEFLNRIDEYIVFQPLDTSEINHIVEIQLNRVKNRLKQQKIRLQYTPEAVELLGSLGFDPNYGARPVKRVIQQMVENEIALGVLKGDFKEDDTILVDVSSAAIAKGLAPQKKLVLQRVENRSEELVAND

SEQ ID NO: 85467 - protein, 192 aa, Setaria italica
  Transcript Sequence Number=SeqID_19493
  Gene Ontology: Mol. function=nucleoside-triphosphatase activity; Cellular component=chloroplast; Biological process=protein metabolic process
  Homolog annotation: Hit_ID=B9RNX1; Match level="QueryCoverage=90%, HitCoverage=17%, E-value=7e-85, Identity=86%"; Hit description =Chaperone clpb, putative
  Pfam annotation: Domain name=AAA_2; Domain location=121-188; Score= -6.9; E_value=4.1e-05; Accession=PF07724.6; Description=ATPase family associated with various
DRVNLEIEAAEREYDLSRAAELKYGTLLSLQKQLEEAENKLVEFQQSGKSMLREEVTDVDIAEIVSKWTGIPVSNLQQSEREKLLLLEDVLHKRVIGQDIAVKSVANAIRRSRAGLSDPNRPIASFMFMGPTGVGKTELGKTLAEFLFNTENALIRIDMSEYMEKHAVSRLVGAMDAEFLITYSSCYVHGFF

SEQ ID NO: 85468 - protein, 229 aa, Setaria italica
  Transcript Sequence Number=SeqID_19494
MPSRAMNRLFVESSSSSSGSGGCREAAPAAAVLCAPRPRRAQVHPCSADLILGPPPFLLSSKKVLGQIHTNQPLFFLLPCKKIASFPPSCSCSLAKISSFPLLLSQSKEGGKTKSAEAEVDGDEDGGWALFGGSPPARADNPLVHDPHFLLNQRHPVDSSPLELGIFDHQSRSNYSHHRPTYISSSSSNSSSSSFAPSFAPTVRIQGFDVAACRSSHSNGGGRVLSARA

SEQ ID NO: 85469 - protein, 92 aa, Setaria italica
  Transcript Sequence Number=SeqID_19495
  Subcellular localization annotation: CTP_CleavageSite=51; ConfidenceScore=5.64e-01
RGSSSTCRGVLACSGSSSHPVRVDCCRSVAQLRTLLDCTTTSSTSIGSTTRASLRFSLRRVMSEGIIYDHLLASDPVYGLYFCMLTSSLPCS

SEQ ID NO: 85470 - protein, 99 aa, Setaria italica
  Transcript Sequence Number=SeqID_19496
  Subcellular localization annotation: CTP_CleavageSite=60; ConfidenceScore=5.44e-01
ATTRQTHWATSTGFSPRTAACMVPGASGIPERKSDAALMHLLMSGLFSVVVSVSGGIWARAQTVAARRAVPRRSREVADGFEAISVALLDCWCRGCTLN

SEQ ID NO: 85471 - protein, 467 aa, Setaria italica
  Transcript Sequence Number=SeqID_19497
  Gene Ontology: Mol. function=zinc ion binding; Cellular component =intracellular
  Homolog annotation: Hit_ID=Q8S9K3; Match level="QueryCoverage=92%, HitCoverage=51%, E-value=4e-32, Identity=66%"; Hit description=Zinc finger protein VAR3, chloroplastic
DGQINAEVDSSMENSTVPLAERQDGMESSDTAEKWSKKVGELDVNDVPSVTSDEYLPEIMPMRKGENRFVVSKKKDRSLTSPQFKRRSLLEHADNSDFVPFVPFPPDYFAKKDKPVENTAATGIVSEGSPTSEKRLETNASSGKYGNSSNTSQVVGSQPKGNVDNENWNRNNSQQNSSSGGYGQSNNYQHHSQSHGAQSWPSDTANTFTWNTGYSHGNFKESRGDSTYNGASSAQQPYNSGYNSNSNSWSSENNNSNTAWTGNSNYNNDSAWSGNNHYNNNNAWSGNTSYSNSSSTWNGNGSYNNNTWRSSHSYNNNATWSNSSHSAWSSSNSNNQRDSFADNSNAASISDSMNPNQTIHNSGYGGSSNRDYTGKSLEGSAVKDPDPLDMSEEAKAERWFRRAAQIKDISELANIPDEDFPEIMPMRKGVNRFVVSKRKTPLERRLTSPQYRRNLPIVSSEPEKDAS

SEQ ID NO: 85472 - protein, 133 aa, Setaria italica
  misc_feature (114)..(114): Xaa can be any naturally occurring amino acid
  misc_feature (132)..(132): Xaa can be any naturally occurring amino acid
  Transcript Sequence Number=SeqID_19498
  Subcellular localization annotation: CTP_CleavageSite=59; ConfidenceScore=5.59e-01
ALFASLRLTSSPCSLLSAAARSFPLSQRALALFPQLTRPPSPRHRLHLAPPPPYALLPSVGTRSVAGILNRYAPRSSTTRRSRLSPGYLLRYFPTWSVAGLVVCIGGRDWMANXEYEYVKREFEFDRRLPPXT

SEQ ID NO: 85473 - protein, 105 aa, Setaria italica
  Transcript Sequence Number=SeqID_19499
  Gene Ontology: Cellular component=cytoplasm; Biological process=rRNA processing
  Homolog annotation: Hit_ID=B6TSA2; Match level="QueryCoverage=100%, HitCoverage=19%, E-value=5e-49, Identity=90%"; Hit description=Small nucleolar ribonucleoprotein complex subunit
  Pfam annotation: Domain name=WD40; Domain location=52-91; Score=28.4; E_value=2.9e-05; Accession=PF00400.24; Description=WD domain, G-beta repeat
  Pfam annotation: Domain name=WD40; Domain location=6-47; Score=7.9; E_ value=4.5; Accession=PF00400.24; Description=WD domain, G-beta repeat
  Pfam module annotation: Pfam domain module=WD40::WD40; Domain location=52-91::6-47
DKPATGAALRTLRAHAAETRVVRYPVGGGDKLHLLTAGDDALLTYWDVPSETPVFTVPAAHKDYIRGGAASPADHNIFATGSYDRSVKLWDARTGNAGPSLSFSQ

SEQ ID NO: 85474 - protein, 111 aa, Setaria italica
  misc_feature (87)..(87): Xaa can be any naturally occurring amino acid
  misc_feature (103)..(103): Xaa can be any naturally occurring amino acid
  Transcript Sequence Number=SeqID_19500
  Gene Ontology: Biological process=transcription
  Homolog annotation: Hit_ID=Q6H8E1; Match level="QueryCoverage=100%, HitCoverage=9%, E-value=1e-40, Identity=73%"; Hit description=PHD finger protein-like
  Subcellular localization annotation: CTP_CleavageSite=21; ConfidenceScore=5.50e-01
MEFSKQGQSPMPNNLGSQPVPSSNVQSNQPEYASVFYPSLPGDWGSQPMFSVGASVPVSSYYIVPMSQQSVQVGASRPEVARPLGAXTFTSRVSLRPPQQVLXIQTSLPAM

SEQ ID NO: 85475 - protein, 1070 aa, Setaria italica
  misc_feature (1041)..(1041): Xaa can be any naturally occurring amino acid
  misc_feature (1056)..(1056): Xaa can be any naturally occurring amino acid
  Transcript Sequence Number=SeqID_19501
  Gene Ontology: Mol. function=translation elongation factor activity; Cellular component=nucleus; Biological process=transcription
  Homolog annotation: Hit_ID=Q6H8E1; Match level="QueryCoverage=96%, HitCoverage=92%, E-value=0.0, Identity=66%"; Hit description=PHD finger protein-like
  Pfam annotation: Domain name=SPOC; Domain location=690-796; Score =73.2; E_value=9.5e-19; Accession=PF07744.5; Description=SPOC domain
  Pfam annotation: Domain name=TFIIS_M; Domain location=328-436; Score =153.7; E_value=5.7e-43; Accession=PF07500.6; Description =Transcription factor S-II (TFIIS), cen
  Pfam module annotation: Pfam domain module=SPOC::TFIIS_M; Domain location=690-796::328-436
  Subcellular localization annotation: CTP_CleavageSite=24; ConfidenceScore=5.53e-01
FLFFLFKGFLVLPMPNNLGSQPVPSSNVQSNQPEYASVFYPSLPGDWGSQPMFSVGASVPVSSYYIVPMSQQSVQVGASRPEVARPLGAQPLLSRVSLRPPQQVLNIQTSLPAMVGSQPSPSTAGRKSQQAVASPKVQMLKSPSFQSSNKRSAQKEPPSKVQPQQLESVRSKFRESLAAALSLDSDQQNKCQSPDNVQPDGSADKSKPAGDAVQDPVATTSKDASTANSDVAITVAPKRCEGDGKLSSDLISNMITSVNDDMQQQSNLVSSEDELLGQCMVTDELLQGHGLSWVSDLDAGISEPNVQSNLKRPRTSDVEPGATESLVESESKRTKSADALAKDKEILNQKAESLAFRIEEELFKLFGGVNKKYKEKGRSLLFNLKDKSNPELRERVLSGDIAPKRLCSMTAEELASKELSEWRLAKAEELAQMVVLPNTEVDPRRLVRKTHKGEFQVEVEEPDGISVEVELGSNLTNIPSKAVEDQTKSNVKASVDGKEGVQEKDKASDSTSQDEDGRTGNNDMSGDLEYIDNEKADLMQELILDDVKDTENLPPIPSLDEFMQGLDSEPPFVDLSVGTPQEDGNDSEEPDTTLEPEELPGTEDKASTPEKSASESDKPSAQDNNEPKLESPGHAAVPNSDLTEPRDGEPSKSSPGKDEATKTATDNVSNPDSILQTKATNIPMIRESIWEGAIQLTVSSLSNVFAFFKSGEKPLLKDWRSFVEIKGRVKLNAFQEFVEQLPKSRSRAIMITELCWKEGSPESGRQHILQTIDAYVSDERVGLAEPAEGIELYLCPPHGKTVEILSRHLPKEHQEGLAVPGSSFIGVVVWRRPNVPRVPTSHHRHDGSRRQSILRKPQVTNPAARPSLPPNSYGAPPGFPNQRHHREEEDVTDDVPPGFGPGVARDEDDLPEFNFVNSSHPAANVTAHAYKSRQHVPPPPSARPAEQMRELVQKYGKRSSVQAHRWDDDDDDDIPEWNPSQATTHHQLTRQPPLPATPQQLPLPPPPPVVQQMHPYQQQQQQQYHIPSAVQPQVPISSLPXAYLRTQQQQQPMQQXPLQQQQQLQSGQAW

SEQ ID NO: 85476 - protein, 131 aa, Setaria italica
  Transcript Sequence Number=SeqID_19502
QTLLEENQKLKNDNLMLLVEHDNLKALHQNLDVECFQLKAAIAEITAENESLITENHSAERKLQQLGLEIDGLKVEAAELMNNLDKERNNAAEEKERLVSENSMYLNELEKAQSSVKALRKRTEINNKCYE

SEQ ID NO: 85477 - protein, 126 aa, Setaria italica
  misc_feature (74)..(74): Xaa can be any naturally occurring amino acid
  Transcript Sequence Number=SeqID_19503
  Gene Ontology: Mol. function=hydrolase activity; Cellular component =nucleus; Biological process=metabolic process
  Homolog annotation: Hit_ID=B6TKK2; Match level="QueryCoverage=84%, HitCoverage=29%, E-value=5e-25, Identity=57%"; Hit description =Gibberellin receptor GID1L2
MAGSDSVRRMPSLPWTVSIQTAAYAIAHRLDGSIRRSLFSIGDLKKAPRPNASEVRSADITIDASRGISARVFXPLTAAGDTTPLPVVVFFHGGGFALFSAASRPYDTLCRRLCRGVGAVVVSVNY

SEQ ID NO: 85478 - protein, 176 aa, Setaria italica
  misc_feature (167)..(167): Xaa can be any naturally occurring amino acid
  Transcript Sequence Number=SeqID_19504
  Gene Ontology: Mol. function=protein dimerization activity; Cellular component=nucleus; Biological process=regulation of transcription, DNA-dependent
VASATPNFFDQEGATYFGELEEAFMHQVASLRRTQAATTSAAHPTPFPTAAPAAAATATARPPPTLDIFPAWPMRSLHTPKEGSNLTADSTEDSESSSKNNSNHSSDQHGAAHNMASQFDQGSQQQQEEIQHKNMATSSTTKSGKTLDPKTIRRLAQNREAARKADXRKKAYIQQS

SEQ ID NO: 85479 - protein, 216 aa, Setaria italica
  Transcript Sequence Number=SeqID_19505
  Homolog annotation: Hit_ID=B6TTK3; Match level="QueryCoverage=100%, HitCoverage=100%, E-value=1e-71, Identity=64%"; Hit description =Harpin-induced protein
  Pfam annotation: Domain name=Hin1; Domain location=45-185; Score =80.1; E_value=7.8e-21; Accession=PF07320.5; Description=Harpin -induced protein 1 (Hin1)
MAFWEPCFGKDNECSNCDCGWKTFAIWAGIILVLCAVIIVLVIAFAVKFPPKATADDAVLSRFALAPGSPAANSTISYNITATVSLRNPNIHRAIAYGPLAVSFSFNGSRFDESGTIPAFDHKPRKTATVRVTVGGVDKPVKLTADGVKEFRSDNDTGKFGVEMRLDTTLQYKGRSAKCPLVVVCPLQLQLVDPDVAATAFQRTKCTILRAKKSGC

SEQ ID NO: 85480 - protein, 95 aa, Setaria italica
  Transcript Sequence Number=SeqID_19506
ALPFFTFEFTLHTDPFQVNYRAVAADVISKAVIVAVIAVWARFAAAKGAGSAAGWSITSFSLSTLTNSLVVGVPLARAMYGEWAQQLVVQLSVFQ

SEQ ID NO: 85481 - protein, 71 aa, Setaria italica
  misc_feature (55)..(55): Xaa can be any naturally occurring amino acid
  Transcript Sequence Number=SeqID_19507
MPDLSTVYLPPFPELSVDAAGDLADDHAGDAAAAAASIDAAPASASSPASVDGGXRPLMLPMECRWSGRVR

SEQ ID NO: 85482 - protein, 107 aa, Setaria italica
  Transcript Sequence Number=SeqID_19508
  Gene Ontology: Mol. function=hydrolase activity, hydrolyzing O -glycosyl compounds; Biological process=carbohydrate metabolic process
  Homolog annotation: Hit_ID=B6SYQ7; Match level="QueryCoverage=92%, HitCoverage=20%, E-value=4e-32, Identity=72%"; Hit description=Beta -glucosidase
MAGRAWRPVLAGAWLLLLLLLLPSASAVRRSDFPVSFLFGTATSSYQIEGAYLEGNKSLSNWDVFTHAPGRIKDGSAGDIADDHYHRYDEDVELMNSLGRKTKPKNK

SEQ ID NO: 85483 - protein, 232 aa, Setaria italica
  Transcript Sequence Number=SeqID_19509
  Gene Ontology: Mol. function=hydrolase activity, hydrolyzing O -glycosyl compounds; Biological process=carbohydrate metabolic process
  Homolog annotation: Hit_ID=B6SYQ7; Match level="QueryCoverage=95%, HitCoverage=43%, E-value=6e-91, Identity=73%"; Hit description=Beta -glucosidase
  Pfam annotation: Domain name=Glyco_hydro_1; Domain location=2-229; Score=-81.1; E_value=1.4e-14; Accession=PF00232.10; Description =Glycosyl hydrolase family 1
LGRSCNGSTWSFSVPWFVDPIVYGDYPPEMRQVLGSRLPTFSPEERRKLGYKLDFIGINHYTTLYARDCMFSSGCPLGQGTQHALAAVTGERNGVPIGPPTGRPMFYVVPDGIEKMVTYIMRRYNNLPMFVTENGYPDGGEAGHDHAKDLLHDQGRIQYLDGYLTKVAKAIRDGADVRGYFVWSLMDNFEWLYGYTLRYGLYYVDYQTLERKPKSSALWYKRFLQSFQHEAQ

SEQ ID NO: 85484 - protein, 506 aa, Setaria italica
  Transcript Sequence Number=SeqID_19510
  Gene Ontology: Mol. function=hydrolase activity, hydrolyzing O -glycosyl compounds; Biological process=carbohydrate metabolic process
  Homolog annotation: Hit_ID=B6SYQ7; Match level="QueryCoverage=94%, HitCoverage=93%, E-value=0.0, Identity=83%"; Hit description=Beta -glucosidase
  Pfam annotation: Domain name=Glyco_hydro_1; Domain location=29-504; Score=657.3; E_value=1.4e-194; Accession=PF00232.10; Description =Glycosyl hydrolase family 1
MAGKAWRQLVAVASLLSVLWLLPWASAVRRSDFPVSFLFGTATSSYQIEGAYLEGNKSLSNWDVFTHQPGRIKDRSTGDIADDHYHRFEDDVELMHSLGTNAYRFSISWARILPRGRFGRVNLAGIAFYDELIDSLLHKGIEPFVTLTHYDIPQELEDRYGSWLSDEIQRDFGYFADVCFAAFGDRVKYWTTFNEPNVAVRKGYMLGTYPPARCSPPYGSCARGDSGAEPYLATHNVVLSHATAVEIYKRKYQSEQKGLIGIVMSTTWFKPMTDAPVDRLATERALAFDVPWFLDPIVYGDYPPEMRQILGSRLPAFSPDERRKLGYKLDFIGVNHYTTLYARDCMFSPGCPLGQETQHALAAVTGERNGLPVGPPTAMPTFYVVPEGIEKIVTYIMKRYNNLPMFITENGYAQGGDGYAHVEDWLDDQGRIEYLDGYLTKLAKVIRDGADVRGYFVWSLIDNFEWLYGYTLRFGLHYVDYQTQERKPKSSALWYQRFLQSLLEAQ

SEQ ID NO: 85485 - protein, 146 aa, Setaria italica
  Transcript Sequence Number=SeqID_19511
  Gene Ontology: Mol. function=3-oxoacyl-[acyl-carrier-protein] reductase activity; Cellular component=chloroplast; Biological process=fatty acid biosynthetic process
  Homolog annotation: Hit_ID=B6T8T5; Match level="QueryCoverage=99%, HitCoverage=47%, E-value=2e-55, Identity=76%"; Hit description=3 -oxoacyl-reductase
  Pfam annotation: Domain name=KR; Domain location=40-146; Score=-67.3; E_value=0.004; Accession=PF08659.2; Description=KR domain
  Pfam annotation: Domain name=adh_short; Domain location=40-146; Score= 4.8; E_value=6.6e-06; Accession=PF00106.17; Description=short chain dehydrogenase
  Pfam module annotation: Pfam domain module=KR::adh_short; Domain location=40-146::40-146
AAPALRSGPSTRAVALSGVRTHVAAVEQAAVQDATKLEAPVVIVTGASRGIGKATALALGKAGCKVLVNYARSSKEAEEVSKEIEASGGQAITFGGDVSKEADVETMIKTAVDTWGTIDVLVNNAGITRDTLLMRMKKSQWQDVID

SEQ ID NO: 85486 - protein, 66 aa, Setaria italica
  Transcript Sequence Number=SeqID_19512
TSVPCVHPKQRTPSTQRNHPATFRCSDDERSSPRYSYKCGCRVTPRRGAKVAPDEHGYDLSAVVNK

SEQ ID NO: 85487 - protein, 58 aa, Setaria italica
  Transcript Sequence Number=SeqID_19513
VGITKSPRRHTLKMNKFEDYTGMIKLDLAVGVKIVCEDHQNRDSELNLLCHFSSLHLH

SEQ ID NO: 85488 - protein, 79 aa, Setaria italica
  misc_feature (72)..(72): Xaa can be any naturally occurring amino acid
  misc_feature (77)..(77): Xaa can be any naturally occurring amino acid
  Transcript Sequence Number=SeqID_19514
MVPSGLLGNSRHTMSSPCYNVIPGQYSCILGINKHLCTIKRLFTKLHACQSKWLTSFINKLKFVCFVRLQKXKKKKXKN

SEQ ID NO: 85489 - protein, 38 aa, Setaria italica
  Transcript Sequence Number=SeqID_19515
IINHGNVNHEFLINQQQKADYKTQCRMQVCPRDHVKMP

SEQ ID NO: 85490 - protein, 95 aa, Setaria italica
  Transcript Sequence Number=SeqID_19516
  Gene Ontology: Mol. function=protein serine/threonine kinase activity; Biological process=protein amino acid phosphorylation
  Homolog annotation: Hit_ID=B9V0L1; Match level="QueryCoverage=85%, HitCoverage=9%, E-value=4e-36, Identity=83%"; Hit description=S -domain receptor-like protein kinase
IVRAVIRLRFPVQAISKLHEGDLQSLVDRQLHGDFDLEEAERVCKVAFWCIQDNECDRPTMGEVVRVLEGLQELNMPPMPRLLAAITERSDAASM

SEQ ID NO: 85491 - protein, 40 aa, Setaria italica
  Transcript Sequence Number=SeqID_19517
RMANMSVPIVLSLGDGHVGHPAILAADGVEMKCLEELMLA

SEQ ID NO: 85492 - protein, 56 aa, Setaria italica
  Transcript Sequence Number=SeqID_19518
  Gene Ontology: Mol. function=transferase activity
  Homolog annotation: Hit_ID=Q5MJ30; Match level="QueryCoverage=98%, HitCoverage=25%, E-value=4e-17, Identity=80%"; Hit description =Glutathione S-transferase
MERPSVQKVAALQDGDLCIWESRAICKYAARKNKPELLKEGNLVESAMVDVWMEVY

SEQ ID NO: 85493 - protein, 57 aa, Setaria italica
  misc_feature (29)..(29): Xaa can be any naturally occurring amino acid
  misc_feature (38)..(38): Xaa can be any naturally occurring amino acid
  Transcript Sequence Number=SeqID_19519
  Gene Ontology: Mol. function=sulfate adenylyltransferase (ATP) activity; Biological process=sulfate assimilation
  Homolog annotation: Hit_ID=O48888; Match level="QueryCoverage=84%, HitCoverage=9%, E-value=1e-18, Identity=93%"; Hit description=ATP sulfurylase
RSLLAVGWLNILPFRVAAYDTKQKKMDFXDPSRKDDFXFISGTKMRTLAKNRESPPR

SEQ ID NO: 85494 - protein, 107 aa, Setaria italica
  Transcript Sequence Number=SeqID_19520
LLVKIPRDIYISDHQASIPHKSSHHLRRLPPRAQLHGSSEHEVQPAVGAEGAHPFLLSVRRPSTKLISPVAAHWPGTPPRARPELHPEEGDGGGNQEGLGAGCVFRE

SEQ ID NO: 85495 - protein, 99 aa, Setaria italica
  Transcript Sequence Number=SeqID_19521
  Gene Ontology: Mol. function=transferase activity
  Homolog annotation: Hit_ID=Q5MJ30; Match level="QueryCoverage=66%, HitCoverage=30%, E-value=5e-31, Identity=96%"; Hit description =Glutathione S-transferase
  Pfam annotation: Domain name=GST_N; Domain location=2-72; Score=66.5; E_value=1e-16; Accession=PF02798.12; Description=Glutathione S -transferase, N-terminal domain
MAPMKLYGATISWNVTRCAVALEEAGAEYEIVPINFATAEHKSPEHLARNPFGQVPALQDGDLCIWGMILSRGDPFELFLVHCCCHYLFIWYYYPFHNI

SEQ ID NO: 85496 - protein, 405 aa, Setaria italica
  misc_feature (35)..(35): Xaa can be any naturally occurring amino acid
  misc_feature (75)..(75): Xaa can be any naturally occurring amino acid
  misc_feature (371)..(371): Xaa can be any naturally occurring amino acid
  Transcript Sequence Number=SeqID_19522
  Gene Ontology: Mol. function=sulfate adenylyltransferase (ATP) activity; Biological process=sulfate assimilation
  Homolog annotation: Hit_ID=O48888; Match level="QueryCoverage=96%, HitCoverage=79%, E-value=0.0, Identity=94%"; Hit description=ATP sulfurylase
  Pfam annotation: Domain name=ATP-sulfurylase; Domain location=57-387; Score=501.6; E_value=1.1e-147; Accession=PF01747.9; Description=ATP -sulfurylase
GRRAALRREAASLPHRVRLGRVEKEWVHVLSEGWXASPLQGFMREHEFLQALHFNAIRGEDGRMANMSVPIVLSXVGDAQRRAILADGATRVALVDDRDRPIAVLSDIEIYKHNKEERIARTWGTTAPGLPYVEEAITNAGDWLIGGDLEVIEPIKYNDGLDQYRLSPAQLREEFARRNADAVFAFQLRNPVHNGHALLMTDTRKRLLDMGYKNPVLLLHPLGGFTKADDVPLSWRMKQHEKVLEEGVLNPESTVVAIFPSPMHYAGPTEVQWHAKARINAGANFYIVGRDPAGMSHPTAKRDLYDADHGKKVLSMAPGLERLNILPFRVAAYDTKQKKMDFFDPSRKDDFLFISGTKMRTLAKNRETPPXIGFMCPGGWKVLVEYYDSLVPSEGSSKLREPVAA

SEQ ID NO: 85497 - protein, 115 aa, Setaria italica
  Transcript Sequence Number=SeqID_19523
  Gene Ontology: Mol. function=protein binding; Cellular component =signalosome
  Homolog annotation: Hit_ID=B4F8L1; Match level="QueryCoverage=100%, HitCoverage=44%, E-value=6e-59, Identity=94%"; Hit description=COP9 signalosome complex subunit 7
GKLDQLRRCFEVQFAAGRDLTPDQLTNMIDTLSDWLGTSDSLLHQIQEKIKWADTMSEVNKKHQKEFEDRVEEAKKSIKADIDLRGHDDFLSESGGIMDFEEDRIRPKRRRQPPA

SEQ ID NO: 85498 - protein, 84 aa, Setaria italica
  Transcript Sequence Number=SeqID_19524
  Gene Ontology: Mol. function=metal ion binding; Cellular component =cytoplasm; Biological process=ubiquitin-dependent protein catabolic process
  Homolog annotation: Hit_ID=Q940X7; Match level="QueryCoverage=100%, HitCoverage=71%, E-value=1e-43, Identity=98%"; Hit description=RING -box protein 1a
  Pfam annotation: Domain name=zf-C3HC4; Domain location=18-73; Score =7.4; E_value=0.014; Accession=PF00097.17; Description=Zinc finger, C3HC4 type (RING finger)
KKWNAVALWAWDIVVDNCAICRNHIMDLCIECQANQASATSEECTVAWGVCNHAFHFHCISRWLKTRQVCPLDNSEWEFQKYGH

SEQ ID NO: 85499 - protein, 129 aa, Setaria italica
  Transcript Sequence Number=SeqID_19525
  Homolog annotation: Hit_ID=C0L2V9; Match level="QueryCoverage=72%, HitCoverage=19%, E-value=3e-19, Identity=56%"; Hit description =Putative reverse transcriptase
MTGSSKKSELKSKQKLEKKLSFYTKVKDAVTSLNAKKTISKKQNQSHRQKKLKAYDLSALSEFLPEPAAPEQKTEVKLNCKSRQTLVLREAAHLKAVLNNPQFQLDPFATIHQHLLVDRGERIHLQLRR

SEQ ID NO: 85500 - protein, 79 aa, Setaria italica
  Transcript Sequence Number=SeqID_19526
DLRDKRDKRTAVISEQLQALEPLEAKSNEDAALWEKIEEAVLWYGKFLGFQIVGRDEGTLPTSPMVTSVDGRSEDVPNQ

SEQ ID NO: 85501 - protein, 253 aa, Setaria italica
  misc_feature (188)..(188): Xaa can be any naturally occurring amino acid
  Transcript Sequence Number=SeqID_19527
  Pfam annotation: Domain name=Spindle_Spc25; Domain location=110-183; Score=72.1; E_value=2.1e-18; Accession=PF08234.4; Description =Chromosome segregation protein (Spc25,
TFPRQGTREQLKGLKDQLRDLLLPNYKTPSSKSCKESKGKLTTESISDATAMVEGLGNLVADLRDKRDKRTAVISEQLQALEPLEAKSNEDAALWEKIEEAVLWYGKFLGFQIVGRDEGVKFVFNKIDPQSPEKEYSFCINFDKDRYNLLECDPHIKDVEELVKDLNLSDHVVKFLRIIREKFQSSAXIFCHEGTLPTSPMVTSVDGRSEDVPNQSHSRSKNKRQSLPAKREATALSAASPGSLRRSLRSRAN

SEQ ID NO: 85502 - protein, 67 aa, Setaria italica
  Transcript Sequence Number=SeqID_19528
  Subcellular localization annotation: CTP_CleavageSite=51; ConfidenceScore=5.63e-01
FLSLHSSGTLPTSPMVTSVDGRSEDVPNQSHSRSKNKRQSLPAKREATALSAASPGSLRRSLRSRAN

SEQ ID NO: 85503 - protein, 115 aa, Setaria italica
  Transcript Sequence Number=SeqID_19529
  Subcellular localization annotation: CTP_CleavageSite=75; ConfidenceScore=5.40e-01
RATSSYRLQREVVEGRGRARIFAFLAWVPARGGSSRCARRRRSSSSSSRSSSSSFLSLRPAVKTHPHAPPAPPPPAGKKWRWQRASAGGGCPPVSRVLDRGGACGCWLWSTRHRG

SEQ ID NO: 85504 - protein, 46 aa, Setaria italica
  Transcript Sequence Number=SeqID_19530
  Subcellular localization annotation: CTP_CleavageSite=28; ConfidenceScore=5.23e-01
MASLTMMASFAAVAAAAPSRRGSFAVARAASLAAGSCWQRSTLAAL

SEQ ID NO: 85505 - protein, 393 aa, Setaria italica
  misc_feature (163)..(163): Xaa can be any naturally occurring amino acid
  misc_feature (232)..(232): Xaa can be any naturally occurring amino acid
  misc_feature (247)..(247): Xaa can be any naturally occurring amino acid
  Transcript Sequence Number=SeqID_19531
  Gene Ontology: Mol. function=DNA binding; Cellular component=nucleus; Biological process=transcription from RNA polymerase II promoter
  Homolog annotation: Hit_ID=B9I5N6; Match level="QueryCoverage=74%, HitCoverage=32%, E-value=1e-114, Identity=64%"; Hit description =Jumonji domain protein (Fragment)
  Pfam annotation: Domain name=JmjC; Domain location=1-85; Score=105.5; E_value=1.7e-28; Accession=PF02373.14; Description=JmjC domain
  Pfam annotation: Domain name=zf-C5HC2; Domain location=191-244; Score= 93.8; E_value=5.9e-25; Accession=PF02928.8; Description=C5HC2 zinc finger
  Pfam module annotation: Pfam domain module=JmjC::zf-C5HC2; Domain location=1-85::191-244
MWYGVPGKDAVNLEVAMRKHLPELFEEQPDLLHNLVTQFSPSLLKSEGVPVYRCVQHEGEFVLTFPRAYHAGFNCGFNCAEAVNVAPLDWLPIGQDAVELYREQARKITISHDKLLLGAAREAIRAQWDILFLKRNTADNLRWKSMCGPDSTICKSLKARIEXSLAQRKHICSPSQSRKMEAEFDSTDRECALCYYDLHLSASGCPCSPEKYACLVHAKQLCSCDWDKRFFXFRYDVNELNILADAXGGKLSAIHRWGVSHLGLSLSSCVKQEKDQDLKTLSRATDGPRRSYMSQASTVLLSPSLVCNEQKSSGNKMLNSGCSEINTACPSAEQLKSANVSPQKEPWVKNDLACTLNNGVSQLQYNGGPGGHKNSALGLPIPSGVSFSSNVAT

SEQ ID NO: 85506 - protein, 150 aa, Setaria italica
  Transcript Sequence Number=SeqID_19532
  Gene Ontology: Mol. function=oxidoreductase activity, acting on single donors with incorporation of molecular oxygen, incorporation of two atoms of oxygen; Cellular component=cytoplasm; Biological process=aromatic amino ...
  Gene Ontology: Biological process=acid family metabolic process
  Homolog annotation: Hit_ID=O48604; Match level="QueryCoverage=80%, HitCoverage=27%, E-value=3e-39, Identity=70%"; Hit description=4 -hydroxyphenylpyruvate dioxygenase
  Subcellular localization annotation: CTP_CleavageSite=36; ConfidenceScore=5.13e-01
MPPTPTPAAAAPGAAAAPAAGDQAAFRLVGHRGFVRVNPRSDRFHTLSFHHVELWCADATSAAGRFSFGLGAPLAARSDLSTGNSAHASLLLRSGSLAFLFTAPYAHGVDAATASLPSFSAPAARSFAADHGLAVRAIGLRVADAEDAFR

SEQ ID NO: 85507 - protein, 146 aa, Setaria italica
  Transcript Sequence Number=SeqID_19533
  Homolog annotation: Hit_ID=B6V8G0; Match level="QueryCoverage=58%, HitCoverage=24%, E-value=1e-32, Identity=73%"; Hit description =COG5125-like protein
VLNRLSFAQTVENIFALSFLVKDGRVEINIDDNGHHIVRPRNAPAASDVASGDVSYSHFVFRFDFKDWKLMKELVSEGEELLPHRTSQGATCTEENDQPNLEACAQRTPIRKLTRNRGLVLQEQVVQETPEENQTSKRKRLFRDQD

SEQ ID NO: 85508 - protein, 348 aa, Setaria italica
  misc_feature (287)..(287): Xaa can be any naturally occurring amino acid
  Transcript Sequence Number=SeqID_19534
  Gene Ontology: Mol. function=protein binding; Cellular component=Smc5- Smc6 complex
  Homolog annotation: Hit_ID=B6V8G0; Match level="QueryCoverage=77%, HitCoverage=76%, E-value=6e-77, Identity=52%"; Hit description =COG5125-like protein
  Pfam annotation: Domain name=Nse4; Domain location=23-297; Score= -16.3; E_value=1.7e-08; Accession=PF08743.2; Description=Nse4
GLERLVGPTTDGGAQGESSGERQGMAERRMLRSRYLAMKNRISDERDEMARVDSDKFTAIISQVECLHELVQRPREQIADAEALLDIASTLVTSVRSQSSEGITPSDFITALLKKFGEQESPDDEATSLRWGDLGLSVSHAFRPVPGCCTMLGPMNTEVKQRKVSTVSRKRTARPTENTRPEELADSSEEVKTDTDRNVLVIFDTLRRKKSARLENLVLNRLSFAQTVENIFALSFLVKDGRVEINIDDNGHHIVRPRNAPAASDVASGDVSYSHFVFRFDFKDWKXTSQGATCTEENDQPNLEACAQRTPIRKLTRNRGLVLQEQVVQETPEENQTSKRKRLFRDQD

SEQ ID NO: 85509 - protein, 77 aa, Setaria italica
  Transcript Sequence Number=SeqID_19535
PMWEVGCKAYSVSHMGLGLLVPVSPEPTRITRGHWSIIKRRVELEQARAQHSDTLGWNLLTQFANFALAPQIHIHIS

SEQ ID NO: 85510 - protein, 59 aa, Setaria italica
  Transcript Sequence Number=SeqID_19536
MARPRGKKRTAAQAAATDSSKPGAAAAGDSTKPEAAAKEPAARGRGRRPNAPPKPKAET

SEQ ID NO: 85511 - protein, 85 aa, Setaria italica
  misc_feature (15)..(15): Xaa can be any naturally occurring amino acid
  Transcript Sequence Number=SeqID_19537
  Gene Ontology: Cellular component=H4/H2A histone acetyltransferase complex; Biological process=regulation of transcription
  Pfam annotation: Domain name=CT20; Domain location=1-83; Score=120.2; E_value=6.6e-33; Accession=PF07904.5; Description=CT20 family
LRLLQALEFHPPSKXSKGVHRHFVLYGLMEYLRKSLDRQFSADEVLQLLDRFFNLEMLKPEDDEKDNFSQGEEFSLPESFFNKEE

SEQ ID NO: 85512 - protein, 208 aa, Setaria italica
  Transcript Sequence Number=SeqID_19538
  Gene Ontology: Mol. function=zinc ion binding; Cellular component =intracellular; Biological process=chromosome organization and biogenesis
  Homolog annotation: Hit_ID=Q9LPT6; Match level="QueryCoverage=100%, HitCoverage=100%, E-value=1e-100, Identity=81%"; Hit description =F11F12.1 protein
  Pfam annotation: Domain name=OTU; Domain location=11-121; Score =107.2; E_value=5.7e-29; Accession=PF02338.11; Description=OTU-like cysteine protease
MEGAVVRRVIPSDNSCLFNAVGYVMEHNRNKASELRQVIAATVASDPAKFNEVFLGKPNEAYCAWILDPEKWGGAIELSILSAYYGREIAAYDIQTTRCDLYGQEKNYSERVMLIYDGLHYDALAMSPAEGAPEEFDQTIFPVNHNRSIGPAEGLAINLVKEAQRKRSYTDTANFTLRCGVCQIGVIGQKEAVEHAQATGHVNFQEYK

SEQ ID NO: 85513 - protein, 53 aa, Setaria italica
  Transcript Sequence Number=SeqID_19539
GYDLATVNSMKQEILQTCGGLPLAAKTMGDILARSSFSSPASTSTSQELIHQE

SEQ ID NO: 85514 - protein, 75 aa, Setaria italica
  Transcript Sequence Number=SeqID_19540
  Gene Ontology: Mol. function=substrate-specific transmembrane transporter activity; Cellular component=integral to membrane
  Homolog annotation: Hit_ID=B6U7I8; Match level="QueryCoverage=100%, HitCoverage=15%, E-value=4e-22, Identity=82%"; Hit description =Carbohydrate transporter/ sugar porter
MKKEEDLESPLLSDGEPAPADSKGNAYALVCTLLASLTSIIYGYNRGVMSGAQKFVQADLGVTYGQLEVLIGATS

SEQ ID NO: 85515 - protein, 153 aa, Setaria italica
  misc_feature (107)..(107): Xaa can be any naturally occurring amino acid
  Transcript Sequence Number=SeqID_19541
  Pfam annotation: Domain name=LRR_1; Domain location=52-74; Score=7.2; E_value=13; Accession=PF00560.25; Description=Leucine Rich Repeat
  Pfam annotation: Domain name=LRR_1; Domain location=76-98; Score =10.7; E_value=2.8; Accession=PF00560.25; Description=Leucine Rich Repeat
  Pfam module annotation: Pfam domain module=LRR_1::LRR_1; Domain location=52-74::76-98
  Subcellular localization annotation: CTP_CleavageSite=60; ConfidenceScore=5.44e-01
FHNIRNRPCYIFTGGGTNQQPSLQLYSNHTTSLTISTTSQHQSFRLFHHFPALRKLNFSFCSNLMSLPESIQQLSSLQSLELKYCRSISALPEWLSNISSLKTLMIXSSLPSCIQQLTNLQQLVIDRNDKKLQQWCESEQNKTKLAHINIVSS

SEQ ID NO: 85516 - protein, 54 aa, Setaria italica
  Transcript Sequence Number=SeqID_19542
MRSTCGSFSRTFHVILVRTQQILLVCILIHFLKRYYDNFLNEAFLIFWRCLSCF

SEQ ID NO: 85517 - protein, 986 aa, Setaria italica
  Transcript Sequence Number=SeqID_19543
  Gene Ontology: Mol. function=transcription elongation regulator activity; Cellular component=intracellular; Biological process =positive regulation of RNA elongation from RNA polymerase II promoter
  Homolog annotation: Hit_ID=B9SJK4; Match level="QueryCoverage=93%, HitCoverage=89%, E-value=0.0, Identity=65%"; Hit description =Suppressor of ty, putative
  Pfam annotation: Domain name=KOW; Domain location=223-254; Score =23.4; E_value=0.0009; Accession=PF00467.21; Description=KOW motif
  Pfam annotation: Domain name=KOW; Domain location=375-404; Score =28.2; E_value=3.3e-05; Accession=PF00467.21; Description=KOW motif
  Pfam annotation: Domain name=KOW; Domain location=427-458; Score =27.4; E_value=5.8e-05; Accession=PF00467.21; Description=KOW motif
  Pfam annotation: Domain name=KOW; Domain location=551-582; Score =11.5; E_value=0.66; Accession=PF00467.21; Description=KOW motif
  Pfam annotation: Domain name=KOW; Domain location=662-693; Score =26.7; E_value=9.5e-05; Accession=PF00467.21; Description=KOW motif
  Pfam annotation: Domain name=KOW; Domain location=937-968; Score =19.5; E_value=0.014; Accession=PF00467.21; Description=KOW motif
  Pfam annotation: Domain name=Supt5; Domain location=173-220; Score =62.5; E_value=1.6e-15; Accession=PF03439.5; Description=Supt5 repeat
  Pfam annotation: Domain name=Supt5; Domain location=97-141; Score =51.9; E_value=2.5e-12; Accession=PF03439.5; Description=Supt5 repeat
  Pfam module annotation: Pfam domain module=KOW::KOW::KOW::KOW::KOW::KO W::Supt5::Supt5; Domain location=223-254::375-404::427-458::551 -582::662-693::937-968::173-220::97-141
REDNFIDDSAIEDEDEDDEDDDGGARPRKKGGGGVRGFFDEEAQVDEDEEEEEEGEGEDDFINDAGADIPDEDVVRVARRHSMPMRDEDEDIDEIERQVRERYARSTHIEYGEEAAEVEQQALLPSVKDPKLWMVKCAIGHERETAICLMQKYIDRSDLQIKSVVALDHLKNYIYVEAEKEAHVKEACKGLRNIYASAKITLVPIKEMADVLSVESKSVDLSRDSWVRMKLGIYKGDLAKVVDVDNVRQRVDVKLIPRVDLQALASKLEGREAVKKKAFVPPPRFFNIDEAREMHIRVERRRDKESGEYFEWVDNLKFKDGFLYKSVSTKSIHTNNIQPTFDELEKFRKPGDDMNGDVASLSTLFANRKKGHFMKGDAVIVIKGDLKNLEGWVEKVEDETVHIRPKISDLPKTLAFNEKELCKYFKPGDHVKVISGVQEGATGMVVKVEGHVLIILSDTTKEHIRVFADHVVESSEITTGITRIGDYELHDLVLLDNLSFGVIIRVEAEAFQVLKGVPDRPEVVLVKLREIKSKIDRRASAKDRSNNIISAKDVVRVVEGACKGKQGPVEHIHKGILFIYDRHHLEHAGFICAKAQSCLLVGGSTGGRRGNGMDTADARLGALRSPASILQSPGRLPPRGPHMNFGGRFGGGRGGRGHDALVGKCIKIKSGPYKGYRGRVKEVTGALVRVELDSLMKIVTVKRDDIADTPTVATPFREPRYSLGGETPMHPSRTPHHAYQTPMRDPGATPIHDGMRTPMRSRAWAPMSPPRDNWEDGNPATWGSSPAYQPGTPPARPYEAPTPGSGWANTPGVSFNDAPTPRENYANAPSPYVPSTPVGQPMTPNSAAYLPGTPGGQPMTPGNVGMDIMSPIIGGEGEGTWLLPDVLVNVLRGGDDGPGVVREVLGDGSCRVALGSSGNGDMVTVLPNELEVIRPKKSDRIKILNGNFRGYTGKLIGIDGSDGIVKLDDTYEVKILDMVILAKLAT

SEQ ID NO: 85518 - protein, 89 aa, Setaria italica
  Transcript Sequence Number=SeqID_19544
YTLCSSKHTKRSTYVVLQYCNDSTMGTSIQSTDMMCTKMHEHMTFLTRSYLKHDPDTMNYVLLLEWLADTDDPSNKADSWLSKSSGCVI

SEQ ID NO: 85519 - protein, 73 aa, Setaria italica
  Transcript Sequence Number=SeqID_19545
TLLAINWQQHSELFSHQQNNAILLLFSSHIVQIHQQDCNALLHISCITIGSRLTERQFTSQTNVGVLKPLAQC

SEQ ID NO: 85520 - protein, 111 aa, Setaria italica
  Transcript Sequence Number=SeqID_19546
WSINFLVCLLLLGSVCGVPESTPKRSRTAEVGQITLMAQGDGSHTKHLELPEKDGPHAPQAAARRCQQPRLQRFIANTQTVQQFTRTHSYSKPATSTNSHKDRPSLPYYRT

SEQ ID NO: 85521 - protein, 88 aa, Setaria italica
  Transcript Sequence Number=SeqID_19547
  Subcellular localization annotation: CTP_CleavageSite=38; ConfidenceScore=5.42e-01
AVSSRVSILMLSFLISCCSSALMASPVLPIGENLTLMRDSSRRDPSMKAMSATFPSLLPSPLDRFRLDFMASLSSPCPAFPSISVPLS

SEQ ID NO: 85522 - protein, 96 aa, Setaria italica
  Transcript Sequence Number=SeqID_19548
PAAALLRDNDVVVAWPAAVRPRCCRRHGGVGAGVRGAGVAVVVLAAGHRVVPVGPDVQALQPFNVEAIPEALQAVTHRRIHRSWVAGAVARQRGCS

SEQ ID NO: 85523 - protein, 73 aa, Setaria italica
  Transcript Sequence Number=SeqID_19549
MRELASSFAAAASASSSASAPLLGGWWNDVNESPEWQHAAFFSLSAAYALVSAVALVRPSDPPLWPLGPQKNI

SEQ ID NO: 85524 - protein, 57 aa, Setaria italica
  Transcript Sequence Number=SeqID_19550
  Gene Ontology: Cellular component=integral to membrane
  Homolog annotation: Hit_ID=B6TDW9; Match level="QueryCoverage=85%, HitCoverage=16%, E-value=2e-20, Identity=93%"; Hit description =Tobamovirus multiplication-like protein
LIRIQRRVPELGWTTQKIFHLMNFLVNGVRALVFGFHVHVFLLRTKVYKLVLLDLSS

SEQ ID NO: 85525 - protein, 293 aa, Setaria italica
  Transcript Sequence Number=SeqID_19551
  Gene Ontology: Cellular component=integral to membrane
  Homolog annotation: Hit_ID=B6TDW9; Match level="QueryCoverage=76%, HitCoverage=74%, E-value=1e-100, Identity=81%"; Hit description =Tobamovirus multiplication-like protein
  Pfam annotation: Domain name=DUF1084; Domain location=56-293; Score =493.2; E_value=3.4e-145; Accession=PF06454.3; Description=Protein of unknown function (DUF1084)
  Subcellular localization annotation: CTP_CleavageSite=8; ConfidenceScore=5.33e-01
MGFVLSSSASMSMSSSSATKVYGEEETCPHRTTPSPPPPSPFPESEMRELASSFAAAASASSSASAPLLGGWWNDVNESPEWQHAAFFSLSAAYALVSAVALIQLIRIQRRVPELGWTTQKIFHLMNFLVNGVRALVFGFHVHVFLLRTKVYKLVLLDLPGLLFFSTYTLLVLFWAEIYHQARSLPTDKLRPAYIAVNSIIYVVQVCIWIYLGINDNAAVELASKLFIVAVSFVALLGFSVYGGRLFFLLRRFPIESKGRQKKLYEVGTVTAICVTCFLIRCDVVALSAFDRD

SEQ ID NO: 85526 - protein, 287 aa, Setaria italica
  misc_feature (66)..(66): Xaa can be any naturally occurring amino acid
  Transcript Sequence Number=SeqID_19552
  Gene Ontology: Mol. function=oxidoreductase activity
  Homolog annotation: Hit_ID=B6TAS2; Match level="QueryCoverage=98%, HitCoverage=99%, E-value=1e-149, Identity=93%"; Hit description=RNA recognition motif containing protein
  Pfam annotation: Domain name=RRM_1; Domain location=9-76; Score=8.0; E_value=0.036; Accession=PF00076.14; Description=RNA recognition motif. (a.k.a. RRM, RBD, o
MSPNAMRTVKVSNLSLNAVKREITEFFSFSGDIEYVEMQSESEWSQLAYVTFKDSQGADTAVLLSXGATIVDRAVIITPAENYQLPPEALKQLSGASPTTESTVRKAEDVVSSMLAKGFVLSKDALNLAKSFDERHNILSNATATVASIDRQYGLSEKINLGRAIVGSKVKEVDERYQVSELTKSALAAAEQKASIAGSAILSNQYVSAGASWLTSAFGMVTKAAGDMTSMAKDKVERAEEERKAIMWEERNGLVSEYAKMHLDEPSSWEPAVLPLESVDEQKLQAV

SEQ ID NO: 85527 - protein, 381 aa, Setaria italica
  Transcript Sequence Number=SeqID_19553
  Gene Ontology: Mol. function=ATPase activity, coupled to transmembrane movement of ions, phosphorylative mechanism; Cellular component=membrane; Biological process=regulation of cell growth
  Homolog annotation: Hit_ID=B6SRI7; Match level="QueryCoverage=99%, HitCoverage=98%, E-value=1e-151, Identity=72%"; Hit description=SAP -like protein BP-73
  Pfam annotation: Domain name=Rho_N; Domain location=344-380; Score =35.5; E_value=2.1e-07; Accession=PF07498.4; Description=Rho termination factor, N-terminal dom
  Subcellular localization annotation: CTP_CleavageSite=50; ConfidenceScore=5.35e-01
MSAAAPALLHHRGVSGRGTLPVHHGDCRVPPGACFMGTSPMLGPMRVSLVCSASPNNHRPRNSDISRQQKGGSSRGKGKPYQDKDDSESIDEFDSDIMFSKNGPPISLASNSRPQATSAPGEREKEIVELFKRVQAQLRARGKSREDKKPEPAKVQGERGSVDSLLKLLRKHSVDQRRKSSDDKEQNFDLTRRSSDSGNRQSSTIFGTKSDTQEEQKKPPSAPFKRPASNFRRRSPVPGVKFHPVTNADADRKSIASNVADAVQQSKTVLDERTATDEPDSVSPYEPDSVISSENISLDDFDAISDDESDTEDLNEEYPEPSLEIADVTDTDESHDNSAEESSDLSSLKVAELRELAKSRGIKGYSKMKKNELVEILSGMA

SEQ ID NO: 85528 - protein, 257 aa, Setaria italica
  Transcript Sequence Number=SeqID_19554
  Homolog annotation: Hit_ID=B6SU58; Match level="QueryCoverage=86%, HitCoverage=79%, E-value=1e-120, Identity=94%"; Hit description=COV1
  Pfam annotation: Domain name=DUF502; Domain location=98-204; Score =129.1; E_value=1.4e-35; Accession=PF04367.5; Description=Protein of unknown function (DUF502)
AAAAAAHASPSTRTGAESDDDESKPSSASAASAAAQTGREAFHKVVHSWASKKFMTGCVILFPIAVTFYVTWWFFRFVDGFFSPIYAHLGINIFGLGFVTSIAFIFVVGVFMSSWLGASILGLGEWFIKRMPFVRHIYNASKQISAAISPDQNKHAFKELVIIRHPRIGEYAFGFITSEVLLQGYSSEEQMCCVYVPTNHLYIGDIFLVSSSDVIRPNISVREGIEIVVSGGMSMPQVLSILESEPNQLSRIRSTRS

SEQ ID NO: 85529 - protein, 59 aa, Setaria italica
  Transcript Sequence Number=SeqID_19555
MQRYGLQLRTKPAASSSSRAPPPPARPLAAFADDDDDDVEAEILRQAAKKRALQKVEEQ

SEQ ID NO: 85530 - protein, 87 aa, Setaria italica
  Transcript Sequence Number=SeqID_19556
  Subcellular localization annotation: CTP_CleavageSite=56; ConfidenceScore=5.11e-01
LVHHVWASFRIGESSVRLSGLLSGRVYFSSFLFQTSMGNILSKRLSWLCCGSWMIRQVVTGNEDEFVPFFGVFRDFYEIEISFAGLS

SEQ ID NO: 85531 - protein, 47 aa, Setaria italica
  Transcript Sequence Number=SeqID_19557
GFQLTNKDNKLISMLIVEVAIMRKDSHLGSGTVSMRINMVWDLWVER

SEQ ID NO: 85532 - protein, 89 aa, Setaria italica
  Transcript Sequence Number=SeqID_19558
RKSARTEEHARRSGDPELQICTNKHGSGEIKYARVLNNTITILVSRSVERMRYKRNAAIIQWQPTSLSHQLSIPISPLTRTHARTLDQI

SEQ ID NO: 85533 - protein, 252 aa, Setaria italica
  Transcript Sequence Number=SeqID_19559
  Gene Ontology: Cellular component=endoplasmic reticulum
  Homolog annotation: Hit_ID=B6T616; Match level="QueryCoverage=100%, HitCoverage=100%, E-value=1e-111, Identity=80%"; Hit description =Seed maturation protein
  Pfam annotation: Domain name=Reticulon; Domain location=66-228; Score= 224.7; E_value=2.3e-64; Accession=PF02453.9; Description=Reticulon
MAEQHKEESVLEKLSDKLHGRGGGSSSSSSDSDDERSSATTAVKAKIYRLFGREKPVHSVLGGGKPADLFLWRNKRISGGVLAGATAIWLLFEVMDYHLLTLLCHCLILTLAILFLWSNATTFINKSPPNIPEVKIPEDLAVNVARSLRYEINRGFATLRGIGQGHDLKKFLIVVAGLWILSVLGSCCNFLTLSYIVFMVLYTVPVLYEKHEDKVDAFGEKTMVELKKYYAIFDEKCLSKIPKGPSRDKKQH

SEQ ID NO: 85534 - protein, 93 aa, Setaria italica
  Transcript Sequence Number=SeqID_19560
GSASPPSETTTTPAATTPATEEPSSSTAAADPDASGASPEPAEDSPAAATAPAGAGYKLPQLLHAAGATRSRGMAAGTVFITVFLASVATLSV

SEQ ID NO: 85535 - protein, 444 aa, Setaria italica
  Transcript Sequence Number=SeqID_19561
  Homolog annotation: Hit_ID=B9RS30; Match level="QueryCoverage=77%, HitCoverage=80%, E-value=1e-135, Identity=65%"; Hit description =Catalytic, putative
  Pfam annotation: Domain name=Peptidase_S9; Domain location=203-441; Score=-63.2; E_value=0.0077; Accession=PF00326.13; Description =Prolyl oligopeptidase family
MGAPSHVGHVASVAPGAVRHRRREFFSAADLAHVPVSRTLEWGVVYLKTQQRQRLRSKYNPGPSSRDATTGAPSAALPGREMAAASTAYADADAGAGIRSEFLQVLRSRRRDLQVPLSVEQGSPVKNPMYQKPLGPNEAVAMESCPRKEVENFKEKLVEENFYLISELGEQGRVPVLLLKLNDPVPKRKPVIVFLHSSYKCKEWLRPLLEAYASRGYICVAIDSRYHGERASSETTYIDALKSAWRNGDTMPFIFDTVWDLIKLGDHLSEREDVDPCRIGITGESLGGMHAWFAAFVDTRYSVIVPIIGVQGFRWAIDNNKWQARANSIKPLFEEARIDLGKSEIDTEVVEKVWEKIAPGLDSQFDAPHSLRLIAPRPLLLLNGAEDPRCPIAGLEEPSSRAAKAYEESGSAEKFMFIAEPGIGHRMTVNMVKEASDWFDRFLW

SEQ ID NO: 85536 - protein, 114 aa, Setaria italica
  Transcript Sequence Number=SeqID_19562
  Homolog annotation: Hit_ID=B6U0P3; Match level="QueryCoverage=100%, HitCoverage=32%, E-value=2e-22, Identity=55%"; Hit description =Endonuclease III-like protein 1
  Subcellular localization annotation: CTP_CleavageSite=30; ConfidenceScore=5.20e-01
MPLALLLSRIRLSPAAMRTTRSAASARLVRADLNPVVREVKRESSISFDISKPESPSVKRKRVKQELEENGEHPKKQAGIVPDIEDFRYDKTKASTSSIKVEKKVRVSSVIKVG

SEQ ID NO: 85537 - protein, 129 aa, Setaria italica
  Transcript Sequence Number=SeqID_19563
TRRGCKGICMCLDCCTFRLRADRAFEFSRKQMQEADDIICNLLKEVASLRSLVEKPAGQQESTQAACKRASQVEEVARERCQQMFVDLNSHCRIPGPRVRFAQYVEEKKALPSPREKKASPSPRSSSWR

SEQ ID NO: 85538 - protein, 54 aa, Setaria italica
  Transcript Sequence Number=SeqID_19564
ARATIFCHHSFRFYVEIMNLLFGGAGNFPWKAQLLLDAIVMSPIDRSVTRRNHS

SEQ ID NO: 85539 - protein, 128 aa, Setaria italica
  Transcript Sequence Number=SeqID_19565
  Homolog annotation: Hit_ID=Q9SGX1; Match level="QueryCoverage=62%, HitCoverage=15%, E-value=2e-24, Identity=66%"; Hit description =F1N19.1
LNLKKLGSPPAERSMDISALEKALRFINIRKDGLPAAVHSIVISAPSGTARTHRFATQTVELPAQEGERVTISLAAPSNVYREMGPLKISARSQGFKPGEPMCLTNHINGQVSKLLRAPSKNEGFVFR

SEQ ID NO: 85540 - protein, 156 aa, Setaria italica
  Transcript Sequence Number=SeqID_19566
  Gene Ontology: Mol. function=protein serine/threonine kinase activity; Cellular component=plasma membrane; Biological process =protein amino acid phosphorylation
  Homolog annotation: Hit_ID=B6T7B9; Match level="QueryCoverage=100%, HitCoverage=34%, E-value=8e-44, Identity=51%"; Hit description =Phytosulfokine receptor
  Pfam annotation: Domain name=Pkinase_Tyr; Domain location=56-156; Score=-143.2; E_value=0.00033; Accession=PF07714.9; Description =Protein tyrosine kinase
WRKAQEALDSKEIKISNATSSTMLPTQGKRNLLKMSKKEVITMMDFSVLESATSKFNEKNILGKGGFGCVYRACLDKSSVAAVKKLNCCREEVEKEFENELDFLGKIRHPNVISVLGYCIHEDTRLLVYELMQNGSLETQLHGPYRGSALSWHIRL

SEQ ID NO: 85541 - protein, 220 aa, Setaria italica
  Transcript Sequence Number=SeqID_19567
  Gene Ontology: Mol. function=microtubule motor activity; Cellular component=microtubule associated complex; Biological process =microtubule-based movement
  Homolog annotation: Hit_ID=Q93XG2; Match level="QueryCoverage=93%, HitCoverage=26%, E-value=1e-105, Identity=89%"; Hit description =Kinesin heavy chain (Fragment)
VLELESNEGKSNDDLEEDNSGPLQDTPDSWDRLFKEQMQHIIQLWDLCHVSIIHRTQFYLLFRGDRADQIYIEVEVRRLTWLQQHFAEVGDASPAAGDDTAVSLVSSIKALRNEREFLARRMGSRLTDEERERLFIKWQVPLDAKQRKLQLVNKLWTDPNDQVHIEESADLVARLVGFCEGGNISKEMFELNFAVPTSRKPWLVGWQPISNMIREKTQLW

SEQ ID NO: 85542 - protein, 74 aa, Setaria italica
  Transcript Sequence Number=SeqID_19568
WTLDNNPFQEELLPTVRHDNSKLLAITLKWTRTSTHTLIYSKHWELTPICHKGSTESMCEHTVSYRQQHALIAT

SEQ ID NO: 85543 - protein, 139 aa, Setaria italica
  Transcript Sequence Number=SeqID_19569
  Subcellular localization annotation: CTP_CleavageSite=56; ConfidenceScore=5.75e-01
SPEPSPSSPSTTPFFSATASGTRSHPQAHPPSIVSRSICSPPVQGRFSAEGTRGASAMPGGEDVRKVSRQDIQLVSTLMIPPPPPFFSFILLLFFFSLLVSDSLLRFLIAHHAEATLSLIACIFGIFSLYILLPDRVEK

SEQ ID NO: 85544 - protein, 354 aa, Setaria italica
  Transcript Sequence Number=SeqID_19570
  Homolog annotation: Hit_ID=Q9SS36; Match level="QueryCoverage=89%, HitCoverage=98%, E-value=3e-74, Identity=49%"; Hit description =F14P13.15 protein
  Pfam annotation: Domain name=A_thal_3526; Domain location=50-103; Score=119.2; E_value=1.3e-32; Accession=PF09713.2; Description=Plant protein 1589 of unknown function (A
LFLFYFCFVLVFVFGLGVAGRFSAEGTRGASAMPGGEDVRKVSRQDIQLVQNLIERCLQLYMNQKEVVDTLSLQAKIEPSFTELVWQKLEEENREFFKAYYVRLMLMNQIVAFNKLLEQQYQIMSKDHPSGVPSMPPTAPNGSNSSTLNQNVSFLPDTIPSAAMQDSLLHNGGSNGIVNGASSSDQFMYPSKVVHGLPSGMDASSSLLAAHNSTVGQFNGHNGATIKTESGYSSNSDFGFGNENVFLEQSVGDVSGGSFSSSELNGPQLGDPIMDMDSSSYGFLSQIPRNFSFSDLTEDFSQSAEILENYGRSPFIPSEANNFPESAAGEHAEIGNRRLDTISEGVNYEDFGSD

SEQ ID NO: 85545 - protein, 54 aa, Setaria italica
  Transcript Sequence Number=SeqID_19571
  Gene Ontology: Mol. function=kinase activity; Biological process =carbohydrate metabolic process
  Homolog annotation: Hit_ID=B6T9R4; Match level="QueryCoverage=88%, HitCoverage=8%, E-value=1e-21, Identity=97%"; Hit description =Xylulose kinase
KTLCIFRFQFDKNCLVIQWSGDNPNSLAGLTLNTPGDLAISLGTSDTVFGITAE
